(19) United States
(12) Patent Application Publication
(10) Pub. No.: US 2016/0040215 A1
(43) Pub. Date: Feb. 11, 2016

(54) Methods for Pathogen Detection and Enrichment from Materials and Compositions

(71) Applicant: SERES THERAPEUTICS, INC., Cambridge, MA (US)

(72) Inventors: Matthew R. Henn, Somerville, MA (US); John Grant Aunins, Doylestown, PA (US); David Arthur Berry, Brookline, MA (US); David N. Cook, Brooklyn, NY (US)

(21) Appl. No.: 14/776,676

(22) PCT Filed: Mar. 14, 2014
(86) PCT No.: PCT/US14/29539

§ 371 Date: Sep. 14, 2015

Related U.S. Application Data
(60) Provisional application No. 61/781,854, filed on Mar. 14, 2013.

(51) Int. Cl. C12Q 1/68; G01N 33/569

(52) U.S. Cl. CPC C12Q 1/689; G01N 33/56911

(57) ABSTRACT

Provided are methods and compositions for characterization of bacterial compositions for the maintenance or restoration of a healthy microbiota in the gastrointestinal tract of a mammalian subject, and the resulting characterized compositions. Provided are methods of characterizing bacterial compositions including subjecting the compositions to various detecting processes.

### RELATED APPLICATIONS

[0001] This application is related to U.S. Provisional Application No. 61/781,854, filed Mar. 14, 2013, which is incorporated by reference in its entirety.

### REFERENCE TO A SEQUENCE LISTING

[0002] This application includes a Sequence Listing submitted electronically as a text file named 26335PCT_SEQUENCELISTING.TXT, created on Mar. 14, 2014 with a size of 4,196,119 bytes. The sequence listing is incorporated by reference.

### BACKGROUND

[0003] Mammals are colonized by microbes in the gastrointestinal (GI) tract, on the skin, and in other epithelial and tissue niches such as the oral cavity, eye surface and vagina. In particular, the gastrointestinal tract harbors an abundant and diverse microbial community. It is a complex system, providing an environment or niche for a community of many different species or organisms, including diverse strains of bacteria. Hundreds of different species may form a commensal community in the GI tract in a healthy person, and this complement of organisms evolves from the time of birth to ultimately form a functionally mature microbial population by about 3 years of age. Interactions between constituents of these populations, between them and surrounding environmental components, and between microbes and the host, e.g. the host immune system, shape the community structure, with availability of and competition for resources affecting the distribution of microbes. Such resources may be food, location and the availability of space to grow or a physical structure to which the microbe may attach. For example, host diet is involved in shaping the GI tract flora. The situation is similar with respect to other human microbial niches, e.g. skin, eye, ear, nose, throat, etc.

[0004] A healthy microbiota provides the host with multiple benefits, including colonization resistance to a broad spectrum of pathogens, essential nutrient biosynthesis and absorption, and immune stimulation that maintains a healthy gut epithelium and an appropriately controlled systemic immunity. In settings of ‘dysbiosis’ or disrupted symbiosis, microbiota functions can be lost or deranged, resulting in increased susceptibility to pathogens, altered metabolic profiles, or induction of proinflammatory signals that can result in local or systemic inflammation or autoimmunity. Thus, the microbiota plays a significant role in the pathogenesis of many diseases and disorders. This includes a variety of pathogenic infections of the gut. For instance, subjects become more susceptible to pathogenic infections when the normal intestinal microbiota has been disturbed due to use of broad-spectrum antibiotics. Many of these diseases and disorders are chronic conditions that significantly decrease a subject's quality of life and can be ultimately fatal.

[0005] Manufacturers of probiotics have asserted that their preparations of bacteria promote mammalian health by preserving the natural microflora in the GI tract and reinforcing the normal controls on aberrant immune responses. See, e.g., U.S. Pat. No. 8,034,601. Probiotics, however, have been limited to a very narrow group of genera and a correspondingly limited number of species; they also tend to be limited in the number of species provided in a given probiotic product. As such, they do not adequately replace or encourage replacement of the missing natural microflora of the GI tract in many situations. For example, despite routine inoculation with Bifidobacterium, Lactobacillus, Lactococcus, and Streptococcus species, significant changes in the bacterial species composition of monozygotic twin pairs were not observed (McNulty et al. (2011) Sci. Transl. Med. 3(106):106.

[0006] Thus practitioners have a need for a method of populating a subject's gastrointestinal tract, and other niches, with a diverse and useful selection of microbiota in order to alter a dysbiosis. In response to the need for durable, efficient, and effective compositions and methods for treatment of diseases, restoring or enhancing microbiota functions by providing a multi-component bacterial composition with a diverse and/or complex microbial composition is a solution. Assessing multivalent compositions to verify their safety, identity, viability, potency and purity for the treatment of mammalian subjects is required to assure the compositions are of the appropriate quality and consistency to meet global regulatory standards. A particular challenge for multi-component compositions is the detection of microbial contaminants at low levels in the composition (e.g. see Temmerman et al 2003 Identification of antibiotic susceptibility of bacterial isolates from probiotic products. Int J. of Food Microbiology 81:1-10 and Temmerman et al 2003 Development and Validation of a nested-PCR-denaturing gradient gel electrophoresis method for taxonomic characterization of bifidobacterial communities). Due to the complex nature of the microbial compositions there is a lack of techniques to appropriately characterize a beneficial microbial composition for therapeutic and other health uses.

### SUMMARY OF THE INVENTION

[0007] Methods of the invention are provided for characterizing a therapeutic composition, comprising the steps of: (a) providing a therapeutic composition comprising at least one desired bacterial strain and optionally comprising at least one undesired bacterial strain; (b) subjecting the therapeutic composition to a first detection step and a second detection step, wherein the first detection step comprises attempting to culture at least one undesired bacterial strain, and wherein the second detection step comprises attempting to amplify at least one target nucleic acid sequence not present in the desired bacterial strain, thereby characterizing the therapeutic composition.

[0008] In one embodiment, the desired bacterial strain comprises a plurality of desired bacterial strains. In another embodiment, the result of the attempt to culture the at least one undesired bacterial strain is that the undesired bacterial strain is not detectably cultured. In other embodiments, the undesired bacterial strain is not known to be present in the therapeutic composition. In yet another embodiment, the undesired bacterial strain is a contaminating bacterial strain derived from the manufacturing environment or process. In some embodiments, the result of the attempt to amplify the at least one target nucleic acid sequence is that the target nucleic acid sequence is not detectably amplified. In one embodiment, the target nucleic acid sequence is present in i) a bacterial strain derived from a fecal culture, and/or ii) a fecal material.

[0009] In one aspect, the first detection step has a sensitivity for the undesired bacterial strain of at least 1×10⁻³, and wherein the second detection step has a sensitivity for the undesired bacterial strain of at least 1×10⁻³. In another aspect, the first detection step has a sensitivity for the undesired bacterial strain of at least 1×10⁻⁴, and wherein the second detection step has a sensitivity for the undesired bacterial strain of at least 1×10⁻⁴. In some aspects, the first detection step has a sensitivity for the undesired bacterial strain of at least 1×10⁻⁵, and wherein the second detection step has a sensitivity for the undesired bacterial strain of at least 1×10⁻⁵. In another aspect, the method includes the step of detecting, or attempting to detect, a non-bacterial microbial contaminant in the therapeutic composition. In some aspects, the non-bacterial microbial contaminant comprises a phage, virus, or eukaryotic contaminant.

[0010] In other aspects, the first detection step is performed prior to the second detection step. In another aspect, the first detection step is performed after the second detection step. In certain aspects, the first detection step and the second detection step are performed concurrently. In one embodiment, the second detection step is carried out using a product of the first detection step, the first detection step is carried out using a product of the second detection step. In another embodiment, the therapeutic composition is validated to detect a contaminant in a background of 1×10⁵ CFU of the product bacteria. In yet another embodiment, the method includes the step of attempting to enrich at least one undesired bacterial strain in the therapeutic composition.

[0011] In some embodiments, the invention includes a validated therapeutic composition provided by the method described above.

[0012] In other embodiments, a method is provided of characterizing a therapeutic composition, comprising the steps of: (a) providing a therapeutic composition comprising at least one desired entity and optionally comprising at least one undesired entity; (b) subjecting the therapeutic composition to an enrichment step wherein the at least one undesired entity or component thereof, if present in the therapeutic composition, is enriched; and (c) subjecting the enriched therapeutic composition to a first detection step and a second detection step, wherein the first detection step comprises attempting to detect the undesired entity at a concentration of about less than or equal to 1×10⁻³ the concentration of the desired entity, and wherein the second detection step comprises attempting to detect the undesired entity at a concentration of about less than or equal to 1×10⁻³ the concentration of the desired entity, wherein the first detection step and the second detection step are not identical, thereby characterizing the therapeutic composition.

[0013] In one aspect, the first detection step comprises attempting to detect the undesired entity at a concentration of about less than or equal to 1×10⁻⁴ the concentration of the desired entity, and wherein the second detection step comprises attempting to detect the undesired entity at a concentration of about less than or equal to 1×10⁻⁴ the concentration of the desired entity. In another aspect, the first detection step comprises attempting to detect the undesired entity at a concentration of about less than or equal to 1×10⁻⁵ the concentration of the desired entity, and wherein the second detection step comprises attempting to detect the undesired entity at a concentration of about less than or equal to 1×10⁻⁵ the concentration of the desired entity.

[0014] In some aspects, the desired entity comprises a plurality of desired entities. In other aspects, the at least one desired entity comprises a bacteria. In one embodiment, the at least one undesired entity comprises a bacterium, yeast, virus or combination thereof.

[0015] In another embodiment, the first detection step and the second detection step are performed simultaneously. In some embodiments, the first detection step and the second detection step are performed sequentially. In another embodiment, the second detection step detects a product of the first detection step. In other embodiments, the undesired entity is not detectably present in the characterized therapeutic composition at a concentration of about greater than or equal to 1×10⁻⁷ the concentration of the desired entity. In yet another embodiment, the component of the undesired entity comprises a nucleic acid.

[0016] In other embodiments, a method is provided for characterizing a bacterial composition, comprising the steps of: (a) providing a composition comprising at least one desired bacterial species and optionally comprising at least one undesired entity; (b) subjecting the therapeutic composition to a first detection step and a second detection step, wherein the first detection step comprises attempting to detect the at least one undesired entity and the first detection step has a sensitivity for the undesired entity of at least 1×10⁻³, and wherein the second detection step comprises attempting to detect the at least one undesired entity and the second detection step has a sensitivity for the undesired entity of at least 1×10⁻³, wherein the first and second detection steps are not identical and have a combined sensitivity for the undesired entity of at least 1×10⁻⁶.

[0017] In some embodiments, the first detection step comprises attempting to detect the at least one undesired entity and the first detection step has a sensitivity for the undesired entity of at least 1×10⁻⁴, and wherein the second detection step comprises attempting to detect the at least one undesired entity and the second detection step has a sensitivity for the undesired entity of at least 1×10⁻⁴. In certain embodiments, the first detection step comprises attempting to detect the at least one undesired entity and the first detection step has a sensitivity for the undesired entity of at least 1×10⁻⁵, and wherein the second detection step comprises attempting to detect the at least one undesired entity and the second detection step has a sensitivity for the undesired entity of at least 1×10⁻⁵. In one embodiment, the at least one desired bacterial species comprises a plurality of desired bacterial species.

[0018] In certain aspects, the first detection step is performed prior to the second detection step. In one aspect, the first detection step and the second detection step are performed concurrently. In another aspect, the first detection step is carried out using a product of the second detection step. In yet another aspect, second detection step is carried out using a product of the first detection step.

[0019] In some embodiments, a method is provided for characterizing a spore population present in a composition comprising the steps of: (a) purifying the spore population present in a composition from a fecal donation; and (b) deriving the spore population present in a composition through culture methods. In one embodiment, the spore population present in a composition is purified via solvent, acid, detergent, or heat treatment, or a density gradient separation, filtration, or any combination of methods. In certain embodiments, the purifying increases the purity, potency, and/or concentration of spores in a sample. In certain embodiments, the spore population is derived starting from isolated spore former species or spore former OTUs or from a mixture of such species. In another embodiment, the spore population is in vegetative or spore form. In some embodiments, the spores can be purified from natural sources including but not limited to feces, soil, and water.

[0020] In some embodiments, the spore population is a non-limiting subset of a microbial composition. In one embodiment, the ethanol treated fecal suspensions are a non-limiting additional subset of a microbial composition enriched for spores and spore formers. In another embodiment, the spore population comprises spore forming species wherein residual non-spore forming species have been inactivated by chemical or physical treatments. In yet another embodiment, the chemical or physical treatments include ethanol, detergent, heat or sonication.

[0021] In one aspect, the non-spore forming species have been removed from the spore preparation by various separation steps. In another aspect, the separation steps include density gradients, centrifugation, filtration and chromatography. In yet another aspect, the inactivation and separation methods are combined to make the spore preparation. In some aspects, the spore preparation comprises spore forming species that are enriched over viable non-spore formers or vegetative forms of spore formers.

[0022] In another aspect, the spores are enriched by 2-fold, 5-fold, 10-fold, 50-fold, 100-fold, 1000-fold, 10,000 fold or greater than 10,000-fold compared to all vegetative forms of bacteria. In some aspects, the spores in the spore preparation undergo partial germination during processing and formulation such that the final composition comprises spores and vegetative bacteria derived from spore forming species.

### BRIEF DESCRIPTION OF THE DRAWINGS

[0023] FIG. 1 shows the hypervariable regions mapped onto a 16s sequence and the sequence regions corresponding to these sequences on a sequence map. FIG. 1 shows variable regions mapped onto the 16s sequence and annotated 16s sequence with bolded variable regions.

[0024] FIG. 2 shows the reference sequence used in FIG. 1.

[0025] FIG. 3 shows the linear range of DPA assay compared to CFU counts/ml.

[0026] FIG. 4 shows the detection of Tb-DPA complex fluorescence from a dilution series of a pure sample of dipicolonic acid.

[0027] FIG. 5 shows the detection of Tb-DPA complex fluorescence from a dilution series of a purified sporulated preparation of Clostridium bifermentans.

[0028] FIG. 6 shows different germinant treatments having variable effects on CFU counts from donor A (top) and donor B (bottom). The Y-Axes are spore CFU per ml.

[0029] FIG. 7 shows that germinants increase the diversity of cultured spore forming OTUs observed by plating.

[0030] FIG. 8 shows heat activation as a germination treatment with BHIS+oxgall.

[0031] FIG. 9 shows the effect of lysozyme and shows a lysozyme treatment enhances germination in a subset of conditions.

[0032] FIG. 10 shows the correlation between concentration of E. durans spiked into 20% ethanol treated feces and concentration calculated from colony counts on selective media (Enterococcosel Agar).

[0033] FIG. 11 shows the microbial diversity measured in the ethanol treated spore treatment sample and patient pre- and post-treatment samples. Total microbial diversity is defined using the Chao1 Alpha-Diversity Index and is measured at different genomic sampling depths to confirm adequate sequence coverage to assay the microbiome in the target samples. The patient pretreatment (purple) harbored a microbiome that was significantly reduced in total diversity as compared to the ethanol treated spore treatment (red) and patient post treatment at days 5 (blue), 14 (orange), and 25 (green).

[0034] FIG. 12 shows patient microbial ecology was shifted by treatment with an ethanol treated spore treatment from a dysbiotic state to a state of health.

[0035] FIG. 13 shows the augmentation of Bacteroides species in patients.

[0036] FIG. 14 shows species engrafting versus species augmenting in patients microbiomes after treatment with a bacterial composition such as but not limited to an ethanol-treated spore population.

[0037] FIG. 15 shows that heat and ethanol treatments reduce cell viability.

[0038] FIG. 16 shows reduction in non-spore forming vegetative cells by treatment at 60° C. for 5 min.

[0039] FIG. 17 shows time course demonstrates ethanol reduces both anaerobic and aerobic bacterial CFUs.

[0040] FIG. 18 shows donation spore concentrations from clinical donors.

[0041] FIG. 19 shows spores initially present in ethanol treated spore preparation as measured by DPA and CFU/ml grown on specified media.

[0042] The figures depict various embodiments of the present invention for purposes of illustration only. One skilled in the art will readily recognize from the following discussion that alternative embodiments of the structures and methods illustrated herein may be employed without departing from the principles of the invention described herein.

### DETAILED DESCRIPTION

### Definitions

[0043] As used herein, the terms “detect,” “detection,” and related terms mean the act or method of identifying an entity, particularly a microbial pathogen or environmental contaminant, or the presence thereof (without by necessity knowing the specific entity) in a material.

[0044] “Microbiota” refers to the community of microorganisms that occur (sustainably or transiently) in and on an animal subject, typically a mammal such as a human, including single cell and multicellular eukaryotes such as protozoan, helminthic and fungal eukaryotes, archaea, bacteria, and viruses (including bacterial viruses, i.e., phage). As used herein, “detectably cultured” mean the state, e.g., of a bacteria, of being cultured as provided herein so that such culture can be detected using the means provided herein or otherwise known in the art.

[0045] The term “microorganism” as used herein refers to an organism of microscopic or ultramicroscopic size such as a prokaryotic or a eukaryotic microbial species or a virus. The term “prokaryotic” refers to a microbial species which contains no nucleus or other organelles in the cell, which includes but is not limited to bacteria and archaea. The term “eukaryotic” refers to a microbial species that contains a nucleus and other cell organelles in the cell, which includes but is not limited to eukarya such as yeast and filamentous fungi, protozoa, algae, or higher Protista.

[0046] The terms “manufacturing environment” and “manufacturing process” relate to the environments and processes under which the therapeutic compositions and isolated bacteria as provided herein are produced, including good manufacturing process (GMP) and non-GMP environments and processes.

[0047] “Microbiome” refers to the genetic content of the communities of microbes that live in and on the human body, both sustainably and transiently, including eukaryotes (including spores), archaea, bacteria (including spores), and viruses (including bacterial viruses (i.e., phage)), wherein “genetic content” includes genomic DNA, RNA such as ribosomal RNA, the epigenome, plasmids, and all other types of genetic information.

[0048] “Dysbiosis” refers to a state of the microbiome of the gut or other body area, including mucosal or skin surfaces in which the normal diversity and/or function of the ecological network is disrupted. This unhealthy state can be due to a decrease in diversity, the overgrowth of one or more pathogens or pathobionts, symbiotic organisms able to cause disease only when certain genetic and/or environmental conditions are present in a subject, or the shift to an ecological network that no longer provides an essential function to the host and therefore no longer promotes health. A dysbiosis may be induced by illness or treatment with antibiotics or other environmental factors.

[0049] An “enrichment” or an “enrichment step” means the state of having a higher level of a quality including concentration, amount, percentage weight or dry volume, or absence of contaminants as compared to a reference.

[0050] The term “subject” refers to any animal subject including but not limited to humans, laboratory animals (e.g., primates, rats, mice) including rodents and other animals useful as models for human disease states, livestock (e.g., cows, sheep, goats, pigs, turkeys, chickens, fish), and household pets (e.g., dogs, cats, rodents, reptiles, etc.). The subject may be suffering from a dysbiosis, including, but not limited to, an infection due to a gastrointestinal pathogen or may be at risk of developing or transmitting to others an infection due to a gastrointestinal pathogen.

[0051] The term “pathobiont” refer to specific bacterial species found in healthy hosts that may trigger immune-mediated pathology and/or disease in response to certain genetic or environmental factors. Chow et al., (2011) Curr. Op. Immunol. Pathobionts of the intestinal microbiota and inflammatory disease. 23: 473-80. Thus, a pathobiont is a pathogen that is mechanistically distinct from an acquired infectious organism. Thus, the term “pathogen” includes both acquired infectious organisms and pathobionts.

[0052] The terms “pathogen”, “pathobiont” and “pathogenic” in reference to a bacterium or any other organism or entity includes any such organism or entity that is capable of causing or affecting a disease, disorder or condition of a host organism containing the organism or entity.

[0053] “Phylogenetic tree” refers to a graphical representation of the evolutionary relationships of one genetic sequence to another that is generated using a defined set of phylogenetic reconstruction algorithms (e.g. parsimony, maximum likelihood, or Bayesian). Nodes in the tree represent distinct ancestral sequences and the confidence of any node is provided by a bootstrap or Bayesian posterior probability, which measures branch uncertainty.

[0054] “Operational taxonomic units,” “OTU” (or plural, “OTUs”) refer to a terminal leaf in a phylogenetic tree and is defined by a nucleic acid sequence, e.g., the entire genome, or a specific genetic sequence, and all sequences that share sequence identity to this nucleic acid sequence at the level of species. In some embodiments the specific genetic sequence may be the 16S sequence or a portion of the 16S sequence. In other embodiments, the entire genomes of two entities are sequenced and compared. In another embodiment, select regions such as multilocus sequence tags (MLST), specific genes, or sets of genes may be genetically compared. In 16S embodiments, OTUs that share ≧97% average nucleotide identity across the entire 16S or some variable region of the 16S are considered the same OTU (see e.g. Claesson M J, Wang Q, O'Sullivan O, Greene-Diniz R, Cole J R, Ross R P, and O'Toole P W. 2010. Comparison of two next-generation sequencing technologies for resolving highly complex microbiota composition using tandem variable 16S rRNA gene regions. Nucleic Acids Res 38: e200. Konstantinidis K T, Ramette A, and Tiedje J M. 2006. The bacterial species definition in the genomic era. Philos Trans R Soc Lond B Biol Sci 361: 1929-1940.). In embodiments involving the complete genome, MLSTs, specific genes, or sets of genes OTUs that share ≧95% average nucleotide identity are considered the same OTU (see e.g. Achtman M, and Wagner M. 2008. Microbial diversity and the genetic nature of microbial species. Nat. Rev. Microbiol. 6: 431-440. Konstantinidis K T, Ramette A, and Tiedje J M. 2006. The bacterial species definition in the genomic era. Philos Trans R Soc Lond B Biol Sci 361: 1929-1940.). OTUs are frequently defined by comparing sequences between organisms. Generally, sequences with less than 95% sequence identity are not considered to form part of the same OTU. OTUs may also be characterized by any combination of nucleotide markers or genes, in particular highly conserved genes (e.g., “house-keeping” genes), or a combination thereof. Such characterization employs, e.g., WGS data or a whole genome sequence.

[0055] Table 1 below shows a List of Operational Taxonomic Units (OTU) with taxonomic assignments made to Genus, Species, and Phylogenetic Clade. Clade membership of bacterial OTUs is based on 16S sequence data. Clades are defined based on the topology of a phylogenetic tree that is constructed from full-length 16S sequences using maximum likelihood methods familiar to individuals with ordinary skill in the art of phylogenetics. Clades are constructed to ensure that all OTUs in a given clade are: (i) within a specified number of bootstrap supported nodes from one another, and (ii) within 5% genetic similarity. OTUs that are within the same clade can be distinguished as genetically and phylogenetically distinct from OTUs in a different clade based on 16S-V4 sequence data, while OTUs falling within the same clade are closely related. OTUs falling within the same clade are evolutionarily closely related and may or may not be distinguishable from one another using 16S-V4 sequence data. Members of the same clade, due to their evolutionary relatedness, play similar functional roles in a microbial ecology such as that found in the human gut. Compositions substituting one species with another from the same clade are likely to have conserved ecological function and therefore are useful in the present invention. All OTUs are denoted as to their putative capacity to form spores and whether they are a Pathogen or Pathobiont (see Definitions for description of “Pathobiont”). NIAID Priority Pathogens are denoted as ‘Category-A’, ‘Category-B’, or ‘Category-C’, and Opportunistic Pathogens are denoted as ‘OP’. OTUs that are not pathogenic or for which their ability to exist as a pathogen is unknown are denoted as ‘N’. The ‘SEQ ID Number’ denotes the identifier of the OTU in the Sequence Listing File and ‘Public DB Accession’ denotes the identifier of the OTU in a public sequence repository.

[0056] 16s Sequencing, 16s, 16s-rRNA, 16s-NGS: In microbiology, “16S sequencing” or “165-rRNA” or “16S” refers to sequence derived by characterizing the nucleotides that comprise the 16S ribosomal RNA gene(s). The bacterial 16S rDNA is approximately 1500 nucleotides in length and is used in reconstructing the evolutionary relationships and sequence similarity of one bacterial isolate to another using phylogenetic approaches. 16S sequences are used for phylogenetic reconstruction as they are in general highly conserved, but contain specific hypervariable regions that harbor sufficient nucleotide diversity to differentiate genera and species of most bacteria.

[0057] The “V1-V9 regions” of the 16S rRNA refers to the first through ninth hypervariable regions of the 16S rRNA gene that are used for genetic typing of bacterial samples. These regions in bacteria are defined by nucleotides 69-99, 137-242, 433-497, 576-682, 822-879, 986-1043, 1117-1173, 1243-1294 and 1435-1465 respectively using numbering based on the E. coli system of nomenclature. Brosius et al., Complete nucleotide sequence of a 16S ribosomal RNA gene from Escherichia coli, PNAS 75(10):4801-4805 (1978). In some embodiments, at least one of the V1, V2, V3, V4, V5, V6, V7, V8, and V9 regions are used to characterize an OTU. In one embodiment, the V1, V2, and V3 regions are used to characterize an OTU. In another embodiment, the V3, V4, and V5 regions are used to characterize an OTU. In another embodiment, the V4 region is used to characterize an OTU. A person of ordinary skill in the art can identify the specific hypervariable regions of a candidate 16S rRNA by comparing the candidate sequence in question to a reference sequence and identifying the hypervariable regions based on similarity to the reference hypervariable regions, or alternatively, one can employ Whole Genome Shotgun (WGS) sequence characterization of microbes or a microbial community.

[0058] The term “phenotype” refers to a set of observable characteristics of an individual entity. As example an individual subject may have a phenotype of “health” or “disease”. Phenotypes describe the state of an entity and all entities within a phenotype share the same set of characteristics that describe the phenotype. The phenotype of an individual results in part, or in whole, from the interaction of the entities genome and/or microbiome with the environment.

[0059] A “spore population” refers to a plurality of spores and spore forming organisms present in a composition. Synonymous terms used herein include spore composition, spore preparation, ethanol treated spore fraction and spore ecology. A spore population may be purified from a fecal donation, e.g. via solvent, acid, detergent, or heat treatment, or a density gradient separation, centrifugation, chromatographic separation, filtration, or any combination of methods described herein to increase the purity, potency and/or concentration of spores in a sample. A spore population may be derived through culture methods starting from isolated spore former species or spore former OTUs or from a mixture of such species, either in vegetative or spore form. Spores can be purified from natural sources including but not limited to feces, soil, and water. Furthermore a spore population, or preparation is a non-limiting subset of a microbial composition. Additional, ethanol treated fecal suspensions are a non-limiting additional subset of a microbial composition enriched for spores and spore formers.

[0060] In one embodiment, the spore preparation comprises spore forming species wherein residual non-spore forming species have been inactivated by chemical or physical treatments including ethanol, detergent, heat, sonication, and the like; or wherein the non-spore forming species have been removed from the spore preparation by various separations steps including density gradients, centrifugation, filtration and/or chromatography; or wherein inactivation and separation methods are combined to make the spore preparation. In yet another embodiment, the spore preparation comprises spore forming species that are enriched over viable non-spore formers or vegetative forms of spore formers. In this embodiment, spores are enriched by 2-fold, 5-fold, 10-fold, 50-fold, 100-fold, 1000-fold, 10,000-fold or greater than 10,000-fold compared to all vegetative forms of bacteria. In yet another embodiment, the spores in the spore preparation undergo partial germination during processing and formulation such that the final composition comprises spores and vegetative bacteria derived from spore forming species.

[0061] The term “isolated” encompasses a bacterium or other entity or substance that has been (1) separated from at least some of the components with which it was associated when initially produced (whether in nature or in an experimental setting) and/or (2) produced, prepared, purified, and/or manufactured by the hand of man. Isolated bacteria include those bacteria that are cultured, even if such cultures are not monocultures. Isolated bacteria may be separated from at least about 10%, about 20%, about 30%, about 40%, about 50%, about 60%, about 70%, about 80%, about 90%, or more of undesired bacteria, or, alternatively, one or more of the other components with which they were initially associated. In some embodiments, isolated bacteria are more than about 80%, about 85%, about 90%, about 91%, about 92%, about 93%, about 94%, about 95%, about 96%, about 97%, about 98%, about 99%, or more than about 99% pure. In some embodiments, the isolated bacteria are 99.5%, 99.6%, 99.7%, 99.8%, 99.9%, or at least 99.99%, or at least 99.999% pure. As used herein, a substance is “pure” if it is substantially free of other components. The terms “purify,” “purifying” and “purified” refer to a bacterium or other material that has been separated from at least some of the components with which it was associated either when initially produced or generated (e.g., whether in nature or in an experimental setting), or during any time after its initial production. A bacterium or a bacterial population may be considered purified if it is isolated at or after production, such as from a material or environment containing the bacterium or bacterial population, or by passage through culture, and a purified bacterium or bacterial population may contain other materials (exclusive of water) up to about 10%, about 20%, about 30%, about 40%, about 50%, about 60%, about 70%, about 80%, about 90%, or about 99% or and still be considered “isolated.” In some embodiments, purified bacteria and bacterial populations are more than about 80%, about 85%, about 90%, about 91%, about 92%, about 93%, about 94%, about 95%, about 96%, about 97%, about 98%, about 99%, or more than about 99% pure. In the instance of bacterial compositions provided herein, the one or more bacterial types present in the composition can be independently purified from one or more other bacteria produced and/or present in the material or environment containing the bacterial type. Microbial compositions, bacterial compositions, and the bacterial components thereof are generally purified from residual habitat products.

[0062] “Residual habitat products” refers to material derived from the habitat for microbiota within or on a human or animal. For example, microbiota live in feces in the gastrointestinal tract, on the skin itself, in saliva, mucus of the respiratory tract, or secretions of the genitourinary tract (i.e., biological matter associated with the microbial community). Substantially free of residual habitat products means that the bacterial composition no longer contains the biological matter associated with the microbial environment on or in the human or animal subject and is 100% free, 99% free, 98% free, 97% free, 96% free, or 95% free of any contaminating biological matter associated with the microbial community. Residual habitat products can include abiotic materials (including undigested food) or it can include unwanted microorganisms. Substantially free of residual habitat products may also mean that the bacterial composition contains no detectable cells from a human or animal and that only microbial cells are detectable. In one embodiment, substantially free of residual habitat products may also mean that the bacterial composition contains no detectable viral (including bacterial viruses (i.e., phage)), fungal, mycoplasmal contaminants. In another embodiment, it means that fewer than 1×10⁻²%, 1×10⁻³%, 1×10⁻⁴%, 1×10⁻⁵%, 1×10⁻⁶%, 1×10⁻⁷%, 1×10⁻⁸ of the viable cells in the bacterial composition are human or animal, as compared to microbial cells. There are multiple ways to accomplish this degree of purity, none of which are limiting. Thus, contamination may be reduced by isolating desired constituents through multiple steps of streaking to single colonies on solid media until replicate (such as, but not limited to, two) streaks from serial single colonies have shown only a single colony morphology. Alternatively, reduction of contamination can be accomplished by multiple rounds of serial dilutions to single desired cells (e.g., a dilution of 10⁻⁸ or 10⁻⁹), such as through multiple 10-fold serial dilutions. This can further be confirmed by showing that multiple isolated colonies have similar cell shapes and Gram staining behavior. Other methods for confirming adequate purity include genetic analysis (e.g. PCR, DNA sequencing), serology and antigen analysis, enzymatic and metabolic analysis, and methods using instrumentation such as flow cytometry with reagents that distinguish desired constituents from contaminants.

[0063] “Inhibition” of a pathogen encompasses the inhibition of any desired function or activity of the bacterial compositions of the present invention. Demonstrations of pathogen inhibition, such as decrease in the growth of a pathogenic bacterium or reduction in the level of colonization of a pathogenic bacterium are provided herein and otherwise recognized by one of ordinary skill in the art. Inhibition of a pathogenic bacterium's “growth” may include inhibiting the increase in size of the pathogenic bacterium and/or inhibiting the proliferation (or multiplication) of the pathogenic bacterium. Inhibition of colonization of a pathogenic bacterium may be demonstrated by measuring the amount or burden of a pathogen before and after a treatment. An “inhibition” or the act of “inhibiting” includes the total cessation and partial reduction of one or more activities of a pathogen, such as growth, proliferation, colonization, and function.

[0064] A “germinant” is a material or composition or physical-chemical process capable of inducing vegetative growth of a bacterium that is in a dormant spore form, or group of bacteria in the spore form, either directly or indirectly in a host organism and/or in vitro.

[0065] A “sporulation induction agent” is a material or physical-chemical process that is capable of inducing sporulation in a bacterium, either directly or indirectly, in a host organism and/or in vitro.

[0066] To “increase production of bacterial spores” includes an activity or a sporulation induction agent. “Production” includes conversion of vegetative bacterial cells into spores and augmentation of the rate of such conversion, as well as decreasing the germination of bacteria in spore form, decreasing the rate of spore decay in vivo, or ex vivo, or to increasing the total output of spores (e.g. via an increase in volumetric output of fecal material).

[0067] A “cytotoxic” activity or bacterium includes the ability to kill a bacterial cell, such as a pathogenic bacterial cell. A “cytostatic” activity or bacterium includes the ability to inhibit, partially or fully, growth, metabolism, and/or proliferation of a bacterial cell, such as a pathogenic bacterial cell.

[0068] Compositions and Methods of the Invention

[0069] Materials and Compositions Suitable for Testing

[0070] Encompassed by the present invention are any materials in solid or liquid form suitable for testing using the methods and systems described herein. Non-limiting examples of such materials include solids or liquids from a biological environment, foods or beverages including medical foods or beverages, specimens, therapeutic compositions, nutraceuticals and probiotics, organ and tissue transplants, sterile products such as bandages and dressings, synthetic compounds, and any material in an environment requiring a determination of the presence, and optionally the concentration of microbial and other pathogens or a measurement of the potency, purity, identity or safety of said materials.

[0071] In some embodiments the invention provides validated therapeutic compositions, meaning compositions intended for administration to a mammalian subject to treat or prevent a disease, disorder or condition. Such therapeutic compositions include one or more bacteria, yeast, virus, (e.g., phage), or combinations thereof. In particular, provided are combinations of bacteria of the human gut microbiota with the capacity to meaningfully provide functions of a healthy microbiota or to catalyze the formation of a healthy microbiota when administered to mammalian hosts.

[0072] Microbial compositions may contain at least two types of bacteria, yeast, virus (e.g., phage) or combinations thereof. For instance, a bacterial composition may comprise at least 2, at least 3, at least 4, at least 5, at least 6, at least 7, at least 8, at least 9, at least 10, at least 11, at least 12, at least 13, at least 14, at least 15, at least 16, at least 17, at least 18, at least 19, or at least 20 or more than 20 types of bacteria, as defined by species or an operational taxonomic unit (OTU) encompassing such species.

[0073] Microbial compositions may consist essentially of no greater than a number of types of bacteria, yeast, virus (e.g., phage) or combinations thereof. For instance, a bacterial composition may comprise no more than 2, no more than 3, no more than 4, no more than 5, no more than 6, no more than 7, no more than 8, no more than 9, no more than 10, no more than 11, no more than 12, no more than 13, no more than 14, no more than 15, no more than 16, no more than 17, no more than 18, no more than 19, or no more than 20 types of bacteria, as defined by species or an operational taxonomic unit (OTU) encompassing such species. In some embodiments, the number of OTUs can range from 5 to 150, in others from 5-15, and in still others 40-80 OTUs may be present in a bacterial composition. In preferred embodiments, the composition contains 5-10 organisms comprising at least 90% of the microbial composition.

[0074] Bacterial compositions may consist essentially of a range of numbers of species of these preferred bacteria, but the precise number of species in a given composition is not known. For instance, a bacterial composition may consist essentially of between 2 and 10, 3 and 10, 4 and 10, 5 and 10, 6 and 10, 7 and 10, 8 and 10, or 9 and 10; or 2 and 9, 3 and 9, 4 and 9, 5 and 9, 6 and 9, 7 and 8 or 8 and 9; or 2 and 8, 3 and 8, 4 and 8, 5 and 8, 6 and 8 or 7 and 8; or 2 and 7, 3 and 7, 4 and 7, 5 and 7, or 6 and 7; or 2 and 6, 3 and 6, 4 and 6 or 5 and 6; or 2 and 5, 3 and 5 or 4 and 5; or 2 and 4 or 3 and 4; or 2 and 3, as defined by species or operational taxonomic unit (OTU) encompassing such species. In some embodiments, the number of OTUs can range from 5 to 150, in others from 5-15, and in still others 40-80 OTUs may be present in a bacterial composition. In preferred embodiments, the composition contains 5-10 organisms comprising at least 90% of the viable material (e.g., bacterial cells) present in the microbial composition.

[0075] Microbial compositions containing a plurality of species may be provided such that the relative concentration of a given species in the composition to any other species in the composition is known or unknown. Such relative concentrations of any two species, or OTUs, may be expressed as a ratio, where the ratio of a first species or OTU to a second species or OTU is 1:1 or any ratio other than 1:1, such as 1:2, 1:3, 1:4, 1:5, 1:6, 1:7, 1:8, 1:9, 1:10, 1:15, 1:20, 1:25; 1:50; 1:75, 1:100, 1:200, 1:500; 1:1000, 1:10,000, 1:100,000 or greater than 1:100,000. The ratio of strains present in a microbial composition may be determined by the ratio of the strains in a reference mammalian subject or population, e.g., healthy humans not suffering from or at known risk of developing a dysbiosis.

[0076] Microbial compositions containing a plurality of bacteria, yeast and/or virus (e.g., phage) may be provided such that the amount of a given bacteria, yeast and/or virus (e.g., phage), or the aggregate of all such entities, is between 1×104 and 1×1015 viable microbes per gram of composition or per administered dose. For example the amount of a given bacteria, yeast and/or virus (e.g., phage), or the aggregate of all such entities, is e.g., 1×104, 1×105, 1×106, 1×107, 1×108, 1×109, 1×1010, 1×1011, 1×1012, 1×1013, 1×1014, 1×1015, or greater than 1×1015 viable microbes per gram of composition or per administered dose. Alternatively, the amount of a given bacteria, yeast and/or virus (e.g., phage), or the aggregate of all bacteria, yeast and/or virus (e.g., phage), is below a given concentration e.g., below 1×104, 1×105, 1×106, 1×107, 1×108, 1×109, 1×1010, 1×1011, 1×1012, 1×1013, 1×1014, or below 1×1015 viable microbes per gram of composition or per administered dose.

[0077] Without being limited to a specific mechanism, it is thought that the validated therapeutic compositions, when administered to a mammalian subject in need thereof, inhibit the growth of a pathogen such as C. difficile, Salmonella spp., enteropathogenic E. coli, Enterococcus spp., Vibrio spp., Yersinia spp., Streptococcus spp., Shigella spp., vancomycin-resistant Enterococcus spp., Klebsiella spp, carbapenem resistant Klebsiella and other carbapenem resistant Gram negative species or OTUs, Candida spp. so that a healthy, diverse and protective microbiota can be maintained or, in the case of pathogenic bacterial infections such as recurrent C. difficile infection, and either directly repopulate or cause the repopulation of other bacteria in the intestinal lumen to reestablish ecological control over potential pathogens. In one embodiment preferred OTUs include those found in Table 1 and OTUs with 16S sequences that are 97% similar to these OTUs and corresponding sequences. In other embodiments OTUs are from the same phylogenetic clade as present in Table 1.

[0078] In other embodiments preferred microbial species include but are not limited to: Eubacterium rectale, Alistipes putredinis, Coprococcus comes, Eubacterium ventriosum, Faecalibacterium prausnitzii, Odoribacter splanchnicus, Ruminococcus bromii, Bacteroides caccae, Bacteroides finegoldii, Coprococcus catus, Dorea longicatena, Ruminococcus torques, Subdoligranulum variabile, Alistipes shahii, Eubacterium eligens, Roseburia inulinivorans, Ruminococcus obeum, Eubacterium hallii, Roseburia intestinalis, Bacteroides dorei, Bacteroides ovatus, Collinsella aerofaciens, Dorea formicigenerans, Ruminococcus lactaris, Streptococcus thermophilus, Bacteroides stercoris, Bacteroides xylanisolvens, Ruminococcus gnavus, Gordonibacter pamelaeae, Veillonella parvula, Holdermania filiformis, Streptococcus mitis, Butyricicoccus pullicaecorum, Clostridiales bacterium, Lachnospiraceae bacterium 3 1 57FAA CT1, Oscillibacter valericigenes, Roseburia hominis, Eubacterium siraeum, Ruminococcaceae bacterium D16, Alistipes sp HGB5, Blautia stercoris, Clostridiales sp SM4/1, Clostridium symbiosum, Eubacterium hadrum, Bacteroides fragilis, Bacteroides galacturonicus, Blautia wexlerae, Faecalibacterium cf, Bacteroides sp 3 1 19, Blautia luti, Christensenella minuta, Eubacterium cellulosolvens, Bacteroides sp D20, Bacteroides vulgatus, Clostridium leptum, Anaerotruncus colihominis, Bacteroides thetaiotaomicron, Bacteroides sp 1 1 30, Clostridium clostridioforme, Burkholderiales bacterium, Parabacteroides distasonis, Blautia producta, Escherichia coli, Flavonifractor plautii, Bacteroides pectinophilus, Clostridium sp YIT 12069, Ruminococcus albus, Bacteroides sp 9 1 42FAA, Bacteroides sp WAL 11050, Clostridium botulinum, Clostridium sp L2 50, Clostridium sp NML 04A032, Coprococcus eutactus, Cronobacter turicensis, Desulfovibrio piger, Eubacterium brachy, Eubacterium ramulus, Lachnospiraceae 4, Oscillibacter sp G2, Roseburia faecalis, Alistipes indistinctus, Bacteroides eggerthii, Bacteroides sp 2 1 56FAA, Bacteroides sp 20 3, Bacteroides sp 3 1 23, Bifidobacterium longum, Blautia hydrogenotrophica, Butyricimonas virosa, Clostridiales sp SS3 4, Clostridium saccharolyticum, Clostridium sp D5, Bacteroides sp 4 3 47FAA, Bifidobacterium adolescentis, Clostridium hathewayi, Clostridium nexile, Ethanoligenens harbinense, Lachnospiraceae 5, Parabacteroides goldsteinii, Parabacteroides merdae, Acidaminococcus sp D21, Akkermansia muciniphila, Anaerostipes sp 3 2 56FAA, Bacteroides cellulosilyticus, Blautia hansenii, Campylobacter concisus, Clostridium asparagiforme, Clostridium bartlettii, Clostridium bolteae, Clostridium scindens, Clostridium sp YIT 12070, Lactobacillus johnsonii, Lactobacillus reuteri, Pantoea ananatis, Parasutterella excrementihominis, Bacteroides intestinalis, Bacteroides uniformis, Bilophila wadsworthia, Citrobacter koseri, Citrobacter youngae, Clostridiales 1, Desulfovibrio desulfuricans, Edwardsiella tarda, Enterobacter sp SCSS, Enterococcus faecalis, Enterococcus gallinarum, Enterococcus hirae, Fusobacterium sp CM1, Klebsiella sp SRC DSD6, Lachnospiraceae 6, Lactobacillus casei, Lactobacillus fermentum, Lactobacillus gasseri, Lactobacillus plantarum, Leminorella grimontii, Leuconostoc citreum, Morganella sp JB T16, Streptococcus salivarius, Bacteroides sp 3 2 5, Citrobacter amalonaticus, Citrobacter sp KMSI 3, Enterococcus durans, Enterococcus raffinosus, Fusobacterium sp 11 3 2, Klebsiella pneumoniae, Klebsiella sp Co9935, Lactobacillus salivarius, Megasphaera micronuciformis, Proteus penneri, Proteus vulgaris, Shigella flexneri, Streptococcus parasanguinis, Veillonella atypica, Klebsiella sp enrichment culture clone, Clostridium difficile, A. hydrogenalis, A. Pleuropneumonaie, A. stercorihominis, B. adolescentis, B. angulatum, B. animalis, B. bifidum, B. breve, B. capillosus, B. catenulatum, B. coprophilus, B. crossotus, B. dertium, B. fibrisolvens, B. gallicum, B. plebeius, B. pseudocatenulatum, Bacteroides sp 2 1 7, Bacteroides sp 2 2 4, Bacteroides sp D1, Bacteroides sp D4, Blautia cocccoides, C. aerofaciens, C. concisus, C. hylemonae, C. intestinalis, C. methylpentosum, C. perfringens, C. phytofermentans, C. ramosum, C. stercoris, C. Sulcia muelleri, Citrobacter so.30 2, Citrobacter sp., Clostridiales sp SS2 1, Clostridium indolis, Clostridium lavalense, Clostridium saccharogumia, Clostridium sp., Clostridium sp. MLG0555, Clostridium sp. 7 2 43FAA, Clostridium cocleatum, D. vulgaris, E. cancerogenus, E. dolichum, E. fergusonii, E. sakazakii, Enterobacter sp 638, Eubacterium contortum, Eubacterium desmolans, Eubacterium limosum, F. magna, H. influenzae, H. parasuis, L. helveticus, L. ultunensis, lachnospira bacterium DJF VP30, Lachnospira pectinoshiza, Lachnospiraceae bacterium DJF VP30, M. formatexigens, Mollicutes bacriumD7, P. gingivalis, P. mirabilis, P. multocida, P. pentosaceus, Routella sp, Ruminococcus sp. ID8, Ruminococcus sp srl 5, S. enterica, S. gordonii, S. infantarius, S. mutans, S. pneumoniae, S. pyogenes, S. sanguinis, S. suis.

[0079] In some embodiments, bacterial species and combinations thereof are selected from Acidaminococcus intestine, Adlercreutzia equolifaciens, Akkermansia muciniphila, Alistipes putredinis, Alistipes shahii, Alkaliphilus metalliredigenes, Alkaliphilus oremlandii, Anaerococcus hydrogenalis, Anaerofustis stercorihominis, Anaerostipes caccae, Anaerotruncus colihominis, Bacillus alcalophilus, Bacillus amyloliquefaciens, Bacillus cereus, Bacillus circulans, Bacillus coagulans, Bacillus licheniformis, Bacillus pumilis, Bacillus subtilis, Bacteroides caccae, Bacteroides cellulosilyticus, Bacteroides coprocola, Bacteroides coprophilus, Bacteroides dorei, Bacteroides eggerthii, Bacteroides finegoldii, Bacteroides fragilis, Bacteroides intestinalis, Bacteroides ovatus, Bacteroides pectinophilus, Bacteroides plebeius, Bacteroides stercoris, Bacteroides thetaiotaomicron, Bacteroides uniformis, Bacteroides vulgatus, Bacteroides xylanisolvens, Barnesiella intestinihominis, Bifidobacterium adolescentis, Bifidobacterium animalis, Bifidobacterium bifidum, Bifidobacterium breve, Bifidobacterium catenulatum, Bifidobacterium infantis, Bifidobacterium longum, Bifidobacterium pseudocatenulatum, Bifidobacterium thermophilum, Bilophila wadsworthia, Blautia hansenii, Blautia hydrogenotrophica, Blautia luti, Blautia producta, Blautia wexlerae, Bryantella formatexigens, Butyrivibrio crossotus, Butyrivibrio fibrisolvens, Campylobacter concisus, Campylobacter curvus, Catenibacterium mitsuokai, Clostridium asparagiforme, Clostridium bartlettii, Clostridium bifermentans, Clostridium bolteae, Clostridium butyricum, Clostridium celatum, Clostridium citroniae, Clostridium clostridioforme, Clostridium cocleatum, Clostridium hathewayi, Clostridium hiranonis, Clostridium hylemonae, Clostridium indolis, Clostridium innocuum, Clostridium lavalense, Clostridium leptum, Clostridium methylpentosum, Clostridium nexile, Clostridium orbiscindens, Clostridium perfringens, Clostridium ramosum, Clostridium saccharolyticum, Clostridium scindens, Clostridium sordellii, Clostridium spiroforme, Clostridium sporogenes, Clostridium sticklandii, Clostridium symbiosum, Clostridium tetani, Collinsella aerofaciens, Coprococcus catus, Coprococcus comes, Coprococcus eutactus, Desulfovibrio piger, Dorea formicigenerans, Dorea longicatena, Enterococcus durans, Enterococcus faecalis, Enterococcus faecium, Enterococcus hirae, Escherichia coli, Eubacterium biforme, Eubacterium cylindroides, Eubacterium desmolans, Eubacterium dolichum, Eubacterium eligens, Eubacterium hadrum, Eubacterium hallii, Eubacterium limosum, Eubacterium rectale, Eubacterium siraeum, Eubacterium ventriosum, Eubacterium yurii, Faecalibacterium prausnitzii, Filifactor alocis, Finegoldia magna, Flavonifractor plautii, Holdemania filiformis, Lachnospira pectinoshiza, Lactobacillus acidophilus, Lactobacillus amylolyticus, Lactobacillus brevis, Lactobacillus bulgaricus, Lactobacillus casei, Lactobacillus fermentum, Lactobacillus gasseri, Lactobacillus helveticus, Lactobacillus johnsonii, Lactobacillus paracasei, Lactobacillus plantarum, Lactobacillus reuteri, Lactobacillus rhamnosus, Lactobacillus salivarius, Lactococcus lactis, Odoribacter laneus, Odoribacter splanchnicus, Oxalobacter formigenes, Parabacteroides distasonis, Parabacteroides johnsonii, Parabacteroides merdae, Parasutterella excrementihominis, Parvimonas micra, Pediococcus acidilactici, Pediococcus pentosaceus, Peptostreptococcus anaerobius, Peptostreptococcus stomatis, Prevotella copri, Prevotella oralis, Prevotella salivae, Propionibacterium freudenreichii, Pseudoflavonifractor capillosus, Rhodopseudomonas palustris, Roseburia faecis, Roseburia intestinalis, Roseburia inulinivorans, Ruminococcus bromii, Ruminococcus gnavus, Ruminococcus lactaris, Ruminococcus obeum, Ruminococcus torques, Shigella flexneri, Staphylococcus aureus, Staphylococcus pasteuri, Staphylococcus warneri, Streptococcus anginosus, Streptococcus mitis, Streptococcus salivarius, Streptococcus thermophiles, Subdoligranulum variabile, Sutterella wadsworthensis, and Veillonella parvula.

[0080] In some embodiments, bacterial species and combinations thereof are provided in Hamilton M J, Weingarden A R, Unno T, Khoruts A, Sadowsky M J (2013) High-throughput DNA sequence analysis reveals stable engraftment of gut microbiota following transplantation of previously frozen fecal bacteria. Gut Microbes 4: 125-135; Nishio J, Atarashi K, Tanoue T, Baba M, Negishi H, et al. (2013) Impact of TCR repertoire on intestinal homeostasis. Keystone Symposium. The Gut Microbiome: The Effector/Regulatory Immune Network; Petrof E O, Gloor G B, Vanner S J, Weese S J, Carter D, et al. (2013) Stool substitute transplant therapy for the eradication of Clostridium difficile infection: “RePOOPulating” the gut. Microbiome 1: 3; Lozupone C, Faust K, Raes J, Faith J J, Frank D N, et al. (2012) Identifying genomic and metabolic features that can underlie early successional and opportunistic lifestyles of human gut symbionts. Genome Res. 22: 1974-1984; Lawley T D, Clare S, Walker A W, Stares M D, Connor T R, et al. (2012) Targeted Restoration of the Intestinal Microbiota with a Simple, Defined Bacteriotherapy Resolves Relapsing Clostridium difficile Disease in Mice. PLoS Pathog. 8: e1002995; Hell M, Bernhofer C, Stalzer P, Kern J M, and Claassen E. 2013. Probiotics in Clostridium difficile infection: reviewing the need for a multistrain probiotic. Benef Microbes 4: 39-51; Faust K, Sathirapongsasuti J F, Izard J, Segata N, Gevers D, et al. (2012) Microbial co-occurrence relationships in the human microbiome. PLoS Comput. Biol. 8: e1002606; Van Nood E, Vrieze A, Nieuwdorp M, Fuentes S, Zoetendal E G, et al. (2012) Duodenal Infusion of Donor Feces for Recurrent Clostridium difficile. New England Journal of Medicine @nejm.org/doi/full/10.1056/NEJMoa1205037 on 17 Jan. 2013; Shahinas D, Silverman M, Sittler T, Chiu C, Kim P, et al. (2012) Toward an Understanding of Changes in Diversity Associated with Fecal Microbiome Transplantation Based on 16S rRNA Gene Deep Sequencing. MBio 3:5; Khoruts A, Dicksved J, Jansson J K, Sadowsky M J (2010) Changes in the composition of the human fecal microbiome after bacteriotherapy for recurrent Clostridium difficile-associated diarrhea. J. Clin. Gastroenterol. 44: 354-360; Chang J Y, Antonopoulos D A, Kalra A, Tonelli A, Khalife W T, et al. (2008) Decreased diversity of the fecal Microbiome in recurrent Clostridium difficile-associated diarrhea. J. Infect. Dis. 197: 435-438; and Tvede M, Rask-Madsen J (1989) Bacteriotherapy for chronic relapsing Clostridium difficile diarrhoea in six patients. Lancet 1: 1156-1160. The contents of these references are incorporated by reference herein in their entireties.

[0081] In one embodiment, the microbial composition comprises at least one and preferably more than one of the following: Barnesiella intestinihominis; Lactobacillus reuteri; a species characterized as one of Enterococcus hirae, Enterococus faecium, or Enterococcus durans; a species characterized as one of Anaerostipes caccae or Clostridium indolis; a species characterized as one of Staphylococcus warneri or Staphylococcus pasteuri; and Adlercreutzia equolifaciens. In an alternative embodiment, at least one of the preceding species is not substantially present in the composition.

[0082] In one embodiment, the microbial composition comprises at least one and preferably more than one (e.g., 2, 3, 4, 5, 6, 7, 8, 9, 10, or more than 10) of the following: Clostridium absonum, Clostridium argentinense, Clostridium baratii, Clostridium bartlettii, Clostridium bifermentans, Clostridium botulinum, Clostridium butyricum, Clostridium cadaveris, Clostridium camis, Clostridium celatum, Clostridium chauvoei, Clostridium clostridioforme, Clostridium cochlearium, Clostridium difficile, Clostridium fallax, Clostridium felsineum, Clostridium ghonii, Clostridium glycolicum, Clostridium haemolyticum, Clostridium hastiforme, Clostridium histolyticum, Clostridium indolis, Clostridium innocuum, Clostridium irregulare, Clostridium limosum, Clostridium malenominatum, Clostridium novyi, Clostridium oroticum, Clostridium paraputrificum, Clostridium perfringens, Clostridium piliforme, Clostridium putrefaciens, Clostridium putrificum, Clostridium ramosum, Clostridium sardiniense, Clostridium sartagoforme, Clostridium scindens, Clostridium septicum, Clostridium sordellii, Clostridium sphenoides, Clostridium spiroforme, Clostridium sporogenes, Clostridium subterminale, Clostridium symbiosum, Clostridium tertium, Clostridium tetani, Clostridium welchii, and Clostridium villosum. In an alternative embodiment, at least one of the preceding species is not substantially present in the bacterial composition.

[0083] In one embodiment, the microbial composition comprises at least one and preferably more than one of the following: Clostridium innocuum, Clostridum bifermentans, Clostridium butyricum, Bacteroides fragilis, Bacteroides thetaiotaomicron, Bacteroides uniformis, three strains of Escherichia coli, and Lactobacillus sp. In an alternative embodiment, at least one of the preceding species is not substantially present in the bacterial composition.

[0084] In one embodiment, the microbial composition comprises at least one and preferably more than one of the following: Clostridium bifermentans, Clostridium innocuum, Clostridium butyricum, three strains of Escherichia coli, three strains of Bacteroides, and Blautia producta. In an alternative embodiment, at least one of the preceding species is not substantially present in the composition.

[0085] In one embodiment, the microbial composition comprises at least one and preferably more than one of the following: Bacteroides sp., Escherichia coli, and non-pathogenic Clostridia, including Clostridium innocuum, Clostridium bifermentans and Clostridium ramosum. In an alternative embodiment, at least one of the preceding species is not substantially present in the bacterial composition.

[0086] In one embodiment, the microbial composition comprises at least one and preferably more than one of the following: Bacteroides species, Escherichia coli and non-pathogenic Clostridia, such as Clostridium butyricum, Clostridium bifermentans and Clostridium innocuum. In an alternative embodiment, at least one of the preceding species is not substantially present in the microbial composition.

[0087] In certain embodiments, provided are microbial compositions containing a plurality of Bacteroides species. In such exemplary embodiments, the microbial composition comprises at least one and preferably more than one of the following: Bacteroides caccae, Bacteroides capillosus, Bacteroides coagulans, Bacteroides distasonis, Bacteroides eggerthii, Bacteroides forsythus, Bacteroides fragilis, Bacteroides fragilis-ryhm, Bacteroides gracilis, Bacteroides levii, Bacteroides macacae, Bacteroides merdae, Bacteroides ovatus, Bacteroides pneumosintes, Bacteroides putredinis, Bacteroides pyogenes, Bacteroides splanchnicus, Bacteroides stercoris, Bacteroides tectum, Bacteroides thetaiotaomicron, Bacteroides uniformis, Bacteroides ureolyticus, and Bacteroides vulgatus. In an alternative embodiment, at least one of the preceding species is not substantially present in the composition.

[0088] In one embodiment, the microbial composition comprises at least one and preferably more than one of the following: Bacteroides, Eubacteria, Fusobacteria, Propionibacteria, Lactobacilli, anaerobic cocci, Ruminococcus, Escherichia coli, Gemmiger, Desulfomonas, and Peptostreptococcus. In an alternative embodiment, at least one of the preceding species is not substantially present in the microbial composition.

[0089] In one embodiment, the microbial composition comprises at least one and preferably more than one of the following: Bacteroides fragilis ss. Vulgatus, Eubacterium aerofaciens, Bacteroides fragilis ss. Thetaiotaomicron, Blautia producta (previously known as Peptostreptococcus productus II), Bacteroides fragilis ss. Distasonis, Fusobacterium prausnitzii, Coprococcus eutactus, Eubacterium aerofaciens III, Blautia producta (previously known as Peptostreptococcus productus I), Ruminococcus bronii, Bifidobacterium adolescentis, Gemmiger formicilis, Bifidobacterium longum, Eubacterium siraeum, Ruminococcus torques, Eubacterium rectale III-H, Eubacterium rectale IV, Eubacterium eligens, Bacteroides eggerthii, Clostridium leptum, Bacteroides fragilis ss. A, Eubacterium biforme, Bifidobacterium infantis, Eubacterium rectale III-F, Coprococcus comes, Bacteroides capillosus, Ruminococcus albus, Eubacterium formicigenerans, Eubacterium hallii, Eubacterium ventriosum I, Fusobacterium russii, Ruminococcus obeum, Eubacterium rectale II, Clostridium ramosum I, Lactobacillus leichmanii, Ruminococcus cailidus, Butyrivibrio crossotus, Acidaminococcus fermentans, Eubacterium ventriosum, Bacteroides fragilis ss. fragilis, Bacteroides AR, Coprococcus catus, Eubacterium hadrum, Eubacterium cylindroides, Eubacterium ruminantium, Eubacterium CH-1, Staphylococcus epidermidis, Peptostreptococcus BL, Eubacterium limosum, Bacteroides praeacutus, Bacteroides L, Fusobacterium mortiferum I, Fusobacterium naviforme, Clostridium innocuum, Clostridium ramosum, Propionibacterium acnes, Ruminococcus flavefaciens, Ruminococcus AT, Peptococcus AU-1, Eubacterium AG, -AK, -AL, -AL-1, -AN; Bacteroides fragilis ss. ovatus, -ss. d, -ss. f; Bacteroides L-1, L-5; Fusobacterium nucleatum, Fusobacterium mortiferum, Escherichia coli, Streptococcus morbiliorum, Peptococcus magnus, Peptococcus G, AU-2; Streptococcus intermedius, Ruminococcus lactaris, Ruminococcus CO Gemmiger X, Coprococcus BH, -CC; Eubacterium tenue, Eubacterium ramulus, Eubacterium AE, -AG-H, -AG-M, -AJ, -BN-1; Bacteroides clostridiiformis ss. clostridliformis, Bacteroides coagulans, Bacteroides orails, Bacteroides ruminicola ss. brevis, -ss. ruminicola, Bacteroides splanchnicus, Desuifomonas pigra, Bacteroides L-4, -N-i; Fusobacterium H, Lactobacillus G, and Succinivibrio A. In an alternative embodiment, at least one of the preceding species is not substantially present in the composition.

[0090] Heterogeneous Bacterial Compositions

[0091] Also provided are compositions containing material obtained or derived from natural sources containing microbial materials, and such compositions are in some embodiments substantially heterogeneous in the microbial and non-microbial components contained therein. For example, such natural sources may be fecal material obtained from one or more healthy subjects, or one or more subjects having or at risk of developing a disease, disorder or condition associated with a dysbiosis. Other such natural or manipulated sources include environmental samples, e.g., ground water, open freshwater and sea water, soils, earth and rocks, plants, mosses, lichens and other natural microbial communities, non-human animals (other than animals included as “subjects” as defined herein, and their microbiota), raw foods, fermented foods, fermented beverages, animal feeds, or silage.

[0092] In one embodiment the microbial compositions are therapeutic compositions containing non-pathogenic, germination-competent bacterial spores, for the prevention, control, and treatment of gastrointestinal diseases, disorders and conditions and for general nutritional health. These compositions are advantageous in being suitable for safe administration to humans and other mammalian subjects and are efficacious in numerous gastrointestinal diseases, disorders and conditions and in general nutritional health. While spore-based compositions are known, these are generally prepared according to various techniques such as lyophilization or spray-drying of liquid bacterial cultures, resulting in poor efficacy, instability, substantial variability and lack of adequate safety and efficacy.

[0093] It has now been found that populations of bacterial spores can be obtained from biological materials obtained from mammalian subjects, including humans. These populations are formulated into compositions as provided herein, and administered to mammalian subjects using the methods as provided herein.

[0094] Provided herein are therapeutic compositions containing a purified population of bacterial spores. As used herein, the terms “purify”, “purified” and “purifying” refer to the state of a population (e.g., a plurality of known or unknown amount and/or concentration) of desired bacterial spores, that have undergone one or more processes of purification, e.g., a selection or an enrichment of the desired bacterial spore, or alternatively a removal or reduction of residual habitat products as described herein. In some embodiments, a purified population has no detectable undesired activity or, alternatively, the level or amount of the undesired activity is at or below an acceptable level or amount. In other embodiments, a purified population has an amount and/or concentration of desired bacterial spores at or above an acceptable amount and/or concentration. In other embodiments, the ratio of desired-to-undesired activity (e.g. spores compared to vegetative bacteria), has changed by 2-, 5-, 10-, 30-, 100-, 300-, 1×104, 1×105, 1×106, 1×107, 1×108, or greater than 1×108. In other embodiments, the purified population of bacterial spores is enriched as compared to the starting material (e.g., a fecal material) from which the population is obtained. This enrichment may be by 10%, 20%, 30%, 40%, 50%, 60%, 70%, 80%, 90%, 95%, 96%, 97%, 98%, 99%, 99.9%, 99.99%, 99.999%, 99.9999%, 99.9999%, or greater than 99.999999% as compared to the starting material.

[0095] In certain embodiments, the purified populations of bacterial spores have reduced or undetectable levels of one or more pathogenic activities, such as toxicity, an ability to cause infection of the mammalian recipient subject, an undesired immunomodulatory activity, an autoimmune response, a metabolic response, or an inflammatory response or a neurological response. Such a reduction in a pathogenic activity may be by 10%, 20%, 30%, 40%, 50%, 60%, 70%, 80%, 90%, 95%, 96%, 97%, 98%, 99%, 99.9%, 99.99%, 99.999%, 99.9999%, or greater than 99.9999% as compared to the starting material. In other embodiments, the purified populations of bacterial spores have reduced sensory components as compared to fecal material, such as reduced odor, taste, appearance, and umami.

[0096] Provided are purified populations of bacterial spores that are substantially free of residual habitat products. In certain embodiments, this means that the bacterial spore composition no longer contains a substantial amount of the biological matter associated with the microbial community while living on or in the human or animal subject, and the purified population of spores may be 100% free, 99% free, 98% free, 97% free, 96% free, or 95% free of any contamination of the biological matter associated with the microbial community. Substantially free of residual habitat products may also mean that the bacterial spore composition contains no detectable cells from a human or animal, and that only microbial cells are detectable, in particular, only desired microbial cells are detectable. In another embodiment, it means that fewer than 1×10-2%, 1×10-3%, 1×10-4%, 1×10-5%, 1×10-6%, 1×10-7%, 1×10-8% of the cells in the bacterial composition are human or animal, as compared to microbial cells. In another embodiment, the residual habitat product present in the purified population is reduced at least a certain level from the fecal material obtained from the mammalian donor subject, e.g., reduced by at least about 10%, 20%, 30%, 40%, 50%, 60%, 70%, 80%, 90%, 95%, 96%, 97%, 98%, 99%, 99.9%, 99.99%, 99.999%, 99.9999%, or greater than 99.9999%.

[0097] In one embodiment, substantially free of residual habitat products or substantially free of a detectable level of a pathogenic material means that the bacterial composition contains no detectable viral (including bacterial viruses (i.e., phage)), fungal, or mycoplasmal or toxoplasmal contaminants, or a eukaryotic parasite such as a helminth. Alternatively, the purified spore populations are substantially free of an acellular material, e.g., DNA, viral coat material, or non-viable bacterial material. Alternatively, the purified spore population may processed by a method that kills, inactivates, or removes one or more specific undesirable viruses, such as an enteric virus, including norovirus, poliovirus or hepatitis A virus.

[0098] As described herein, purified spore populations can be demonstrated by genetic analysis (e.g., PCR, DNA sequencing), serology and antigen analysis, microscopic analysis, microbial analysis including germination and culturing, and methods using instrumentation such as flow cytometry with reagents that distinguish desired bacterial spores from non-desired, contaminating materials.

[0099] Exemplary biological materials include fecal materials such as feces or materials isolated from the various segments of the small and large intestines. Fecal materials are obtained from a mammalian donor subject, or can be obtained from more than one donor subject, e.g., 2, 3, 4, 5, 6, 7, 8, 9, 10, 15, 20, 25, 30, 35, 40, 45, 50, 75, 100, 200, 300, 400, 500, 750, 1000 or from greater than 1000 donors, where such materials are then pooled prior to purification of the desired bacterial spores. In another embodiment, fecal materials can be obtained from a single donor subject over multiple times and pooled from multiple samples e.g. 1, 2, 3, 4, 5, 6, 7, 8, 9, 10, 15, 20, 25, 30, 32, 35, 40, 45, 48, 50, 100 samples from a single donor.

[0100] In alternative embodiments, the desired bacterial spores are purified from a single fecal material sample obtained from a single donor, and after such purification are combined with purified spore populations from other purifications, either from the same donor at a different time, or from one or more different donors, or both.

[0101] Mammalian donor subjects are generally of good health and have microbiota consistent with such good health. Often, the donor subjects have not been administered antibiotic compounds within a certain period prior to the collection of the fecal material. In certain embodiments, the donor subjects are not obese or overweight, and may have body mass index (BMI) scores of below 25, such as between 18.5 and 24.9. In other embodiments, the donor subjects are not mentally ill or have no history or familial history of mental illness, such as anxiety disorder, depression, bipolar disorder, autism spectrum disorders, schizophrenia, panic disorders, attention deficit (hyperactivity) disorders, eating disorders or mood disorders. In other embodiments, the donor subjects do not have irritable bowel disease (e.g., crohn's disease, ulcerative colitis), irritable bowel syndrome, celiac disease, colorectal cancer or a family history of these diseases. In other embodiments, donors have been screened for blood borne pathogens and fecal transmissible pathogens using standard techniques known to one in the art (e.g. nucleic acid testing, serological testing, antigen testing, culturing techniques, enzymatic assays, assays of cell free fecal filtrates looking for toxins on susceptible cell culture substrates).

[0102] In some embodiments, donors are also selected for the presence of certain genera and/or species that provide increased efficacy of therapeutic compositions containing these genera or species. In other embodiments, donors are preferred that produce relatively higher concentrations of spores in fecal material than other donors. In further embodiments, donors are preferred that provide fecal material from which spores having increased efficacy are purified; this increased efficacy is measured using in vitro or in animal studies as described below. In some embodiments, the donor may be subjected to one or more pre-donation treatments in order to reduce undesired material in the fecal material, and/or increase desired spore populations.

[0103] It is advantageous to screen the health of the donor subject prior to and optionally, one or more times after, the collection of the fecal material. Such screening identifies donors carrying pathogenic materials such as viruses (HIV, hepatitis, polio) and pathogenic bacteria. Post-collection, donors are screened about one week, two weeks, three weeks, one month, two months, three months, six months, one year or more than one year, and the frequency of such screening may be daily, weekly, bi-weekly, monthly, bi-monthly, semi-yearly or yearly. Donors that are screened and do not test positive, either before or after donation or both, are considered “validated” donors.

[0104] Solvent Treatments

[0105] To purify the bacterial spores, the fecal material is subjected to one or more solvent treatments. A solvent treatment is a miscible solvent treatment (either partially miscible or fully miscible) or an immiscible solvent treatment. Miscibility is the ability of two liquids to mix with each to form a homogeneous solution. Water and ethanol, for example, are fully miscible such that a mixture containing water and ethanol in any ratio will show only one phase. Miscibility is provided as a wt/wt %, or weight of one solvent in 100 g of final solution. If two solvents are fully miscible in all proportions, their miscibility is 100%. Provided as fully miscible solutions with water are alcohols, e.g., methanol, ethanol, isopropanol, butanol, propanediol, butanediol, etc. The alcohols can be provided already combined with water; e.g., a solution containing 10%, 20%, 25%, 30%, 35%, 40%, 45%, 50%, 55%, 60%, 65%, 70%, 75%, 89%, 85%, 90%, 95% or greater than 95%. Other solvents are only partially miscible, meaning that only some portion will dissolve in water. Diethyl ether, for example, is partially miscible with water. Up to 7 grams of diethyl ether will dissolve in 93 g of water to give a 7% (wt/wt %) solution. If more diethyl ether is added, a two-phase solution will result with a distinct diethyl ether layer above the water. Other partially miscible materials include ethers, propanoate, butanoate, chloroform, dimethoxyethane, or tetrahydrofuran. In contrast, an oil such as an alkane and water are immiscible and form two phases. Further, immiscible treatments are optionally combined with a detergent, either an ionic detergent or a non-ionic detergent. Exemplary detergents include Triton X-100, Tween 20, Tween 80, Nonidet P40, a pluronic, or a polyol. The solvent treatment steps reduces the viability of non-spore forming bacterial species by 10%, 20%, 30%, 40%, 50%, 60%, 70%, 80%, 85%, 90%, 95%, 99%, 99.9%, 99.99%, 99.999%, or 99.9999%, and it may optionally reduce the viability of contaminating protists, parasites and/or viruses.

[0106] Chromatography treatments. To purify spore populations, the fecal materials are subjected to one or more chromatographic treatments, either sequentially or in parallel. In a chromatographic treatment, a solution containing the fecal material is contacted with a solid medium containing a hydrophobic interaction chromatographic (HIC) medium or an affinity chromatographic medium. In an alternative embodiment, a solid medium capable of absorbing a residual habitat product present in the fecal material is contacted with a solid medium that adsorbs a residual habitat product. In certain embodiments, the HIC medium contains sepharose or a derivatized sepharose such as butyl sepharose, octyl sepharose, phenyl sepharose, or butyl-s sepharose. In other embodiments, the affinity chromatographic medium contains material derivatized with mucin type I, II, III, IV, V, or VI, or oligosaccharides derived from or similar to those of mucins type I, II, III, IV, V, or VI. Alternatively, the affinity chromatographic medium contains material derivatized with antibodies that recognize spore-forming bacteria.

[0107] Mechanical Treatments

[0108] Provided herein is the physical disruption of the fecal material, particularly by one or more mechanical treatment such as blending, mixing, shaking, vortexing, impact pulverization, and sonication. As provided herein, the mechanical disrupting treatment substantially disrupts a non-spore material present in the fecal material and does not substantially disrupt a spore present in the fecal material, or it may disrupt the spore material less than the non-spore material, e.g. 2-fold less, 5-, 10-, 30-, 100-, 300-, 1000- or greater than 1000-fold less. Furthermore, mechanical treatment homogenizes the material for subsequent sampling, testing, and processing. Mechanical treatments optionally include filtration treatments, where the desired spore populations are retained on a filter while the undesirable (non-spore) fecal components to pass through, and the spore fraction is then recovered from the filter medium. Alternatively, undesirable particulates and eukaryotic cells may be retained on a filter while bacterial cells including spores pass through. In some embodiments the spore fraction retained on the filter medium is subjected to a diafiltration step, wherein the retained spores are contacted with a wash liquid, typically a sterile saline-containing solution or other diluent such as a water compatible polymer including a low-molecular polyethylene glycol (PEG) solution, in order to further reduce or remove the undesirable fecal components.

[0109] Thermal Treatments

[0110] Provided herein is the thermal disruption of the fecal material. Generally, the fecal material is mixed in a saline-containing solution such as phosphate-buffered saline (PBS) and subjected to a heated environment, such as a warm room, incubator, water-bath, or the like, such that efficient heat transfer occurs between the heated environment and the fecal material. Preferably the fecal material solution is mixed during the incubation to enhance thermal conductivity and disrupt particulate aggregates. Thermal treatments can be modulated by the temperature of the environment and/or the duration of the thermal treatment. For example, the fecal material or a liquid comprising the fecal material is subjected to a heated environment, e.g., a hot water bath of at least about 20, 25, 30, 35, 40, 45, 50, 55, 60, 65, 70, 75, 80, 85, 90, 95, 100 or greater than 100 degrees Celsius, for at least about 1, 5, 10, 15, 20, 30, 45 seconds, or 1, 2, 3, 4, 5, 6, 7, 8, 9, 10, 15, 20, 25, 30, 40, or 50 minutes, or 1, 2, 3, 4, 5, 6, 7, 8, 9, 10 or more than 10 hours. In certain embodiments the thermal treatment occurs at two different temperatures, such as 30 seconds in a 100 degree Celsius environment followed by 10 minutes in a 50 degree Celsius environment. In preferred embodiments the temperature and duration of the thermal treatment are sufficient to kill or remove pathogenic materials while not substantially damaging or reducing the germination-competency of the spores. In other preferred embodiments, the temperature and duration of the thermal treatment is short enough to reduce the germination of the spore population.

[0111] Irradiation Treatments

[0112] Provided are methods of treating the fecal material or separated contents of the fecal material with ionizing radiation, typically gamma irradiation, ultraviolet irradiation or electron beam irradiation provided at an energy level sufficient to kill pathogenic materials while not substantially damaging the desired spore populations. For example, ultraviolet radiation at 254 nm provided at an energy level below about 22,000 microwatt seconds per cm2 will not generally destroy desired spores.

[0113] Centrifugation and Density Separation Treatments

[0114] Provided are methods of separating desired spore populations from the other components of the fecal material by centrifugation. A solution containing the fecal material is subjected to one or more centrifugation treatments, e.g., at about 200×g, 1000×g, 2000×g, 3000×g, 4000×g, 5000×g, 6000×g, 7000×g, 8000×g or greater than 8000×g. Differential centrifugation separates desired spores from undesired non-spore material; at low forces the spores are retained in solution, while at higher forces the spores are pelleted while smaller impurities (e.g., virus particles, phage, microscopic fibers, biological macromolecules such as free protein, nucleic acids and lipids) are retained in solution. For example, a first low force centrifugation pellets fibrous materials; a second, higher force centrifugation pellets undesired eukaryotic cells, and a third, still higher force centrifugation pellets the desired spores while smaller contaminants remain in suspension. In some embodiments density or mobility gradients or cushions (e.g., step cushions), such as CsCl, Percoll, Ficoll, Nycodenz, Histodenz or sucrose gradients, are used to separate desired spore populations from other materials in the fecal material.

[0115] Also provided herein are methods of producing spore populations that combine two or more of the treatments described herein in order to synergistically purify the desired spores while killing or removing undesired materials and/or activities from the spore population. It is generally desirable to retain the spore populations under non-germinating and non-growth promoting conditions and media, in order to minimize the growth of pathogenic bacteria present in the spore populations and to minimize the germination of spores into vegetative bacterial cells.

[0116] Purified Spore Populations

[0117] As described herein, purified spore populations contain combinations of commensal bacteria of the human gut microbiota with the capacity to meaningfully provide functions of a healthy microbiota when administered to a mammalian subject. Without being limited to a specific mechanism, it is thought that such compositions inhibit the growth of a pathogen such as C. difficile, Salmonella spp., enteropathogenic E. coli, Fusobacterium spp., Klebsiella spp. and vancomycin-resistant Enterococcus spp., so that a healthy, diverse and protective microbiota can be maintained or, in the case of pathogenic bacterial infections such as C. difficile infection, repopulate the intestinal lumen to reestablish ecological control over potential pathogens. In one embodiment, the purified spore populations can engraft in the host and remain present for 1 day, 2 days, 3 days, 4 days, 5 days, 6 days, 7 days, 10 days, 14 days, 21 days, 25 days, 30 days, 60 days, 90 days, or longer than 90 days. Additionally, the purified spore populations can induce other healthy commensal bacteria found in a healthy gut to engraft in the host that are not present in the purified spore populations or present at lesser levels and therefore these species are considered to “augment” the delivered spore populations. In this manner, commensal species augmentation of the purified spore population in the recipient's gut leads to a more diverse population of gut microbiota then present initially.

[0118] Preferred bacterial genera include Acetanaerobacterium, Acetivibrio, Alicyclobacillus, Alkaliphilus, Anaerofustis, Anaerosporobacter, Anaerostipes, Anaerotruncus, Anoxybacillus, Bacillus, Bacteroides, Blautia, Brachyspira, Brevibacillus, Bryantella, Bulleidia, Butyricicoccus, Butyrivibrio, Catenibacterium, Chlamydiales, Clostridiaceae, Clostridiales, Clostridium, Collinsella, Coprobacillus, Coprococcus, Coxiella, Deferribacteres, Desulfitobacterium, Desulfotomaculum, Dorea, Eggerthella, Erysipelothrix, Erysipelotrichaceae, Ethanoligenens, Eubacterium, Faecalibacterium, Filifactor, Flavonifractor, Flexistipes, Fulvimonas, Fusobacterium, Gemmiger, Geobacillus, Gloeobacter, Holdemania, Hydrogenoanaerobacterium, Kocuria, Lachnobacterium, Lachnospira, Lachnospiraceae, Lactobacillus, Lactonifactor, Leptospira, Lutispora, Lysinibacillus, Mollicutes, Moorella, Nocardia, Oscillibacter, Oscillospira, Paenibacillus, Papillibacter, Pseudoflavonifractor, Robinsoniella, Roseburia, Ruminococcaceae, Ruminococcus, Saccharomonospora, Sarcina, Solobacterium, Sporobacter, Sporolactobacillus, Streptomyces, Subdoligranulum, Sutterella, Syntrophococcus, Thermoanaerobacter, Thermobifida, Turicibacter

[0119] Preferred bacterial species are provided at Table 1 and demarcated as spore formers. Where specific strains of a species are provided, one of skill in the art will recognize that other strains of the species can be substituted for the named strain.

[0120] In some embodiments, spore-forming bacteria are identified by the presence of nucleic acid sequences that modulate sporulation. In particular, signature sporulation genes are highly conserved across members of distantly related genera including Clostridium and Bacillus. Traditional approaches of forward genetics have identified many, if not all, genes that are essential for sporulation (spo). The developmental program of sporulation is governed in part by the successive action of four compartment-specific sigma factors (appearing in the order σF, σE, σG and σK), whose activities are confined to the forespore (σF and σG) or the mother cell (σE and σK). In other embodiments, spore-forming bacteria are identified by the biochemical activity of DPA producing enzymes or by analyzing DPA content of cultures. As part of the bacterial sporulation, large amounts of DPA are produced, and comprise 5-15% of the mass of a spore. Because not all viable spores germinate and grow under known media conditions, it is difficult to assess a total spore count in a population of bacteria. As such, a measurement of DPA content highly correlates with spore content and is an appropriate measure for characterizing total spore content in a bacterial population.

[0121] Provided are spore populations containing more than one type of bacterium. As used herein, a “type” or more than one “types” of bacteria may be differentiated at the genus level, the species, level, the sub-species level, the strain level or by any other taxonomic method, as described herein and otherwise known in the art.

[0122] In some embodiments all or essentially all of the bacterial spores present in a purified population are obtained from a fecal material treated as described herein or otherwise known in the art. In alternative embodiments, one or more than one bacterial spores or types of bacterial spores are generated in culture and combined to form a purified spore population. In other alternative embodiments, one or more of these culture-generated spore populations are combined with a fecal material-derived spore population to generate a hybrid spore population. Bacterial compositions may contain at least two types of these preferred bacteria, including strains of the same species. For instance, a bacterial composition may comprise at least 2, at least 3, at least 4, at least 5, at least 6, at least 7, at least 8, at least 9, at least 10, at least 11, at least 12, at least 13, at least 14, at least 15, at least 16, at least 17, at least 18, at least 19, or at least 20 or more than 20 types of bacteria, as defined by species or operational taxonomic unit (OTU) encompassing such species.

[0123] Thus, provided herein are methods for production of a composition containing a population of bacterial spores suitable for therapeutic administration to a mammalian subject in need thereof. And the composition is produced by generally following the steps of: (a) providing a fecal material obtained from a mammalian donor subject; and (b) subjecting the fecal material to at least one purification treatment or step under conditions such that a population of bacterial spores is produced from the fecal material. The composition is formulated such that a single oral dose contains at least about 1×104 colony forming units of the bacterial spores, and a single oral dose will typically contain about 1×104, 1×105, 1×106, 1×107, 1×108, 1×109, 1×1010, 1×1011, 1×1012, 1×1013, 1×1014, 1×1015, or greater than 1×1015 CFUs of the bacterial spores. The presence and/or concentration of a given type of bacterial spore may be known or unknown in a given purified spore population. If known, for example the concentration of spores of a given strain, or the aggregate of all strains, is e.g., 1×104, 1×105, 1×106, 1×107, 1×108, 1×109, 1×1010, 1×1011, 1×1012, 1×1013, 1×1014, 1×1015, or greater than 1×1015 viable bacterial spores per gram of composition or per administered dose.

[0124] In some formulations, the composition contains at least about 0.5%, 1%, 2%, 5%, 10%, 20%, 30%, 40%, 50%, 60%, 70%, 80%, 90% or greater than 90% spores on a mass basis. In some formulations, the administered dose does not exceed 200, 300, 400, 500, 600, 700, 800, 900 milligrams or 1, 1.1, 1.2, 1.3, 1.4, 1.5, 1.6, 1.7, 1.8, or 1.9 grams in mass.

[0125] The bacterial spore compositions are generally formulated for oral or gastric administration, typically to a mammalian subject. In particular embodiments, the composition is formulated for oral administration as a solid, semi-solid, gel, or liquid form, such as in the form of a pill, tablet, capsule, or lozenge. In some embodiments, such formulations contain or are coated by an enteric coating to protect the bacteria through the stomach and small intestine, although spores are generally resistant to the stomach and small intestines. In other embodiments, the bacterial spore compositions may be formulated with a germinant to enhance engraftment, or efficacy. In yet other embodiments, the bacterial spore compositions may be co-formulated or co-administered with prebiotic substances, to enhance engraftment or efficacy.

[0126] The bacterial spore compositions may be formulated to be effective in a given mammalian subject in a single administration or over multiple administrations. For example, a single administration is substantially effective to reduce Cl. difficile and/or Cl. difficile toxin content in a mammalian subject to whom the composition is administered.

[0127] Substantially effective means that Cl. difficile and/or Cl. difficile toxin content in the subject is reduced by at least 10%, 20%, 30%, 40%, 50%, 60%, 70%, 80%, 90%, 95%, 98%, 99% or greater than 99% following administration of the composition. Alternatively, efficacy may be measured by the absence of diarrheal symptoms or the absence of carriage of C. difficile or C. difficile toxin after 2 day, 4 days, 1 week, 2 weeks, 4 weeks, 8 weeks or longer than 8 weeks.

[0128] Microbial Compositions Described by Operational Taxonomic Unit (OTU)

[0129] A microbial composition may be prepared comprising at least two types of isolated bacteria, wherein a first type is a first OTU comprising a bacterial species herein, and the second type is a second OTU characterized by, i.e., at least 93%, 94%, 95%, 96%, 97%, 98%, 99%, 99.9%, 99.99% or including 100% sequence identity to the first OTU. Alternatively, the first and second type of OTU may share less than 93% sequence identity. In some embodiments, two types of bacteria are provided in a composition, and the first bacteria and the second bacteria are not the same OTU.

[0130] A microbial composition may be prepared comprising at least an isolated bacteria, wherein a first type is a first OTU comprising a bacterial species herein, and the second type is a second OTU characterized by, i.e., at least 93%, 94%, 95%, 96%, 97%, 98%, 99%, 99.9%, 99.99% or including 100% sequence identity to the first OTU. In some embodiments, two types of bacteria are provided in a composition, and the first bacteria and the second bacteria are not the same OTU.

[0131] Genetic similarity among OTUs is determined by comparison of one or more nucleic acid sequences representing a given OTU with nucleic acid sequences representing other OTUs. OTUs are defined and compared using both sequence similarity and position in phylogenetic tree. A phylogenetic tree refers to a graphical representation of the evolutionary relationships of one genetic sequence to another that is generated using a defined set of phylogenetic reconstruction algorithms (e.g. parsimony, maximum likelihood, or Bayesian). Nodes in the tree represent distinct ancestral sequences and the confidence of any node is provided by a bootstrap or Bayesian posterior probability, which is a measure of branch uncertainty. OTUs are terminal leaves in a phylogenetic tree (i.e. branch end points) and are defined by a specific genetic sequence and all sequences that share sequence identity to this sequence at the level of species. The specific genetic sequence may be the 16S sequence, portion of the 16S sequence, full genome sequence, or some portion of the full genome sequence. OTUs share at least 95%, 96%, 97%, 98%, or 99% sequence identity. OTUs are frequently defined by comparing sequences between organisms. Sequences with less than 95% sequence identity are not considered to form part of the same OTU. Further, genetic sequences representing a single OTU will form a monophyletic clade (i.e. set of sequences all originating from a single node in the tree).

[0132] Detection of Pathogens or Undesired Contaminants

[0133] A. Enrichment of Undesired Bacterial Strains and/or Pathogens in Bacterial Compositions

[0134] The methods of the invention provide mechanisms by which contaminating bacterial strains (herein “undesired bacteria” or “undesired bacterial strains”) or other pathogens or contaminating materials such as yeast, viruses including phage, or eukaryotic parasites, present at very low levels in a therapeutic bacterial composition or other bacteria-containing materials can be detected and, optionally, quantified. In embodiments of the invention, contaminating bacterial strains present at a ratio of about 10⁻⁵, 10⁻⁶, 10⁻⁷, 10⁻⁸, 10⁻⁹, 10⁻¹⁰, or below 10⁻¹⁰ compared to the non-contaminating strains. In some embodiments, the undesired bacteria are enriched from a bacterial composition prior to performing one or more detection steps on the composition, as provided herein. Multiple methods of enrichment and detection are provided, and one of skill in the art would recognize that one or more enrichment steps can be combined with one or more detection steps. Additionally, the methods of enrichment and/or detection may be repeated one or more times for the same undesired bacterial strain or to address multiple undesired bacterial strains (e.g., one configuration of enrichment steps and detection steps may be performed for the detection of anaerobic contaminants whereas another configuration may be performed for the detection of aerobic contaminants).

[0135] In a first method, an enrichment step may be carried out as follows: an antibody or other protein, lectin or other ligand (such as a DNA or RNA aptamer) specific for each of the desired bacterial strains (i.e., the strains intended to be present in the microbial composition) can be attached to a solid support and used to selectively bind to or remove the product strains. The selective removal process may be conducted in: a batch mode, whereby the bacterial composition is contacted with the solid support material to which the antibodies are bound. After an appropriate incubation period, the solid support is removed by filtration, centrifugation or any other method of separation to selectively remove the bound product strains and selectively enrich for the contaminants in the supernatant that is left behind; or a flow mode, whereby the bacterial composition is flowed over the solid support to which the antibody is bound, with the contaminants being selectively enriched in the eluate. In an alternative embodiment a spore fraction can be selectively enriched or removed from a microbial mixture by using a chromatographic separation based on hydrophobic interactions. This can be performed in batch mode or flow mode. In yet another alternative embodiment, the antibody may selectively bind to the suspected contaminant, with subsequent filtration, centrifugation or separation designed to enrich the solid support from which the contaminant can be detected by methods described below.

[0136] In a second method, an enrichment step may be carried out as follows: adding to the bacterial composition an antibody specific for each desired bacterial strain, followed by the addition of serum complement to selectively kill or inactivate the desired bacterial strains, thus enriching the undesired bacterial strains. In this method, it is important to select an antibody whose Fc region is capable of being recognized by complement when bound to its target. Thus, IgM would be particularly useful, as would any other IgG subtype that is capable of being recognized by activated complement, but an IgG4 subtype antibody would not generally be appropriate. The method provides for altering parameters of the method based on the number of bacteria in the bacterial composition, e.g., antibody concentration, ionic strength, serum complement concentration and temperature, in order to maximize the killing of the desired bacterial strains and the enrichment of viable contaminants.

[0137] In a third method, a conjugated antibody may be used in a homogenous format to bind to and inactivate the desired bacterial strains. In particular, the use of antibodies conjugated to toxins is a means of localizing the toxin activity in the region of the bacteria that one desires to deplete. Many forms of toxins can be envisioned. For instance, the antibody can be covalently paired with an enzyme that converts a non-toxic substrate into a toxin, which then acts locally. The conjugate may be toxic itself or it may be hydrolyzed from the antibody to yield a toxic product. The toxin may be a photoactivatable agent, such as a porphyrin derivative, that forms activated singlet oxygen species in the presence of an appropriate wavelength of light. The enzymatic and photosensitizer approaches have the advantage of temporal separation between the antibody binding event and the toxin activation event. Thus, excess free antibody or antibody that is non-specifically adsorbed to contaminants can be removed by washing before activating the toxin. In the case of using a photosensitizer, the wavelength of light is chosen such that the light by itself has no effect on bacterial viability.

[0138] In a fourth method, biological means are provided for selectively enriching for the contaminant (or a product of the contaminant). For example, bacterial viruses (or phage) can be identified that have exquisite sensitivity for replicating in bacteria of a specific genus, species or strain. Thus, phage may be selected that are specific to the product strains but do not replicate in the undesired bacterial strain(s). For instance, phage that replicate in and lyse Bacteroides vulgatus would not have the same effect on Salmonella contaminants. Thus, an appropriately selected population of bacteriophage could be used to selectively enrich the undesired bacterial strains by killing or lysing the desired bacterial strains. Another method employing phage is to selectively enrich the contaminants (or a product of the contaminants) by using phage that grow in an undesired bacterial species. Thus, a coliphage could be added to a mixed bacterial product (i.e., a product known or believed to contain one or more undesired bacterial strains) that is not itself intended to have a coliform bacterium. If the E. coli were present as a contaminant, the phage would bind to and replicate in these contaminating organisms. The phage itself is amplified through this procedure and the amplification product could be detected in a subsequent step.

[0139] In a fifth method, bacteriophage can be introduced into a population to induce growth of one or more specified host undesired bacteria. In specific embodiments, phage are engineered to target one or more than one undesired bacteria, and to control the rate of growth of the host bacteria.

[0140] In a sixth method, selective culture conditions can be employed to address mixed populations of aerobic and anaerobic bacteria. For example, the mixed population is selectively cultured under or exposed to aerobic conditions. Resulting from this, obligate anaerobes will be killed over a period of time dependent on their oxygen sensitivity. For example, if in a mixed population containing desired bacterial strains and undesired bacterial strains, 4 of 5 strains present are anaerobes, this aerobic cultivation step selectively eliminates the viable anaerobes. As a result, the remaining contaminant is detected as one would for a non-mixed bacterial product containing one desired bacterium and potential non-product contaminants. Optionally, aerobic exposure is followed by one or more selective growth conditions (e.g., selecting against the growth of the remaining aerobic organism) to selectively grow the undesired bacteria. It is then straightforward to define one or more selective media, and each of these are utilized separately to detect the presence of undesired bacterial strains. Examples of selective media are given in the United States Pharmacopeia (USP) Chapters 61, 62, 2021 and 2022 (herein USP <61>, <62>, <2021>, and <2022>), and in Wadsworth-KTL Anaerobic Bacteriology Manual (Star Publishing Company, 6th Edition), Manual of Clinical Microbiology (ASM Press, 10th Edition). By way of non-limiting example, undesired microbes include Pseudomonas aeruginosa, Salmonella spp., Candida albicans, Klebsiella pneumoniae, Aspergillus brasiliensis, Staphylococcus aureus, Clostridium sporogenes, Clostridium difficile, E. coli spp., and Bacillus subtilis, and combinations thereof. Such selective media and their combinations may be used to selectively detect contamination with undesired pathogens and microbes. Media may be validated to detect pathogenic bacteria by testing using model organisms that mimic undesired bacteria.

[0141] In a seventh method, mixed populations may be enriched by depletion of classes of microbes that are amenable to separations, or sensitive to treatments. As an example, bacteria of different sizes or morphologies may be sorted from others by flow cytometry using light scattering properties or sorting in a flow cytometer after binding of fluorescently labeled antibodies using distinct fluorophores, or imaged via microscopy and destroyed in situ (see e.g.—Cytometry Part A, 61A:153-161, 2004). Antibiotic treatments and their combinations can selectively deplete major populations, for example gram negative desired strains can be depleted by certain aminoglycoside antibiotics to enrich for gram positive contaminants. Contact with bacteriocins, may also be used for selective depletion of populations (e.g. colicins against E. coli).

[0142] In an eighth method, elements of the innate immune system such as pattern recognition receptors may be used to recognize and selectively trap and thus enrich contaminating populations, e.g. mannose binding lectin to bind yeast and other cells, L-ficolin to trap gram positive cells. Enzymatic treatment of the sample to enhance binding of the target population, e.g. treatment with sialidase to enhance binding to asialoglycoprotein receptor, may be performed to enhance binding and depletion/enrichment of populations. Recognition and depletion strategies may be combined with selective killing methods such as combination of mannose binding lectin with complement.

[0143] In a ninth method, nucleic acid sequences, e.g., sequences representative of undesired bacterial strains, are enriched, using methods known in the art. For example, nucleic acid probes may be utilized to selectively deplete the sequence of the desired bacterial strains, thus enriching the nucleic acid sequences of the undesired bacterial strains. As an example, hybrid selection using nucleic acid mixtures comprised of DNA, cDNA and/or RNA from a bacterial culture or clinical patient infected with the bacterial strain of interest can be used to selectively enrich, or deplete a target as appropriate. (See, e.g., Melnikov et al., 2011. Genome Biology, 12:R73). In another embodiment, depletion may target nucleic acids known to be in the sample at high concentrations. As a non-limiting example, tRNAs in a sample are derived from a mammalian subject could be viewed as contaminating nucleic acid sequences in a nucleic acid preparation searching for pathogenic species including but not limited to bacterial 16S sequences, antibiotic resistance genes, pathogenic island sequences, toxin genes or other pathogenetic nucleic acid signatures known to one skilled in the art (e.g. see Hacker et al Pathogenicity islands of virulent bacteria: structure, function and impact on microbial evolution. Mol Microbiology 23(6): 1089-1097. 1997). In order to obtain nucleic acid sequences of interest, all bacteria in a bacterial composition are lysed, e.g., through a combination of heat, detergent, enzymatic digestion and/or alkaline pH, followed by steps to purify the total DNA or RNA from other macromolecules. To obtain RNA, cDNA is amplified using methods known in the art, and the DNA and/or cDNA is then subjected to shearing or enzymatic digestion to fragments of appropriate size, in the range of 1000-10,000 base pairs on average. The DNA is denatured by transiently heating. To this denatured DNA mixture, a variety of DNA captures probes are added (alternatively the probes are added prior to heating). These capture probes are designed to bind to known sequences on both strands of the genes of the desired bacterial strains. Furthermore, the capture probes are tagged (e.g.—biotinylated), typically on a 5′ or 3′ end. After an appropriate incubation period to form duplexes between the capture probes and target sequences, the mixture is incubated with a solid matrix to which a tag-binding component (e.g. streptavidin or any other biotin-binding reagent) is attached. Multiple different incubation periods and annealing temperature profiles may be used during the annealing process to selectively capture nucleic acid fragments harboring specific characteristics. The tag-binding matrix selectively binds to the target DNA sequence and removes it from solution. The matrix is removed through a number of means including filtration or centrifugation. The remaining DNA sequences are significantly enriched in contaminant sequences. This procedure may be carried out multiple times in series to achieve successive enrichment of contaminant DNA. By way of non-limiting example, an enrichment using 16S rDNA sequences from the desired bacterial strains enriches for the 16S sequences of contaminating undesired bacterial strains. The resulting enriched mixture may then be evaluated by 16S rDNA deep sequencing to detect the contaminant 16S sequences. Similarly, one may select capture probes that selectively target any other region of the product strain genome. An additional example includes the use of CRISPRs (clustered regularly interspaced short palindromic repeats) to selectively enrich for specific bacterial targets or classes of bacteria.

[0144] In a tenth method, one can selectively amplify the nucleic acids in the sample, either as a stand-alone process or after using any of the enrichment methods described herein. Amplification may involve polymerase chain reaction (PCR) or related methods using degenerate primers for highly conserved genes, targeted primers for specific genes known to be harbored by contaminants of interest, or linker ligation strategies for non-specific amplification of all the (remaining) genomes in a sample. An example using degenerate primers would be the set of primers used for 16S rDNA sequencing of microbial specimens—using this method after one or more of the enrichment steps above will selectively amplify contaminant rDNA sequences. Nucleic acid sequences can be detected by sequencing, hybridization to targets, restriction fragment polymorphism or any method for identifying a nucleic acid molecule.

[0145] B. Detection in Microbial Compositions.

[0146] The methods described herein are useful for detecting one or more species, strains, or other related group of pathogenic or otherwise undesired (i.e., contaminating) microbes. Additionally multiple classes of undesired entities can be simultaneously detected in a material such as a therapeutic bacterial composition. For example, the presence of any two classes of pathogens including pathogenic bacteria, viruses, and fungi, or more than two classes, are simultaneously or sequentially determined in a composition.

[0147] Sensitivity of Detection

[0148] In some embodiments provided are methods that comprise one or more steps of detecting, or attempting to detect, an undesired entity in a material. In some embodiments, these detection steps individually have a sensitivity for the undesired entity of at least about 1×10², such as 1×10³, 1×10⁴, 1×10⁵, 1×10⁶, or greater than 1×10⁶. When more than one detection step is employed, the combination of two or more detection steps provides a combined sensitivity for the undesired entity of at least about 1×10³, such as 1×10⁴, 1×10⁵, 1×10⁶, 1×10, 1×10⁸, 1×10⁹, 1×10¹⁰, 1×10¹¹, or greater than 1×10¹¹.

[0149] In other embodiments, the detection steps individually have a sensitivity to detect the undesired entity at a concentration below that concentration required to detect the desired entity. For example, one detection step, or a combination of two or more detection steps, has the sensitivity to detect the undesired entity, if present in the material, at a concentration below about 1×10⁻² the concentration of the desired entity, such as below about 1×10⁻³, 1×10⁻⁴, 1×10⁻⁵, 1×10⁻⁶, 1×10⁻⁷, 1×10⁻⁸, or below about 1×10⁻⁸ the concentration of the desired entity.

[0150] Polymerase chain reaction (PCR), culture and colony counting methods, immunology-based methods and biosensor methods are useful detection steps for detection of pathogen or other undesired biological entities as described herein. Such detection steps can be performed individually, combinatorially, serially, or sequentially. Such detection steps require amplified DNA, RNA, cDNA analysis; counting of bacteria; antigen-antibody interactions; and detection of biological recognition elements (e.g., enzymes, antibodies and nucleic acids), respectively.

[0151] Polymerase chain reaction. PCR is a nucleic acid amplification technology based on the isolation, amplification and quantification of one or more DNA sequences including the undesired bacteria's genetic material. Examples of different PCR methods developed for bacterial detection are: (i) real-time PCR, (ii) multiplex PCR and (iii) reverse transcriptase PCR (RT-PCR). There are also methods coupling PCR to other techniques. Multiplex PCR is very useful as it allows the simultaneous detection of several undesired bacteria by introducing different primers to amplify DNA regions coding for specific genes of each undesired bacteria or bacterial strain. One of the limitations of PCR is that the user cannot discriminate between viable and non-viable undesired bacteria because DNA is generally present regardless of the viability of the undesired bacteria. Reverse transcriptase PCR (RT-PCR) was developed may be adapted in order to preferentially detect viable cells. PCR may also be augmented by additional technologies and techniques such as “the most probable number counting method” (MPN-PCR), surface plasmon resonance and PCR-acoustic wave sensors, LightCycler real-time PCR (LC-PCR) and PCR-enzyme-linked immunosorbent assay (PCR-ELISA), a sandwich hybridization assay (SHA) or FISH (fluorescence in situ hybridization) detection, and digital color-coded barcode technologies.

[0152] Culture and Colony Counting Methods

[0153] The culturing and plating method is generally cited as a standard detection method. Generally, selective and/or differential media are used to detect particular undesired bacteria species or strains. The selective media may contain inhibitors (in order to stop or delay the growth of strains other than undesired bacterial strains) or particular substrates that only the undesired bacteria can degrade or that confers a particular color to the growing colonies. The selective media may contain inhibitors (for example, antibiotics or bile salts) that to prevent or delay the growth of certain species, substrates that allow growth of only certain organisms (for example, cellibiose as the key carbon source such that only cellibiose-utilizing species can grow), and/or particular substrates that yield differential colony morphologies (for example, only the undesired bacteria can degrade a substrate which confers a particular color to the growing colonies). Detection is then carried out using optical methods, mainly by ocular inspection or the use of automated colony counters, sometimes in combination with image analysis, e.g., to identify particular colony morphologies, and color-coded barcode technologies.

[0154] Immunology-Based Methods

[0155] The field of immunology-based methods for undesired bacteria detection provides analytical tools for a wide range of targets. For example, immunomagnetic separation (IMS) can be used to capture and extract the undesired bacterial strain from the therapeutic composition by introducing antibody coated magnetic beads. IMS is useful in combination with almost any detection method, e.g., optical, magnetic force microscopy, magnetoresistance and Hall effect. Other detection methods are based on immunological techniques, e.g., the enzyme-linked immunosorbent assay (ELISA).

[0156] Biosensor-Based Methods in Pathogenic Bacteria or Other Contaminating Material Detection

[0157] Biosensors are analytical devices incorporating a biological material, a biologically derived material, or a biomimic associated with or integrated within a physicochemical transducer or transducing microsystem, such as an optical, electrochemical, thermometric, piezoelectric, magnetic or micromechanical systems. There are four main classes of biological recognition elements that are used in biosensor applications: (i) enzymes, (ii) antibodies, (iii) nucleic acids, and (iv) phage.

[0158] See, e.g., the following, which are incorporated by reference in their entireties. Abdel-Hamid, 1999. Biosens. Bioelectron. 14,309-316; Blais, 2004. Lett. Appl. Microbiol.; Daly, 2004. J. Appl. Microbiol. 96,419-429; Fu, 2005. Int. J. Food Microbiol. 99, 47-57; Higgins, 2003. Biosens. Bioelectron. 18, 1115-1123; Tims, 2003. J. Microbiol. Methods 55, 141-147; Radke, 2005. Biosens. Bioelectron. 20,1662-1667.

[0159] Other embodiments will be apparent to those skilled in the art from consideration of the specification and practice of the embodiments.

### EXAMPLES

[0160] Below are examples of specific embodiments for carrying out the present invention. The examples are offered for illustrative purposes only, and are not intended to limit the scope of the present invention in any way. Efforts have been made to ensure accuracy with respect to numbers used (e.g., amounts, temperatures, etc.), but some experimental error and deviation should, of course, be allowed for.

[0161] The practice of the present invention will employ, unless otherwise indicated, conventional methods of protein chemistry, biochemistry, recombinant DNA techniques and pharmacology, within the skill of the art. Such techniques are explained fully in the literature. See, e.g., T. E. Creighton, Proteins: Structures and Molecular Properties (W.H. Freeman and Company, 1993); A. L. Lehninger, Biochemistry (Worth Publishers, Inc., current addition); Sambrook, et al., Molecular Cloning: A Laboratory Manual (2nd Edition, 1989); Methods In Enzymology (S. Colowick and N. Kaplan eds., Academic Press, Inc.); Remington's Pharmaceutical Sciences, 18th Edition (Easton, Pa.: Mack Publishing Company, 1990); Carey and Sundberg Advanced Organic Chemistry 3^{rd} Ed. (Plenum Press) Vols A and B (1992).

### Example 1

### Species Identification

[0162] The identity of the bacterial species which grew up from a complex fraction can be determined in multiple ways. First, individual colonies can be picked into liquid media in a 96 well format, grown up and saved as 15% glycerol stocks at −80° C. Aliquots of the cultures can be placed into cell lysis buffer and colony PCR methods can be used to amplify and sequence the 16S rDNA gene (Example 3). Alternatively, colonies may be streaked to purity in several passages on solid media. Well separated colonies are streaked onto the fresh plates of the same kind and incubated for 48-72 hours at 37° C. The process is repeated multiple times in order to ensure purity. Pure cultures can be analyzed by phenotypic- or sequence-based methods, including 16S rDNA amplification and sequencing as described in Examples 3 & 4. Sequence characterization of pure isolates or mixed communities e.g. plate scrapes and spore fractions can also include whole genome shotgun sequencing. The latter is valuable to determine the presence of genes associated with sporulation, antibiotic resistance, pathogenicity, and virulence. Colonies can also be scraped from plates en masse and sequenced using a massively parallel sequencing method as described in Examples 3 & 4 such that individual 16S signatures can be identified in a complex mixture. Optionally, the sample can be sequenced prior to germination (if appropriate DNA isolation procedures are used to lsye and release the DNA from spores) in order to compare the diversity of germinable species with the total number of species in a spore sample. As an alternative or complementary approach to 16S analysis, MALDI-TOF-mass spec can also be used for species identification (as reviewed in Anaerobe 22:123).

### Example 2

### Microbiological Strain Identification Approaches

[0163] Pure bacterial isolates can be identified using microbiological methods as described in Wadsworth-KTL Anaerobic Microbiology Manual (Jousimies-Somer, et al 2002) and The Manual of Clinical Microbiology (ASM Press, 10th Edition). These methods rely on phenotypes of strains and include Gram-staining to confirm Gram positive or negative staining behavior of the cell envelope, observance of colony morphologies on solid media, motility, cell morphology observed microscopically at 60× or 100× magnification including the presence of bacterial endospores and flagella. Biochemical tests that discriminate between genera and species are performed using appropriate selective and differential agars and/or commercially available kits for identification of Gram negative and Gram positive bacteria and yeast, for example, RapID tests (Remel) or API tests (bioMerieux). Similar identification tests can also be performed using instrumentation such as the Vitek 2 system (bioMerieux). Phenotypic tests that discriminate between genera and species and strains (for example the ability to use various carbon and nitrogen sources) can also be performed using growth and metabolic activity detection methods, for example the Biolog Microbial identification microplates. The profile of short chain fatty acid production during fermentation of particular carbon sources are used as a way to discriminate between species (Wadsworth-KTL Anaerobic Microbiology Manual, Jousimies-Somer, et al 2002). MALDI-TOF-mass spectrometry can also be used for species identification (as reviewed in Anaerobe 22:123).

### Example 3

### Sequence-Based Genomic Characterization of Operational Taxonomic Units (OTU) and Functional Genes

### Method for Determining 16S rDNA Gene Sequence

[0164] OTUs are defined either by full 16S sequencing of the rRNA gene, by sequencing of a specific hypervariable region of this gene (i.e. V1, V2, V3, V4, V5, V6, V7, V8, or V9), or by sequencing of any combination of hypervariable regions from this gene (e.g. V1-3 or V3-5). The bacterial 16S rRNA gene is approximately 1500 nucleotides in length and is used in reconstructing the evolutionary relationships and sequence similarity of one bacterial isolate to another using phylogenetic approaches. 16S sequences are used for phylogenetic reconstruction as they are in general highly conserved, but contain specific hypervariable regions that harbor sufficient nucleotide diversity to differentiate genera and species of most microbes. rRNA gene sequencing methods are applicable to both the analysis of non-enriched samples, but also for identification of microbes after enrichment steps that either enrich the microbes of interest from the microbial composition and/or the nucleic acids that harbor the appropriate rDNA gene sequences as described below. For example, enrichment treatments prior to 16S rDNA gene characterization will increase the sensitivity of 16S as well as other molecular-based characterization nucleic acid purified from the microbes.

[0165] Using well known techniques to determine the full 16S sequence or the sequence of any hypervariable region of the 16S rRNA sequence, genomic DNA was extracted from a bacterial sample, the 16S rDNA (full region or specific hypervariable regions) amplified using polymerase chain reaction (PCR), the PCR products cleaned, and nucleotide sequences delineated to determine the genetic composition of 16S gene or subdomain of the gene. If full 16S sequencing is performed, the sequencing method used may be, but is not limited to, Sanger sequencing. If one or more hypervariable regions are used, such as the V4 region, the sequencing may be, but is not limited to being, performed using the Sanger method or using a next-generation sequencing method, such as an Illumina (sequencing by synthesis) method using barcoded primers allowing for multiplex reactions.

[0166] Method for Determining 18S rDNA and ITS Gene Sequence

[0167] Methods to assign and identify fungal OTUs by genetic means are accomplished by analyzing 18S sequences and the internal transcribed spacer (ITS). The rRNA of fungi that forms the core of the ribosome is transcribed as a signal gene and consists of the 8S, 5.8S and 28S regions with ITS4 and 5 between the 8S and 5.8S and 5.8S and 28S regions, respectively. These two intercistronic segments between the 18S and 5.8S and 5.8S and 28S regions are removed by splicing and contain significant variation between species for barcoding purposes as previously described (Schoch et al Nuclear ribosomal internal transcribed spacer (ITS) region as a universal DNA barcode marker for Fungi. PNAS 109:6241-6246. 2012). 18S rDNA is traditionally used for phylogenetic reconstruction however the ITS can serve this function as it is generally highly conserved but contains hypervariable regions that harbor sufficient nucleotide diversity to differentiate genera and species of most fungus.

[0168] Using well known techniques, in order to determine the full 18S and ITS sequences or a smaller hypervariable section of these sequences, genomic DNA is extracted from a microbial sample, the rDNA amplified using polymerase chain reaction (PCR), the PCR products cleaned, and nucleotide sequences delineated to determine the genetic composition rDNA gene or subdomain of the gene. The sequencing method used may be, but is not limited to, Sanger sequencing or using a next-generation sequencing method, such as an Illumina (sequencing by synthesis) method using barcoded primers allowing for multiplex reactions.

[0169] Method for Determining Other Marker Gene Sequences

[0170] In addition to the 16S and 18S rRNA gene, one may define an OTU by sequencing a selected set of genes that are known to be marker genes for a given species or taxonomic group of OTUs. These genes may alternatively be assayed using a PCR-based screening strategy. As example, various strains of pathogenic Escherichia coli can be distinguished using DNAs from the genes that encode heat-labile (LTI, LTIIa, and LTIIb) and heat-stable (STI and STII) toxins, verotoxin types 1, 2, and 2e (VT1, VT2, and VT2e, respectively), cytotoxic necrotizing factors (CNF1 and CNF2), attaching and effacing mechanisms (eaeA), enteroaggregative mechanisms (Eagg), and enteroinvasive mechanisms (Einv). The optimal genes to utilize for taxonomic assignment of OTUs by use of marker genes are familiar to one with ordinary skill of the art of sequence based taxonomic identification.

[0171] Genomic DNA Extraction

[0172] Genomic DNA is extracted from pure microbial cultures using a hot alkaline lysis method. 1 μl of microbial culture is added to 9 μl of Lysis Buffer (25 mM NaOH, 0.2 mM EDTA) and the mixture is incubated at 95° C. for 30 minutes. Subsequently, the samples are cooled to 4° C. and neutralized by the addition of 10 μl of Neutralization Buffer (40 mM Tris-HCl) and then diluted 10-fold in Elution Buffer (10 mM Tris-HCl). Alternatively, genomic DNA is extracted from pure microbial cultures using commercially available kits such as the Mo Bio Ultraclean® Microbial DNA Isolation Kit (Mo Bio Laboratories, Carlsbad, Calif.) or by standard methods known to those skilled in the art. For fungal samples, DNA extraction can be performed by methods described previously (US20120135127) for producing lysates from fungal fruiting bodies by mechanical grinding methods.

[0173] Amplification of 16S Sequences for Downstream Sanger Sequencing

[0174] To amplify bacterial 16S rDNA (FIG. 1A), 2 μl of extracted gDNA is added to a 20 μl final volume PCR reaction. For full-length 16 sequencing the PCR reaction also contains 1× HotMasterMix (SPRIME, Gaithersburg, Md.), 250 nM of 27f (AGRGTTTGATCMTGGCTCAG, IDT, Coralville, Iowa), and 250 nM of 1492r (TACGGYTACCTTGTTAYGACTT, IDT, Coralville, Iowa), with PCR Water (Mo Bio Laboratories, Carlsbad, Calif.) for the balance of the volume. Alternatively, other universal bacterial primers or thermostable polymerases known to those skilled in the art are used. For example primers are available to those skilled in the art for the sequencing of the the “V1-V9 regions” of the 16S rRNA (FIG. 1A). These regions refer to the first through ninth hypervariable regions of the 16S rRNA gene that are used for genetic typing of bacterial samples. These regions in bacteria are defined by nucleotides 69-99, 137-242, 433-497, 576-682, 822-879, 986-1043, 1117-1173, 1243-1294 and 1435-1465 respectively using numbering based on the E. coli system of nomenclature. Brosius et al., Complete nucleotide sequence of a 16S ribosomal RNA gene from Escherichia coli, PNAS 75(10):4801-4805 (1978). In some embodiments, at least one of the V1, V2, V3, V4, V5, V6, V7, V8, and V9 regions are used to characterize an OTU. In one embodiment, the V1, V2, and V3 regions are used to characterize an OTU. In another embodiment, the V3, V4, and V5 regions are used to characterize an OTU. In another embodiment, the V4 region is used to characterize an OTU. A person of ordinary skill in the art can identify the specific hypervariable regions of a candidate 16S rRNA (in FIG. 1) by comparing the candidate sequence in question to the reference sequence (FIG. 2) and identifying the hypervariable regions based on similarity to the reference hypervariable regions.

[0175] FIG. 1 shows the hypervariable regions mapped onto a 16s sequence and the sequence regions corresponding to these sequences on a sequence map.

[0176] The PCR is performed on commercially available thermocyclers such as a BioRad MyCycler™ Thermal Cycler (BioRad, Hercules, Calif.). The reactions are run at 94° C. for 2 minutes followed by 30 cycles of 94° C. for 30 seconds, 51° C. for 30 seconds, and 68° C. for 1 minute 30 seconds, followed by a 7 minute extension at 72° C. and an indefinite hold at 4° C. Following PCR, gel electrophoresis of a portion of the reaction products is used to confirm successful amplification of a ˜1.5 kb product.

[0177] To remove nucleotides and oligonucleotides from the PCR products, 2 μl of HT ExoSap-IT (Affymetrix, Santa Clara, Calif.) is added to 5 μl of PCR product followed by a 15 minute incubation at 37° C. and then a 15 minute inactivation at 80° C.

[0178] Amplification of 16S Sequences for Downstream Characterization by Massively Parallel Sequencing Technologies

[0179] Amplification performed for downstream sequencing by short read technologies such as Illumina require amplification using primers known to those skilled in the art that additionally include a sequence-based barcoded tag. As example, to amplify the 16s hypervariable region V4 region of bacterial 16S rDNA, 2 μl of extracted gDNA is added to a 20 μl final volume PCR reaction. The PCR reaction also contains 1× HotMasterMix (5PRIME, Gaithersburg, Md.), 200 nM of V4_{—}515_f adapt (AATGATACGGCGACCACCGAGATCTACACTATGGTAATTGTGTGCCAGCMGCCG CGGTAA, IDT, Coralville, Iowa), and 200 nM of barcoded 806rbc (CAAGCAGAAGACGGCATACGAGAT_{—}12bpGolayBarcode_AGTCAGTCAGCCGGACT ACHVGGGTWTCTAAT, IDT, Coralville, Iowa), with PCR Water (Mo Bio Laboratories, Carlsbad, Calif.) for the balance of the volume. These primers incorporate barcoded adapters for Illumina sequencing by synthesis. Optionally, identical replicate, triplicate, or quadruplicate reactions may be performed. Alternatively other universal bacterial primers or thermostable polymerases known to those skilled in the art are used to obtain different amplification and sequencing error rates as well as results on alternative sequencing technologies.

[0180] The PCR amplification is performed on commercially available thermocyclers such as a BioRad MyCycler™ Thermal Cycler (BioRad, Hercules, Calif.). The reactions are run at 94° C. for 3 minutes followed by 25 cycles of 94° C. for 45 seconds, 50° C. for 1 minute, and 72° C. for 1 minute 30 seconds, followed by a 10 minute extension at 72° C. and a indefinite hold at 4° C. Following PCR, gel electrophoresis of a portion of the reaction products is used to confirm successful amplification of a ˜1.5 kb product. PCR cleanup is performed as specified in the previous example.

[0181] Sanger Sequencing of Target Amplicons from Pure Homogeneous Samples

[0182] To detect nucleic acids for each sample, two sequencing reactions are performed to generate a forward and reverse sequencing read. For full-length 16s sequencing primers 27f and 1492r are used. 40 ng of ExoSap-IT-cleaned PCR products are mixed with 25 pmol of sequencing primer and Mo Bio Molecular Biology Grade Water (Mo Bio Laboratories, Carlsbad, Calif.) to 15 μl total volume. This reaction is submitted to a commercial sequencing organization such as Genewiz (South Plainfield, N.J.) for Sanger sequencing.

[0183] Amplication of 18S and ITS Regions for Downstream Sequencing

[0184] To amplify the 18S or ITS regions, 2 μL, fungal DNA were amplified in a final volume of 30 μL, with 15 μL, AmpliTaq Gold 360 Mastermix, PCR primers, and water. The forward and reverse primers for PCR of the ITS region are 5′-TCCTCCGCTTATTGATATGC-3′ and 5′-GGAAGTAAAAGTCGTAACAAGG-3′ and are added at 0.2 uM concentration each. The forward and reverse primers for the 18s region are 5′-GTAGTCATATGCTTGTCTC-3′ and 5′-CTTCCGTCAATTCCTTTAAG-3′ and are added at 0.4 uM concentration each. PCR is performed with the following protocol: 95 C for 10 min, 35 cycles of 95 C for 15 seconds, 52 C for 30 seconds, 72 C for 1.5s; and finally 72 C for 7 minutes followed by storage at 4 C. All forward primers contained the M13F-20 sequencing primer, and reverse primers included the M13R-27 sequencing primer. PCR products (3 μL) were enzymatically cleaned before cycle sequencing with 1 μL, ExoSap-IT and 1 μL, Tris EDTA and incubated at 37° C. for 20 min followed by 80° C. for 15 min. Cycle sequencing reactions contained 5 μL, cleaned PCR product, 2 μL, BigDye Terminator v3.1 Ready Reaction Mix, 1 μL, 5× Sequencing Buffer, 1.6 pmol of appropriate sequencing primers designed by one skilled in the art, and water in a final volume of 10 μL. The standard cycle sequencing protocol is 27 cycles of 10 s at 96° C., 5 s at 50° C., 4 min at 60° C., and hold at 4° C. Sequencing cleaning is performed with the BigDye XTerminator Purification Kit as recommended by the manufacturer for 10-μL volumes. The genetic sequence of the resulting 18S and ITS sequences is performed using methods familiar to one with ordinary skill in the art using either Sanger sequencing technology or next-generation sequencing technologies such as but not limited to Illumina.

[0185] Preparation of Extracted Nucleic Acids for Metagenomic Characterization by Massively Parallel Sequencing Technologies

[0186] Extracted nucleic acids (DNA or RNA) are purified and prepared by downstream sequencing using standard methods familiar to one with ordinary skill in the art and as described by the sequencing technology's manufactures instructions for library preparation. In short, RNA or DNA are purified using standard purification kits such as but not limited to Qiagen's RNeasy Kit or Promega's Genomic DNA purification kit. For RNA, the RNA is converted to cDNA prior to sequence library construction. Following purification of nucleic acids, RNA is converted to cDNA using reverse transcription technology such as but not limited to Nugen Ovation RNA-Seq System or Illumina Truseq as per the manufacturer's instructions. Extracted DNA or transcribed cDNA are sheared using physical (e.g. Hydroshear), acoustic (e.g. Covaris), or molecular (e.g. Nextera) technologies and then size selected as per the sequencing technologies manufacturer's recommendations. Following size selection, nucleic acids are prepared for sequencing as per the manufacturer's instructions for sample indexing and sequencing adapter ligation using methods familiar to one with ordinary skill in the art of genomic sequencing.

[0187] Massively Parallel Sequencing of Target Amplicons from Heterogeneous Samples

[0188] DNA Quantification & Library Construction

[0189] The cleaned PCR amplification products are quantified using the Quant-iT™ PicoGreen® dsDNA Assay Kit (Life Technologies, Grand Island, N.Y.) according to the manufacturer's instructions. Following quantification, the barcoded cleaned PCR products are combined such that each distinct PCR product is at an equimolar ratio to create a prepared Illumina library.

[0190] Nucleic Acid Detection

[0191] The prepared library is sequenced on Illumina HiSeq or MiSeq sequencers (Illumina, San Diego, Calif.) with cluster generation, template hybridization, isothermal amplification, linearization, blocking and denaturation and hybridization of the sequencing primers performed according to the manufacturer's instructions. 16SV4SeqFw (TATGGTAATTGTGTGCCAGCMGCCGCGGTAA), 16SV4SeqRev (AGTCAGTCAGCCGGACTACHVGGGTWTCTAAT), and 16SV4Index (ATTAGAWACCCBDGTAGTCCGGCTGACTGACT) (IDT, Coralville, Iowa) are used for sequencing. Other sequencing technologies can be used such as but not limited to 454, Pacific Biosciences, Helicos, Ion Torrent, and Nanopore using protocols that are standard to someone skilled in the art of genomic sequencing.

### Example 4

### Sequence Read Annotation

### Primary Read Annotation

[0192] Nucleic acid sequences are analyzed and annotated to define taxonomic assignments using sequence similarity and phylogenetic placement methods or a combination of the two strategies. A similar approach can be used to annotate protein names, protein function, transcription factor names, and any other classification schema for nucleic acid sequences. Sequence similarity based methods include those familiar to individuals skilled in the art including, but not limited to BLAST, BLASTx, tBLASTn, tBLASTx, RDP-classifier, DNAclust, and various implementations of these algorithms such as Qiime or Mothur. These methods rely on mapping a sequence read to a reference database and selecting the match with the best score and e-value. Common databases include, but are not limited to the Human Microbiome Project, NCBI non-redundant database, Greengenes, RDP, and Silva for taxonomic assignments. For functional assignments reads are mapped to various functional databases such as but not limited to COG, KEGG, BioCyc, and MetaCyc. Further functional annotations can be derived from 16S taxonomic annotations using programs such as PICRUST (M. Langille, et al 2013. Nature Biotechnology 31,814-821). Phylogenetic methods can be used in combination with sequence similarity methods to improve the calling accuracy of an annotation or taxonomic assignment. Here tree topologies and nodal structure are used to refine the resolution of the analysis. In this approach we analyze nucleic acid sequences using one of numerous sequence similarity approaches and leverage phylogenetic methods that are well known to those skilled in the art, including but not limited to maximum likelihood phylogenetic reconstruction (see e.g. Liu K, Linder C R, and Warnow T. 2011. RAxML and FastTree: Comparing Two Methods for Large-Scale Maximum Likelihood Phylogeny Estimation. PLoS ONE 6: e27731. McGuire G, Denham M C, and Balding D J. 2001. Models of sequence evolution for DNA sequences containing gaps. Mol. Biol. Evol 18: 481-490. Wrobel B. 2008. Statistical measures of uncertainty for branches in phylogenetic trees inferred from molecular sequences by using model-based methods. J. Appl. Genet. 49: 49-67.) Sequence reads (e.g. 16S, 18S, or ITS) are placed into a reference phylogeny comprised of appropriate reference sequences. Annotations are made based on the placement of the read in the phylogenetic tree. The certainty or significance of the OTU annotation is defined based on the OTU's sequence similarity to a reference nucleic acid sequence and the proximity of the OTU sequence relative to one or more reference sequences in the phylogeny. As an example, the specificity of a taxonomic assignment is defined with confidence at the the level of Family, Genus, Species, or Strain with the confidence determined based on the position of bootstrap supported branches in the reference phylogenetic tree relative to the placement of the OTU sequence being interrogated. Nucleic acid sequences can be assigned functional annotations using the methods described above.

[0193] Clade Assignments

[0194] The ability of 16S-V4 OTU identification to assign an OTU as a specific species depends in part on the resolving power of the 16S-V4 region of the 16S gene for a particular species or group of species. Both the density of available reference 16S sequences for different regions of the tree as well as the inherent variability in the 16S gene between different species will determine the definitiveness of a taxonomic annotation. Given the topological nature of a phylogenetic tree and the fact that tree represents hierarchical relationships of OTUs to one another based on their sequence similarity and an underlying evolutionary model, taxonomic annotations of a read can be rolled up to a higher level using a clade-based assignment procedure. Using this approach, clades are defined based on the topology of a phylogenetic tree that is constructed from full-length 16S sequences using maximum likelihood or other phylogenetic models familiar to individuals with ordinary skill in the art of phylogenetics. Clades are constructed to ensure that all OTUs in a given clade are: (i) within a specified number of bootstrap supported nodes from one another (generally, 1-5 bootstraps), and (ii) within a 5% genetic similarity. OTUs that are within the same clade can be distinguished as genetically and phylogenetically distinct from OTUs in a different clade based on 16S-V4 sequence data. OTUs falling within the same clade are evolutionarily closely related and may or may not be distinguishable from one another using 16S-V4 sequence data. The power of clade based analysis is that members of the same clade, due to their evolutionary relatedness, are likely to play similar functional roles in a microbial ecology such as that found in the human gut. Compositions substituting one species with another from the same clade are likely to have conserved ecological function and therefore are useful in the present invention. Notably in addition to 16S-V4 sequences, clade-based analysis can be used to analyze 18S, ITS, and other genetic sequences.

[0195] Notably, 16S sequences of isolates of a given OTU are phylogenetically placed within their respective clades, sometimes in conflict with the microbiological-based assignment of species and genus that may have preceded 16S-based assignment. Discrepancies between taxonomic assignment based on microbiological characteristics versus genetic sequencing are known to exist from the literature.

[0196] Metaenomic Read Annotation

[0197] Metagenomic or whole genome shotgun sequence data is annotated as described above, with the additional step that sequences are either clustered or assembled prior to annotation. Following sequence characterization as described above, sequence reads are demultiplexed using the indexing (i.e. barcodes). Following demultiplexing sequence reads are either: (i) clustered using a rapid clustering algorithm such as but not limited to UCLUST (http://drive5.com/usearch/manual/uclust_algo.html) or hash methods such VICUNA (Xiao Yang, Patrick Charlebois, Sante Gnerre, Matthew G Coole, Niall J. Lennon, Joshua Z. Levin, James Qu, Elizabeth M. Ryan, Michael C. Zody, and Matthew R. Henn (2012) De novo assembly of highly diverse viral populations. BMC Genomics 13:475). Following clustering a representative read for each cluster is identified based and analyzed as described above in “Primary Read Annotation”. The result of the primary annotation is then applied to all reads in a given cluster. (ii) A second strategy for metagenomic sequence analysis is genome assembly followed by annotation of genomic assemblies using a platform such as but not limited to MetAMOS (T J. Treangen et al. 2013 Geneome Biology 14:R2) and other methods familiar to one with ordinary skill in the art.

### Example 5

### qPCR Detection of a Microbial Contaminant in a Microbial Composition

[0198] qPCR primers are specifically designed to a the genome of a pathogen of interest and thus detect the pathogen in a microbial composition by presence of its nucleic acid after an appropriate preparation. Standard techniques are followed to generate a standard curve for the pathogen of interest from a known concentration of DNA from that pathogen for comparison. Genomic DNA is extracted from samples using commercially-available kits, such as the Mo Bio Powersoil®-htp 96 Well Soil DNA Isolation Kit (Mo Bio Laboratories, Carlsbad, Calif.), the Mo Bio Powersoil® DNA Isolation Kit (Mo Bio Laboratories, Carlsbad, Calif.), or the QIAamp DNA Stool Mini Kit (QIAGEN, Valencia, Calif.) according to the manufacturer's instructions. The qPCR is conducted using HotMasterMix (SPRIME, Gaithersburg, Md.) and primers specific for the pathogen of interest, and is conducted on a MicroAmp® Fast Optical 96-well Reaction Plate with Barcode (0.1 mL) (Life Technologies, Grand Island, N.Y.) and performed on a BioRad C1000™ Thermal Cycler equipped with a CFX96™ Real-Time System (BioRad, Hercules, Calif.), with fluorescent readings of the FAM and ROX channels. The Cq value for each well on the FAM channel is determined by the CFX Manager™ software version 2.1. The log 10 (cfu/ml) of each experimental sample is calculated by inputting a given sample's Cq value into linear regression model generated from the standard curve comparing the Cq values of the standard curve wells to the known log 10 (cfu/ml) of those samples. The skilled artisan may employ alternative qPCR modes. This technique is employed as an optional alternative detection technique with optional nucleic acid enrichment steps before qPCR or optional microbial enrichment steps before cell lysis.

### Example 6

### Germinating Spores

[0199] Microbial compositions comprising bacteria can include species that are in spore form and to culture and enrich these a germination procedure can increase the diversity and counts of bacteria cultivated for detection purposes. Germinating a spore fraction increases the number of viable bacteria that will grow on various media types. To germinate a population of spores, the sample is moved to the anaerobic chamber, resuspended in prereduced PBS, mixed and incubated for 1 hour at 37 C to allow for germination. Germinants can include amino-acids (e.g., alanine, glycine), sugars (e.g., fructose), nucleosides (e.g., inosine), bile salts (e.g., cholate and taurocholate), metal cations (e.g., Mg2+, Ca2+), fatty acids, and long-chain alkyl amines (e.g., dodecylamine, Germination of bacterial spores with alkyl primary amines” J. Bacteriology, 1961.). Mixtures of these or more complex natural mixtures, such as rumen fluid or Oxgall, can be used to induce germination. Oxgall is dehydrated bovine bile composed of fatty acids, bile acids, inorganic salts, sulfates, bile pigments, cholesterol, mucin, lecithin, glycuronic acids, porphyrins, and urea. The germination can also be performed in a growth medium like prereduced BHIS/oxgall germination medium, in which BHIS (Brain heart infusion powder (37 g/L), yeast extract (5 g/L), L-cysteine HCl (1 g/L)) provides peptides, amino acids, inorganic ions and sugars in the complex BHI and yeast extract mixtures and Oxgall provides additional bile acid germinants.

[0200] In addition, pressure may be used to germinate spores (Gould and Sale (1970) J. Gen. Microbiol. 60: 335). The selection of germinants can vary with the microbe being sought. Different species require different germinants and different isolates of the same species can require different germinants for optimal germination. Finally, it is important to dilute the mixture prior to plating because some germinants are inhibitory to growth of the vegetative-state microorganisms. For instance, it has been shown that alkyl amines must be neutralized with anionic lipophiles in order to promote optimal growth. Bile acids can also inhibit growth of some organisms despite promoting their germination, and must be diluted away prior to plating for viable cells.

[0201] For example, BHIS/oxgall solution is used as a germinant and contains 0.5×BHIS medium with 0.25% oxgall (dehydrated bovine bile) where 1×BHIS medium contains the following per L of solution: 6 g Brain Heart Infusion from solids, 7 g peptic digest of animal tissue, 14.5 g of pancreatic digest of casein, 5 g of yeast extract, 5 g sodium chloride, 2 g glucose, 2.5 g disodium phosphate, and 1 g cysteine. Additionally, Ca-DPA is a germinant and contains 40 mM CaCl2, and 40 mM dipicolinic acid (DPA). Rumen fluid (Bar Diamond, Inc.) is also a germinant. Simulated gastric fluid (Ricca Chemical) is a germinant and is 0.2% (w/v) Sodium Chloride in 0.7% (v/v) Hydrochloric Acid. Mucin medium is a germinant and prepared by adding the following items to 1 L of distilled sterile water: 0.4 g KH2PO4, 0.53 g Na2HPO4, 0.3 g NH4C1, 0.3 g NaCl, 0.1 g MgCl2×6H2O, 0.11 g CaCl2, 1 ml alkaline trace element solution, 1 ml acid trace element solution, 1 ml vitamin solution, 0.5 mg resazurin, 4 g NaHCO3, 0.25 g Na2S×9 H2O. The trace element and vitamin solutions prepared as described previously (Stams et al., 1993). All compounds were autoclaved, except the vitamins, which were filter-sterilized. The basal medium was supplemented with 0.7% (v/v) clarified, sterile rumen fluid and 0.25% (v/v) commercial hog gastric mucin (Type III; Sigma), purified by ethanol precipitation as described previously (Miller & Hoskins, 1981). This medium is referred herein as mucin medium.

[0202] Fetal Bovine Serum (Gibco) can be used as a germinant and contains 5% FBS heat inactivated, in Phosphate Buffered Saline (PBS, Fisher Scientific) containing 0.137M Sodium Chloride, 0.0027M Potassium Chloride, 0.0119M Phosphate Buffer. Thioglycollate is a germinant as described previously (Kamiya et al Journal of Medical Microbiology 1989) and contains 0.25M (pH10) sodium thioglycollate. Dodecylamine solution containing 1 mM dodecylamine in PBS is a germinant. A sugar solution can be used as a germinant and contains 0.2% fructose, 0.2% glucose, and 0.2% mannitol. Amino acid solution can also be used as a germinant and contains 5 mM alanine, 1 mM arginine, 1 mM histidine, 1 mM lysine, 1 mM proline, 1 mM asparagine, 1 mM aspartic acid, 1 mM phenylalanine A germinant mixture referred to herein as Germix 3 can be a germinant and contains 5 mM alanine, 1 mM arginine, 1 mM histidine, 1 mM lysine, 1 mM proline, 1 mM asparagine, 1 mM aspartic acid, 1 mM phenylalanine, 0.2% taurocholate, 0.2% fructose, 0.2% mannitol, 0.2% glucose, 1 mM inosine, 2.5 mM Ca-DPA, and 5 mM KCl. BHIS medium+DPA is a germinant mixture and contains BHIS medium and 2 mM Ca-DPA. Escherichia coli spent medium supernatant referred to herein as EcSN is a germinant and is prepared by growing E. coli MG1655 in SweetB/Fos inulin medium anaerobically for 48 hr, spinning down cells at 20,000 rcf for 20 minutes, collecting the supernatant and heating to 60 C for 40 min. Finally, the solution is filter sterilized and used as a germinant solution.

### Example 7

### Selection of Media for Growth

[0203] It is important to select appropriate media to support growth, including preferred carbon sources. For example, some organisms prefer complex sugars such as cellobiose over simple sugars. Examples of media used in the isolation of sporulating organisms include EYA, BHI, BHIS, and GAM (see below for complete names and references). Multiple dilutions were plated out to ensure that some plates had well isolated colonies on them for analysis, or alternatively plates with dense colonies were scraped and suspended in PBS to generate a mixed diverse community. Various medias will enrich for certain organisms and thus culturing itself is a method of selection and enrichment.

[0204] Plates were incubated anaerobically or aerobically at 37 C for 48-72 or more hours, targeting anaerobic or aerobic spore formers, respectively.

[0205] Solid plate media include Gifu Anaerobic Medium (GAM, Nissui) without dextrose supplemented with fructooligosaccharides/inulin (0.4%), mannitol (0.4%), inulin (0.4%), or fructose (0.4%), or a combination thereof, Sweet GAM [Gifu Anaerobic Medium (GAM, Nissui)] modified, supplemented with glucose, cellobiose, maltose, L-arabinose, fructose, fructooligosaccharides/inulin, mannitol and sodium lactate), Brucella Blood Agar (BBA, Atlas, Handbook of Microbiological Media, 4th ed, ASM Press, 2010), PEA sheep blood (Anaerobe Systems; 5% Sheep Blood Agar with Phenylethyl Alcohol),

[0206] Egg Yolk Agar (EYA) (Atlas, Handbook of Microbiological Media, 4th ed, ASM Press, 2010), Sulfite polymyxin milk agar (Mevissen-Verhage et al., J. Clin. Microbiol. 25:285-289 (1987)), Mucin agar (Derrien et al., IJSEM 54: 1469-1476 (2004)),

[0207] Polygalacturonate agar (Jensen & Canale-Parola, Appl. Environ. Microbiol. 52:880-997 (1986)),

[0208] M2GSC (Atlas, Handbook of Microbiological Media, 4th ed, ASM Press, 2010),

[0209] M2 agar (Atlas, Handbook of Microbiological Media, 4th ed, ASM Press, 2010), supplemented with starch (1%), mannitol (0.4%), lactate (1.5 g/L) or lactose (0.4%),

[0210] Sweet B—Brain Heart Infusion agar (Atlas, Handbook of Microbiological Media, 4th ed, ASM Press, 2010) supplemented with yeast extract (0.5%), hemin, cysteine (0.1%), maltose (0.1%), cellobiose (0.1%), soluble starch (sigma, 1%), MOPS (50 mM, pH 7),

[0211] PY-salicin (peptone-yeast extract agar supplemented with salicin) (Atlas, Handbook of Microbiological Media, 4th ed, ASM Press, 2010)., Modified Brain Heart Infusion (M-BHI) [[sweet and sour]] contains the following per L: 37.5 g Brain Heart Infusion powder (Remel), 5 g yeast extract, 2.2 g meat extract, 1.2 g liver extract, 1 g cystein HCl, 0.3 g sodium thioglycolate, 10 mg hemin, 2 g soluble starch, 2 g FOS/Inulin, 1 g cellobiose, 1 g L-arabinose, 1 g mannitol, 1 Na-lactate, 1 mL Tween 80, 0.6 g MgSO4×7H2O, 0.6 g CaCl2, 6 g (NH4)2SO4, 3 g KH2PO4, 0.5 g K2HPO4, 33 mM Acetic acid, 9 mM propionic acid, 1 mM Isobutyric acid, 1 mM isovaleric acid, 15 g agar, and after autoclaving add 50 mL of 8% NaHCO3 solution and 50 mL 1M MOPS-KOH (pH 7).

[0212] Noack-Blaut Eubacterium agar (See Noack et al. J. Nutr. (1998) 128:1385-1391),

[0213] BHIS azl/ge2-BHIS az/ge agar (Reeves et. al. Infect. Immun. 80:3786-3794 (2012)) [Brain Heart Infusion agar (Atlas, Handbook of Microbiological Media, 4th ed, ASM Press, 2010) supplemented with yeast extract 0.5%, cysteine 0.1%, 0.1% cellobiose, 0.1% inulin, 0.1% maltose, aztreonam 1 mg/L, gentamycin 2 mg/L],

[0214] BHIS CInM azl/ge2-BHIS CInM [Brain Heart Infusion agar (Atlas, Handbook of Microbiological Media, 4th ed, ASM Press, 2010) supplemented with yeast extract 0.5%, cysteine 0.1%, 0.1% cellobiose, 0.1% inulin, 0.1% maltose, aztreonam 1 mg/L, gentamycin 2 mg/L].

### Example 8

### Qualification of Fecal Donor as Healthy

[0215] To determine that a donor of fecal material is a healthy, normal individual, testing is performed to determine their general health and the state of the individuals microbiome. Briefly, the individual is questioned on risk factors for dsybiosis and exposure to pathogens ensuring no oral antibiotic use in the past 3 to 6 months, no recent bouts of diarrhea, no travel outside of the united states, canada, or to locations at risk for malaria exposure, and other questions contained on the AABB questionnaire as previously described (e.g. see http://www.aabb.org/resources/donation/questionnaires/Pages/dhqaabb.aspx). A medical history will be assessed with a focus on gastrointestinal history including a history of IBD, colitis, colorectal cancer, C. difficile infection, diarrhea. A rectal exam is also performed to assess colorectal health. Optionally, donors will also be assessed for drug use including smoking, alcohol use, and other common illicit drugs known to one skilled in the art. A fecal sample will be assessed for spore content using methods described herein (e.g. see examples 14 and 15). Additionally fecal based pathogens will be tested for using standard culture and moleculer tests that are commercially available and performed in clinical microbiological labs (e.g. see Versalovic et al 2011 Manual of Clinical Microbiology. American Society for Microbiology, 10th edition or http://www.questdiagnostics.com/testcenter/TestCenterHome.action). Tests performed on feces are obtained and are tested for infectious agents including but not limited to C. difficile, E. coli 0157, camplyobacter, yersinia, salmonella, shigella, cryptosporidium, cyclospora, isospora, rotavirus, norovirus, ova and parasite testing on a fecal smear with acid fast staining, giardia, vibrio cholera. Health donors may also be qualified by having regular bowel movements with stool appearance typically Type 2, 3, 4, 5 or 6 on the Bristol Stool Scale, and having a BMI ≧18 kg/m2 and <25 kg/m2. Blood may optionally be drawn and tested for the presence of infectious agents including but not limited to treponema pallidum, HAV, HBV, HCV, HIV 1/2 HTLV I/II, westnile virus by methods known to one skilled in the art (e.g. see http://www.questdiagnostics.com/testcenter/TestCenterHome.action and http://www.fda.gov/BiologicsBloodVaccines/BloodBloodProducts/ApprovedProducts/Licens edProductsBLAs/BloodDonorScreening/InfectiousDisease/ucm080466.htm). Finally normal blood biochemistry can also be assessed to demonstrate a donor is healthy by evaluating the biochemical and chemical blood metabolite markers including but not limited to complete blood count with platelets, sodium, potassium, chloride, albumin, total protein, glucos, blood urea nitrogen (BUN), creatinine, uric acid, aspartate aminotrasferase (AST), Alanine aminotransferase (ALT), gamma-glutamyltranspeptidase (GGT), creatine kinase (CK), alkaline phosphatase, total bilirubin, direct bilirubin, lactate dehrogenase, calcium, cholesterol, triglycerides by methods known to one skilled in the art and commercially available (e.g. see http://www.questdiagnostics.com/testcenter/TestCenterHome.action). A complete urinalysis can also be performed to assess health. Additionally one or more specific OTUs or Clades desired in the microbial composition can be detected by methods described herein using genetic e.g. PCR, qPCR, 16S, etc., biochemical e.g. serological testing with antibodies, enzymatic activity, etc., microbiological techniques e.g. culturing, etc. or a combination thereof described herein.

[0216] Other exclusion criteria generally included significant chronic or acute medical conditions including renal, hepatic, pulmonary, gastrointestinal, cardiovascular, genitourinary, endocrine, immunologic, metabolic, neurologic or hematological disease, a family history of, inflammatory bowel disease including Crohn's disease and ulcerative colitis, Irritable bowel syndrome, colon, stomach or other gastrointestinal malignancies, or gastrointestinal polyposis syndromes, or recent use of yogurt or commercial probiotic materials in which an organism(s) is a primary component.

### Example 9

### Purification and Isolation of a Spore Forming Fraction From Feces

[0217] To enrich a spore fraction or generate an ethanol treated fecal suspension from a greater microbial composition e.g. stool or other composition, for further testing the following non-limiting example presents a protocol for isolating a spore forming fraction from a microbial composition e.g. feces. To purify and selectively isolate efficacious spores from fecal material a stool donation was first blended with saline using a homogenization device (e.g., laboratory blender) to produce a 20% slurry (w/v). 100% ethanol was added for an inactivation treatment that lasts 10 seconds to 1 hour. The final alcohol concentration ranged from 30-90%, preferably 50-70%. High speed centrifugation (3200 rcf for 10 min) was performed to remove solvent and the pellet was retained and washed.

[0218] Once the washed pellet was resuspended, a low speed centrifugation step (200 rcf for 4 min) was performed to remove large particulate vegetative matter and the supernatant containing the spores was retained. Low-speed centrifugation selectively removes large particles, and therefore removes up to 7-61% of fibrous material, with a recovery of spores of between 50 and 85%. Alternatively, the resuspended pellet can be filtered through 600 um, 300 um, 200 um, 150 um, 100 um, 75 um, 60 um, 50 um, 20 um pore-size filters. This similarly selectively removes large particles, allowing spores to pass through the filters, removing 15-80% of solids while retaining 80-99% of spores, as measured by DPA.

[0219] High speed centrifugation (3200 rcf for 10 min) was performed on the supernatant to concentrate the spore material. The pellet was then washed and resuspended to generate a 20% slurry. This was the ethanol treated fecal suspension. The concentrated slurry was then separated with a density based gradient e.g. a CsCl gradient, sucrose gradient or combination of the two generating a ethanol treated, gradient-purified spore preparation. For example, a CsCl gradient was performed by loading a 20% volume of spore suspension on top a 80% volume of a stepwise CsCl gradient (w/v) containing the steps of 64%, 50%, 40% CsCl (w/v) and centrifuging for 20 min at 3200 rcf. The spore fraction was then run on a sucrose step gradient with steps of 67%, 50%, 40%, and 30% (w/v). When centrifuged in a swinging bucket rotor for 10 min at 3200 rcf. The spores ran roughly in the 30% and 40% sucrose fractions. The lower spore fraction was then removed and washed to produce a concentrated ethanol treated, gradient-purified spore preparation. Taking advantage of the refractive properties of spores observed by phase contrast microscopy (spores are bright and refractive while germinated spores and vegetative cells are dark) one could see an enrichment of the spore fraction from a fecal bacterial cell suspension compared to an ethanol treated, CsCl gradient purified, spore preparation, and to an ethanol treated, CsCl gradient purified, sucrose gradient purified, spore preparation.

[0220] Furthermore, growth of spores after treatment with a germinant was used to quantify a viable spore population. Samples were incubated with a germinant (Oxgall, 0.25% for up to 1 hour), diluted and plated anaerobically on BBA (Brucella Blood Agar) or similar media as described herein. Individual colonies were picked and DNA isolated for full-length 16S sequencing to identify the species composition. This microbial composition e.g. ethanol treated spore preparation or any preparation combination of steps described above served as test material for subsequent enrichment and detection of microbes of interest.

[0221] Fibrous material in a stool suspension can be quantified, most easily by taking dry weight measurements. A stool suspension was divided into two equal 3-5 mL samples. One was centrifuged at 3200 rcf for ten minutes, and the supernatant was retained. Three to five mL of the homogenous stool suspension was loaded onto a moisture analyzer and baked until the mass levels off, and the moisture analyzer automatically calculated the percent solids in the sample. The supernatant of the pelleted stool suspension was run as a control to measure dissolved solids. Quantifying undissolved solids was accomplished by subtracting dissolved solids from total solids. This gave an estimate of fibrous contaminants in a stool suspension, as the non-spore, non-bacterial solids make up the bulk of a stool suspension. Quantifying bacterial spores is most easily done by measuring the DPA contents of a sample, and comparing this DPA content to a sample of known spore content (see example above). Expressing DPA content per unit dry material in a suspension gives a measure of the purity of the spore suspension. Eliminating dry material that doesn't contain spores (i.e. fibre) will increase this metric.

### Example 10

### Enrichment and Purification of Bacteria

[0222] To purify individual bacterial strains for subsequent detection and identification, dilution plates are selected in which the density enables distinct separation of single colonies. Colonies are picked with a sterile implement (either a sterile loop or toothpick) and re-streaked to BBA or other solid media. Plates are incubated at 37° C. for 3-7 days. One or more well-isolated single colonies of the major morphology type are re-streaked. This process is repeated at least three times until a single, stable colony morphology is observed. The isolated microbe is then cultured anaerobically in liquid media for 24 hours or longer to obtain a pure culture of 106-1010 cfu/ml. Liquid growth medium might include Brain Heart Infusion-based medium (Atlas, Handbook of Microbiological Media, 4th ed, ASM Press, 2010) supplemented with yeast extract, hemin, cysteine, and carbohydrates (for example, maltose, cellobiose, soluble starch) or other media described previously (e.g. see example 7). The culture is centrifuged at 10,000×g for 5 min to pellet the bacteria, the spent culture media is removed, and the bacteria were resuspended in sterile PBS. Sterile 75% glycerol is added to a final concentration of 20%. An aliquot of glycerol stock is titered by serial dilution and plating. The remainder of the stock is frozen on dry ice for 10-15 min and then placed at −80 C for long term storage.

### Example 11

### Titer Determination

[0223] The number of viable cells per ml were determined on the freshly harvested, washed and concentrated culture by plating serial dilutions of the RCB to Brucella blood agar or other solid media, and varied from 106 to 1010 cfu/ml. The impact of freezing on viability was determined by titering the banks after one or two freeze-thaw cycles on dry ice or at −80° C., followed by thawing in an anaerobic chamber at room temperature. Some strains displayed a 1-3 log drop in viable cfu/ml after the 1st and/or 2nd freeze thaw, while the viability of others were unaffected.

### Example 12

### Treatment of Fecal Suspensions with Ethanol or Heat Reduces Vegetative Cell Numbers and Results in an Enrichment of Spore Forming Species

[0224] Treatment of a sample, preferably a human fecal sample, in a manner to inactivate or kill substantially all of the vegetative forms of bacteria present in the sample results in selection and enrichment of the spore fraction. Methods for inactivation can include heating, sonication, detergent lysis, enzymatic digestion (such as lysozyme and/or proteinase K), ethanol or acid treatment, exposure to solvents (Tetrahydrofuran, 1-butanol, 2-butanol, 1,2 propanediol, 1,3 propanediol, butanoate, propanoate, chloroform, dimethyl ether and a detergent like triton X-100, diethyl ether), or a combination of these methods. To demonstrate the efficacy of ethanol induced inactivation of vegetative cells, a 10% fecal suspension was mixed with absolute ethanol in a 1:1 ratio and vortexed to mix for 1 min. The suspension was incubated at room temperature for 30 min, 1 h, 4 h or 24 h. After incubation the suspension was centrifuged at 13,000 rpm for 5 min to pellet spores. The supernatant was discarded and the pellet was resuspended in equal volume of PBS. Viable cells were measured as described below.

[0225] To demonstrate the efficacy of heat treatment on vegetative cell inactivation a 10-20% fecal suspension was incubated at 70 C, 80 C, 90 C or 100 C for 10 min or 1 h.

[0226] After ethanol or heat treatment, remaining viable cells were measured after 24 h incubation on plates by determining the bacterial titer on Brucella blood agar (BBA) as a function of treatment and time (See FIG. 15). Ethanol treatment for 1 h and 25 h have similar effects, reducing the number of viable cells by approximately 4 logs, while increasing temperature and time at high temperature leads to higher losses in viable cell number, with no colonies detectable at 100° C. at either 10 min or 1 h. No germinants were used. After several days of additional growth on plates, a number of colonies were picked from these treated samples and identified by 16S rDNA analysis (e.g. see Examples 3 and 4). These included known spore forming Clostridium spp. as well as species not previously reported to be spore formers including Ruminococcus bromii, and Anaerotruncus colihominis (Lawson, et al 2004), and a Eubacterium sp. (Table 16). See FIG. 15: Heat and ethanol treatments reduce cell viability

[0227] To demonstrate that vegetative cells are reduced by ethanol treatment, known non-spore forming bacteria were ethanol treated as described previously (e.g. see Example 9) and viability was determined by plating on BBA in anaerobic conditions (e.g. see Example 7). Fecal material from four independent donors was exposed to 60 C for 5 min and subsequently plated on three types of selective media under either aerobic (+O2) or anaerobic conditions (—O2) (BBA+aerobic, MacConkey lactose+aerobic, Bacteroides Bile esculin+anaerobic) to identify known nonsporeforming Enterobacteria (survivors on MacConkey agar) and Bacteroides fragilis group species (survivors on Bacteroides Bile Esculin plates). The detectable limit for these assays was roughly 20 cfu/mL. Germinants were not used in this experiment (FIG. 16). Both ethanol and heat inactivation reduces the cell viability from fecal material to the limit of detection under using MacConkey lactose agar and BBE agar. The remaining cells identified on BBA media grown in anaerobic conditions comprise the non-germinant dependent spore forming species. See FIG. 16: Reduction in non-spore forming vegetative cells by treatment at 60° C. for 5 min

[0228] The ethanol treatment was shown to rapidly kill both aerobic and non-spore forming anaerobic colony forming units in 10% fecal suspensions as determined by plating on rich (BBA) media. The reduction of plated CFUs decreases four orders of magnitude in seconds as shown in FIG. 17.

[0229] See FIG. 17: Time course demonstrates ethanol reduces both anaerobic and aerobic bacterial CFUs

### Example 13

### Species Identified and Isolated as Spore Formers by Ethanol Treatment

[0230] To demonstrate that spore-forming species were enriched by heat or ethanol treatment methods, a comparison of >7000 colony isolates was performed to identify species in a repeatable fashion (e.g., identified independently in multiple preparations, see examples 1, 3, and 4) only isolated from fecal suspensions treated with 50% ethanol or heat treatment and not from untreated fecal suspensions (Table 17). These data demonstrate the ability to select for spore forming species from fecal material, and identify organisms as spore formers not previously described as such in the literature. In each case, organisms were picked as an isolated colony, grown anaerobically, and then subjected to full-length 16S sequencing in order to assign species identity.

[0231] To further identify spore formers, ethanol treated fecal samples from donors A, B, C, D, E and F were plated to a variety of solid media types, single colonies were picked and grown up in broth in a 96 well format (Tables 18-23). The 16S rRNA gene was then amplified by PCR and direct cycle sequencing was performed (See examples 3 and 4). The ID is based on the forward read from direct cycle sequencing of the 16S rRNA gene.

[0232] There is surprising heterogeneity in the microbiome from one individual to another (Clemente et al., 2012) and this has consequences for determining the potential efficacy of various donors to generate useful spore compositions. The method described below is useful for screening donors when, for instance, a particular quantity or diversity of spore forming organisms is useful or desired for repopulating the microbiome following antibiotic treatment or treating a particular disease or condition. Further, such screening is useful when there is a need to screen donors for the purpose of isolating microorganisms capable of spore formation, or when a purified preparation of spore forming organisms is desired from a particular donor.

[0233] Total spore count is also a measure of potency of a particular donation or purified spore preparation and is vital to determine the quantity of material required to achieve a desired dose level. To understand the variability in total spore counts, donor samples were collected and processed as described in prior examples. Donor spore counts in CFU/g were then determined by growth on media plates at various titrations to determine the spore content of the donation. Furthermore, DPA assays were used to assess spore content (expressed as spore equivalents) as described in Example 14. As seen in FIG. 18, there is as much as two logs difference in an individual donor over time and can be up to three logs difference between donors. The difference in spore content measures is that nonviable spores and non-germinable spores will not be observed by plating but will have measurable DPA content. The variability between species of DPA content in spores making some complex mixtures containing high DPA spores while other mixtures contain low DPA content spores. Selecting donors with high spore counts is important in determining productivity of isolating spores from fecal donations by identifying preferred donors.

[0234] A fresh fecal sample from donor F was treated as described in Example 15 to generate an ethanol treated spore fraction, germinated with BHIS/Oxgall for 1 h as a described (e.g. see Example 6), then plated to a variety of media (e.g. See example 7). Colonies were picked with a focus on picking several of each type of morphologically distinct colony on each plate to capture as much diversity as possible. Colonies were counted on a plate of each media type with well isolated colonies such that the number of colony forming units per ml can be calculated (Table 24). Colonies were picked into one of several liquid media and the 16S rDNA sequences (e.g. see Examples 3 and 4) were determined and analyzed as described above. The number of unique OTUs for each media type is shown below with the media with the most unique OTUs at the top (Table 24). Combinations of 3 to 5 of the top 5 media types capture diversity, and some other can be chosen to target specific species of interest. Colony forming units were calculated for a given species using the 16S data, and were used to determine whether a sufficient level of a given organism is present. The spore complement from Donor F includes these 52 species as determined by 16S sequencing (Table 24).

[0235] To screen human donors for the presence of a diversity of spore forming bacteria and/or for specific spore-forming bacteria, fecal samples were prepared using germinants and selective plating conditions and colonies were picked (e.g. see Examples 6 and 7) and analyzed for 16S diversity as described previously (see Examples 3 and 4). An assessment of donor diversity included the cfu/ml of ethanol resistant cells on a given media type, or cfu/ml of a given species using the 16S analysis of colonies picked from that media to determine the level of spores of a given species of interest. This culture-based analysis was complemented by culture-independent methods such as qPCR with probes specific to species or genera of interest or metagenomic sequencing of spore preparations, or 16S profiling of spore preparations using Illumina 16S variable region sequencing approaches (e.g. see Examples 3 and 4).

### Example 14

### Quantification of Spore Concentrations in a Microbial Composition Using DPA Assay

[0236] Methods to assess spore concentration in microbial compositions typically require the separation and selection of spores and subsequent growth of individual species to determine the colony forming units. The art does not teach how to quantitatively germinate all the spores in such a microbial composition as there are many species for which appropriate germinants have not been identified. Furthermore, sporulation is thought to be a stochastic process as a result of evolutionary selection, meaning that not all spores from a single species germinate with same response to germinant concentration, time and other environmental conditions. Alternatively, a key metabolite of bacterial spores, dipicolinic acid (DPA) has been developed to quantify spores particles in a sample and avoid interference from fecal contaminants. This method can also be used to determine the presence of spores in other products including but not limited to liquid cultures, liquid beverages, resuspended powders and other products not designed to contain spore forming microbes. Thus, the DPA assay described provides a sensitive way of detecting contaminating spores in a complex product in addition to the utility described herein. The assay utilizes the fact that DPA chelates Terbium 3+ to form a luminescent complex (Fichtel et al, FEMS Microbiology Ecology, 2007; Kort et al, Applied and Environmental Microbiology, 2005; Shafaat and Ponce, Applied and Environmental Microbiology, 2006; Yang and Ponce, International Journal of Food Microbiology, 2009; Hindle and Hall, Analyst, 1999). A time-resolved fluorescence assay detects terbium luminescence in the presence of DPA giving a quantitative measurement of DPA concentration in a solution.

[0237] The assay was performed by taking 1 mL of the spore standard to be measured and transferring it to a 2 mL microcentrifuge tube. The samples were centrifuged at 13000 RCF for 10 min and the samples were washed in 1 mL sterile deionized H2O. The samples were washed an additional time by repeating the centrifugation. The 1 mL solutions were transferred to hungate tubes and samples were autoclaved on a steam cycle for 30 min at 250 C. 100 uL of 30 uM TbCl3 solution (400 mM sodium acetate, pH 5.0, 30 μM TbCl3) was added to each sample. Serial dilutions of the autoclaved material were made and the fluorescence of each sample was measured by exciting with 275 nm light and measuring the emission wavelength of 543 nm for an integration time of 1.25 ms and a 0.1 ms delay.

[0238] Purified spores were produced as described previously (e.g. see http://www.epa.gov/pesticides/methods/MB-28-00.pdf). Serial dilutions of purified spores from C. bifermentans, C. sporogenes, and C. butyricum cultures were prepared and measured by plating on BBA media and incubating overnight at 37 C to determine CFU/ml. FIG. 3 shows the linear correspondence across different spore producing bacteria across several logs demonstrating the DPA assay as means to assess spore content.

[0239] FIG. 3 shows the linear range of DPA assay compared to CFU counts/ml. Purified spores of C. bifermentans, C. sporogenes, and C. butyricum were titered by assessing spore CFU through a germination procedure and by the DPA assay and compared.

[0240] The discrepancy for complex spore populations between spore counts measured by germinable spore CFU and by DPA has important implications for determining the potency of an ethanol treated spore preparation for clinical use. Table 2 shows spore content data from 3 different ethanol treated spore preparations used to successfully treat 3 patients suffering from recurrent C. difficile infection. The spore content of each spore preparation is characterized using the two described methods.

[0241] Table 2 shows spore content data from 3 different ethanol treated spore preparations used to successfully treat 3 patients suffering from recurrent C. difficile infection. The spore content of each spore preparation is characterized using the two described methods.

[0242] Spore content varies per 30 capsules. As measured by germinable SCFU, spore content varies by greater than 10,000-fold. As measured by DPA, spore content varies by greater than 100-fold. In the absence of the DPA assay, it would be difficult to set a minimum dose for administration to a patient. For instance, without data from the DPA assay, one would conclude that a minimum effective dose of spores is 4×105 or less using the SCFU assay (e.g. Preparation 1, Table 2). If that SCFU dose was used to normalize dosing in a clinical setting, however, then the actual spore doses given to patients would be much lower for other ethanol treated spore preparations as measured as by the DPA assay (Table 3).

[0243] Table 3 shows the DPA doses in Table 2 normalized to 4×105 sCFU per dose.

[0244] It becomes clear from the variability of SCFU and DPA counts across various donations that using SCFU as the measure of potency would lead to significant underdosing or overdosing in certain cases. For instance, setting a dose specification of 4×105 SCFU (the apparent effective dose from donor Preparation 1) for product Preparation 3 would lead to a potential underdosing of more than 100-fold. This can be rectified only by setting potency specifications based on the DPA assay, which better reflects total spore counts in an ethanol treated spore preparation. The unexpected finding of this work is that the DPA assay is uniquely suited to set potency and determine dosing for an ethanol treated spore preparation and potentially other microbial compositions.

[0245] Because DPA is a constituent only of bacterial spores and not of vegetative cells, detection of DPA using terbium chloride can be used to determine if a composition or sample contains contaminating bacterial spores. Once free DPA was washed from the sample and the sample was heated to release DPA from any spores present, it was shown that a given sample that has a DPA content that is above the limit of detection (LOD) is an indication that bacterial spores are present. FIG. 4 shows a dilution series of a pure sample of DPA and indicates that the LOD for DPA is approximately 0.5 nM. FIG. 5 shows a dilution series of a purified, sporulated strain Clostridium bifermentans and indicates a LOD for bacterial spores ofapproximately 1*10⁴ spores/mL.

### Example 15

### Demonstration of Enhanced Growth with a Germinant

[0246] To enhance the detection of spore forming microbes in a microbial composition, adding a germination step to the culturing increases the enrichment of this method. As a non-limiting example, a microbial composition of ethanol treated spores is enriched by various germination strategies. To demonstrate the ethanol treated spore germination capability and spore viability, spores from three different donors were germinated by various treatments and plated on various media. Germination with BHIS/oxgall (BHIS ox), Ca-DPA, rumen fluid (RF), simulated gastric fluid (SGF), mucin medium (Muc), fetal bovine serum (FBS), or thioglycollate (Thi) for 1 hour at 37 C in anaerobic conditions was performed as described previously (e.g. see Examples 6 and 7) with samples derived from two independent donors (FIG. 6). The spore-germinant mixture was serially diluted and plated on different plate media including BBA, Sweet B, Sweet B+lysozyme (tug/ml), M2GSC and M2GSC+lysozyme (tug/ml) as previously described (e.g. see Examples 6 and 7) to determine spore germination. Colony forming units were tallied and titers were determined using standard techniques by one skilled in the art. As FIG. 6 shows, maximum colony forming units were derived from BHI-oxgall treatment. This germination treatment also increases the diversity as measured by the number of OTUs identified when samples were submitted for 16S sequencing (e.g. see Examples 3 and 4) compared to plating without a germination step (FIG. 7).

[0247] FIG. 6 depicts different germinant treatments having variable effects on CFU counts from donor A (top) and donor B (bottom). The Y-Axes are spore CFU per ml.

[0248] FIG. 7 depicts germinates increase the diversity of cultured spore forming OTUs observed by plating.

[0249] To test the effect of heat activation to promote germination, ethanol treated fecal samples were treated for 15 min at room temperature, 55 C, 65 C, 75 C or 85 C from three different donors and germinated subsequently with BHIS+Oxgall for 1 hr at 37 C then plated on BBA media (FIG. 8) as previously described (e.g. see Examples 6 and 7). Pretreatment at room temperature produced equal if not more spores than the elevated temperatures in all three donors. The temperature of germinating was also examined by incubating samples at room temperature or 37 C for 1 hr in anaerobic conditions before plating on BBA. No difference in the number of CFUs was observed between the two conditions. Lysozyme addition to the plates (2 ug/ml) was also tested on a single donor sample by the testing of various activation temperature followed by an incubation in the presence or absence of lysozyme. The addition of lysozyme had a small effect when plated on Sweet B or M2GSC media but less so than treatment with BHIS oxgall without lysozyme for 1 hr (FIG. 9).

[0250] FIG. 8 depicts heat activation as a germination treatment with BHIS+oxgall.

[0251] See FIG. 9 depicts the effect of lysozyme and shows a lysozyme treatment enhances germination in a subset of conditions.

[0252] Germination time was also tested by treating a 10% suspension of a single donor ethanol treated feces (e.g. see Example 9) incubated in either BHIS, taurocholate, oxgall, or germix for 0, 15, 30, or 60 minutes and subsequently plated on BHIS, EYA, or BBA media (e.g. see Examples 6 and 7). 60 minutes resulted in the most CFU units across all various combinations germinates and plate media tested.

### Example 16

### Demonstrating Efficacy of Terminable and Sporulatable Fractions of Ethanol Treated Spores

[0253] To define methods for characterization and purification, and to improve (e.g., such as by modulating the diversity of the compositions) the active spore forming ecology derived from fecal donations, the ethanol treated spore population (as described in Example 9) was further fractionated. A “germinable fraction” was derived by treating the ethanol-treated spore preparation with oxgall, plating to various solid media, and then, after 2 days or 7 days of growth, scraping all the bacterial growth from the plates into 5 mL of PBS per plate to generate a bacterial suspension. A “sporulatable fraction” was derived as above except that the cells were allowed to grow on solid media for 2 days or 7 days (the time was extended to allow sporulation, as is typical in sporulation protocols), and the resulting bacterial suspension was treated with 50% ethanol to derive a population of “sporulatable” spores, or species that were capable of forming spores. In preparing these fractions, fecal material from donor A was used to generate an ethanol treated spore preparation as previously described herein; then spore content was determined by DPA assay and CFU/ml grown on various media (FIG. 19) as previously described (see Example 14 and 15). See FIG. 19: Spores initially present in ethanol treated spore preparation as measured by DPA and CFU/ml grown on specified media.

[0254] To characterize the fraction that is sporulatable, the 2 day and 7 day “germinable” fractions were assessed for CFU and DPA content before and after ethanol treatment to generate a spore fraction. Bacterial suspensions were treated with ethanol, germinated with Oxgall, and plated on the same types of media that the “germinable” fraction was grown on. DPA data showed that growth on plates for 2 and 7 days produced the same amount of total spores. Colonies on the several types of media were picked for 16S sequence analysis to identify the spore forming bacteria present (Table 7).

[0255] A 2 day “germinable” fraction and a 7 day “sporulatable” fraction were used as a treatment in the mouse prophylaxis assay as follows. As a control, a 10% fecal suspension prepared from a donor (Donor B) was also administered to mice to model fecal microbiota transplant (FMT) (e.g. see example 17). Weight loss and mortality of the various test and control arms of the study are plotted in Figure S17 and summarized in Table 8 which also contains the dosing information. Clinical score is based on a combined phenotypic assessment of the mouse's health on a scale of 0-4 in several areas including appearance (0-2 pts based on normal, hunched, piloerection, or lethargic), and clinical signs (0-2 points based on normal, wet tail, cold-to-the-touch, or isolation from other animals). The data show both the “germinable” and “sporulatable” fractions are efficacious in providing protection against C. difficile challenge in a prophylaxis mouse model (e.g. see Example 17). The efficacy of these fractions further demonstrates that the species present are responsible for the efficacy of the spore fraction, as the fractionation further dilutes any potential contaminant from the original spore preparation.

[0256] See FIG. S16: Titer of “germinable” fraction after 2 days (left) and Sporulatable fraction (right) by DPA and CFU/ml. The “sporulatable” fraction made following 7 days of growth was measured as previously described using germination and growth assays or DPA content as previously described (see Example 14).

[0257] The species present in the “germinable” and “sporulatable” fractions were determined by full length 16S sequencing of colony picks and by 16S NGS sequencing of the fractions themselves. The colony pick data indicate Clostridium species are very abundant in both fractions, while the NGS data reveal other spore forming organisms that are typically found in ethanol treated spore preparations are present.

[0258] Results are shown in the following: See Table 7. Species identified as “germinable” and “sporulatable” by colony picking approach. See Table 5. Species identified as “germinable” using 16S-V4 NGS approach. See Table 6. Species identified as “sporulatable” using 16s-V4 NGS approach. See Figure S17: Mouse prophylaxis model demonstrates “germinable” and “sporulatable” preparations are protective against C. difficile challenge. Each plot tracks the change in the individual mouse's weight relative to day −1 over the course of the experiment. The number of deaths over the course of the experiment is indicated at the top of the chart and demonstrated by a line termination prior to day 6. The top panels (from left to right) are the vehicle control arm, the fecal suspension arm, and the untreated naive control arm, while the bottom panels are the ethanol treated, gradient purified spore preparation; the ethanol treated, gradient purified, “germinable” preparation, and ethanol treated, gradient purified, “sporulatable” preparation. See Table 8: Results of the prophylaxis mouse model and dosing information

### Example 17

### Bacterial Compositions Prevent C. difficile Infection in a Mouse Model

[0259] To test the therapeutic potential of the bacterial compositions a prophylactic mouse model of C. difficile infection (model based on Chen, et al., A mouse model of Clostridium difficile associated disease, Gastroenterology 135(6):1984-1992) was used. Two cages of five mice each were tested for each arm of the experiment. All mice received an antibiotic cocktail consisting of 10% glucose, kanamycin (0.5 mg/ml), gentamicin (0.044 mg/ml), colistin (1062.5 U/ml), metronidazole (0.269 mg/ml), ciprofloxacin (0.156 mg/ml), ampicillin (0.1 mg/ml) and Vancomycin (0.056 mg/ml) in their drinking water on days −14 through −5 and a dose of 10 mg/kg Clindamycin by oral gavage on day −3. On day −1, they received either the test article or vehicle control via oral gavage. On day 0 they were challenged by administration of approximately 4.5 log 10 cfu of C. difficile (ATCC 43255) via oral gavage. Optionally a positive control group received vancomycin from day −1 through day 3 in addition to the antibiotic protocol and C. difficile challenge specified above. Feces were collected from the cages for analysis of bacterial carriage, mortality was assessed every day from day 0 to day 6 and the weight and subsequent weight change of the animal was assessed with weight loss being associated with C. difficile infection. Mortality and reduced weight loss of the test article compared to the vehicle were used to assess the success of the test article. Additionally, a C. difficile symptom scoring was performed each day from day −1 through day 6. Clinical Score was based on a 0-4 scale by combining scores for Appearance (0-2 pts based on normal, hunched, piloerection, or lethargic), and Clinical Signs (0-2 points based on normal, wet tail, cold-to-the-touch, or isolation from other animals).

[0260] In a naive control arm, animals were challenged with C. difficile. In the vancomycin positive control arm animals were dosed with C. difficile and treated with vancomycin from day −1 through day 3. The negative control was gavaged with PBS alone and no bacteria. The test arms of the experiment tested 1×, 0.1×, 0.01× dilutions derived from a single donor preparation of ethanol treated spores (e.g. see example 6) or the heat treated feces prepared by treating a 20% slurry for 30 min at 80 C. Dosing for CFU counts was determined from the final ethanol treated spores and dilutions of total spores were administered at 1×, 0.1×, 0.01× of the spore mixture for the ethanol treated fraction and a 1× dose for the heat treated fraction.

[0261] Weight loss and mortality were assessed on day 3. The negative control, treated with C. difficile only, exhibits 20% mortality and weight loss on Day 3, while the positive control of 10% human fecal suspension displays no mortality or weight loss on Day 3 (Table 15). EtOH-treated feces prevents mortality and weight loss at three dilutions, while the heat-treated fraction was protective at the only dose tested. These data indicate that the spore fraction is efficacious in preventing C. difficile infection in the mouse.

### Example 18

### Assay for Environmental Contaminants During Processing of Microbial Compositions

[0262] The presence of contaminating organisms from the processing environment can be assessed following the guidelines of USP <62>, Microbial examination of nonsterile products: Tests for specified organisms, and USP <61>, Microbial examination of nonsterile products: Microbial Enumeration Tests, although these guidelines are directed towards products that do not include viable organisms. Detecting contaminants in a complex background of product species means that USP <61> and <62> cannot be directly applied. Potential environmental contaminants of regulatory interest that might be introduced during the manufacture of microbial compositions include, without limitation, the following organisms: Bile-Tolerant Gram negative organisms, Escherichia coli, Salmonella, Pseudomonas aeruginosa, Staphylococcus aureus, and Candida albicans. In other settings (i.e. non-spore comprising complex microbial mixtures), clostridia are a class of organisms of interest as well. As known to one skilled in the art, there is no such entity as a perfect medium, so species other than those targeted by the selective conditions may be encountered that can grow on a given medium; the nature of the specimens and the physiologic state of the organisms can influence recovery of desired species, as well as modify the effects of inhibitory characteristics of this medium.

[0263] For Bile-Tolerant Gram negative organisms, their presence can be determined in two modes. The first mode is a “test for absence” in which the sensitivity for detection is enhanced via an enrichment growth step that allows small numbers of organisms to expand into a larger detectable population. The second mode is a “quantitative test” in which organisms in the product are directly cultured and their levels can be quantitatively determined. To “Test for Absence” of Bile-Tolerant Gram negative organisms, 1 g of the test material was inoculated into Soybean-casein broth and incubated at 20-25° C. for at least two hours to resuscitate the bacteria (but less than 5 h, to avoid bacterial growth), after which it was it was either used to inoculate the enrichment broth Enterobacteria Enrichment Broth Mossel and incubated at 30-35° C. for 24-48 h, and then plated to Violet Red Bile agar and incubated at 30-35° C. for 18-24 h to detect colonies. The absence of colonies indicates the absence of Bile-Tolerant Gram negative organisms in the product. In a “Quantitative Test” for Bile-Tolerant Gram negative organisms, 1 g of the test material (ethanol treated suspension or final product material) was inoculated into Soybean-casein broth and incubated at 20-25° C. for at least two hours to resuscitate the bacteria (but less than 5 h, to avoid bacterial growth) after which it is diluted into Enterobacteria Enrichment Broth Mossel to the equivalent of 0.1 g, 0.01 g and 0.001 g of material (or 0.1 mL, 0.01 mL and 0.001 mL) and incubated at 30-35 C for 24-48 h, after which 100 ul is plated to Violet Red Bile Glucose Agar, and incubated at 30-35 C for 18-24 h. Growth of colonies for any of the 3 dilutions plated indicates the presence of a presumptive contaminant. A table from USP <62> was then used to determine a probable number of Bacteria per g or mL or product as below (Table 4 from USP <62>). Colonies may be picked and their identities are determined by either 16S rDNA sequencing or by microbiological analysis

[0264] The above methods for Bile-Tolerant Gram negative organisms were performed with different broths and selective agars to detect Salmonella (broth, Rappaport Vassiliadis Salmonalla Enrichment Broth; selective agar, Xylose Lysine Deoxycholate Agar), Pseudomonas (broth, Soybean-Casein Digest Broth; selective agar, Cetrimide Agar), and Staphylococcus aureus (broth, Soybean-Casein Digest Broth; selective agar, Mannitol Salt Agar). Colonies that appear on these media are picked and their identities are determined by either 16S rDNA sequencing or by microbiological analysis.

### Example 19

### Residual Assay for Bile-Tolerant Gram Negative Aerobic Organisms

[0265] As a non-limiting example of a microbial composition, an ethanol treated fecal suspension is used to test the bile acid tolerance of gram negative aerobic organisms. An ethanol treated fecal suspension was assayed for the presence of residual bile-tolerant Gram-negative species by plating to Violet Red Bile Glucose Agar aerobically, which is recommended for the detection and enumeration of Enterobacteriaceae (including in USP <62>, Microbial examination of nonsterile products: Tests for specified organisms, and USP <61>, Microbial examination of nonsterile products: Microbial Enumeration Tests). Organisms that grow on this selective medium include Escherichia spp, Salmonella spp, Pseudomonas spp, while Gram positive organisms such as Streptococcus and Enterococcus spp do not. Bile salts and crystal violet inhibit gram-positive bacteria, and neutral red is a pH indicator that allows glucose fermenters to produce red colonies with red-purple halos of precipitated bile. Aerobic incubation prevents the growth of bile-tolerant anaerobes. A 20% suspension of feces treated with 50% Ethanol for 1 hr was assayed by creating 10 fold serial dilutions and plating (100 uL) to Violet Red Bile Glucose Agar (BD #218661). A pre-ethanol treatment sample was plated in parallel. Plates are incubated aerobically at 37° C. for 48 hr, at which time colonies are counted to determine cfu/g pre and post-ethanol treatment. Inactivation of presumptive bile-tolerant Gram-negative aerobes is indicated by reduced cfu/ml. Colonies from the ethanol treated sample are considered presumptive bile-tolerant Gram-negative aerobe, but as known to one skilled in the art, there is no such entity as a perfect medium, so species other than those targeted by the selective conditions may be encountered that can grow on a given medium; the nature of the specimens and the physiologic state of the organisms can influence recovery of desired species, as well as modify the effects of inhibitory characteristics of this medium. Colonies are picked and their identities are determined by either 16S rDNA sequencing or by microbiological analysis.

### Example 20

### Residual Assay for the Presence of the Gram Negative Organism Pseudomonas aeruginosa

[0266] As a non-limiting example of a microbial composition, an ethanol treated fecal suspension is used. An ethanol treated fecal suspension was assayed for the presence of residual bile-tolerant Gram-negative species by plating to Cetrimide Agar aerobically, which is recommended for the detection and enumeration of Pseudomonas aeruginosa (including in USP <62>, Microbial examination of nonsterile products: Tests for specified organisms, and USP <61>, Microbial examination of nonsterile products: Microbial Enumeration Tests). Cetrimide is a quaternary ammonium compound with bactericidal activity against a broad range of Gram-positive organisms and some Gram-negative organisms. Aerobic incubation prevents the growth of anaerobes. Presumptive Pseudomonas colonies are yellow-green or yellow brown in colour and fluoresce under UV light. A 20% suspension of feces treated with 50% Ethanol for 1 hr was assayed by creating 10-fold serial dilutions and plating (100 uL) to Cetrimide Agar (BD #285420). A pre-ethanol treatment sample was plated in parallel. Plates are incubated aerobically at 37° C. for 48 hr, at which time colonies are counted to determine cfu/g pre and post-ethanol treatment. Inactivation of presumptive Pseudomonas is indicated by reduced cfu/ml. As known to one skilled in the art, there is no such entity as a perfect medium, so species other than those targeted by the selective conditions may be encountered that can grow on a given medium; the nature of the specimens and the physiologic state of the organisms can influence recovery of desired species, as well as modify the effects of inhibitory characteristics of this medium. Presumptive Pseudomonas colonies are picked and their identities are determined by either 16S rDNA sequencing or by microbiological analysis.

### Example 21

### Residual Assay for the Presence of the Gram Positive Staphylococci

[0267] As a non-limiting example of a microbial composition, an ethanol treated fecal suspension is used. An ethanol treated fecal suspension was assayed for the presence of residual Gram positive Staphylococcus species by plating to Mannitol Salt Agar aerobically, which is recommended for the detection and enumeration of Staphylococcus species including Staphylococcus aureus and Staphylococcus epidermidis (including in USP <62>, Microbial examination of nonsterile products: Tests for specified organisms, and USP <61>, Microbial examination of nonsterile products: Microbial Enumeration Tests). Mannitol Salt Agar is a nutritive medium due to its content of peptones and beef extract, which supply essential growth factors, such as nitrogen, carbon, sulfur and trace nutrients. The 7.5% concentration of sodium chloride results in the partial or complete inhibition of bacterial organisms other than staphylococci. Mannitol fermentation, as indicated by a change in the phenol red indicator, aids in the differentiation of staphylococcal species. Presumptive Staphylococcus aureus and Staphylococcus epidermidis colonies have yellow zones and red/purple zones, respectively. A 20% suspension of feces treated with 50% Ethanol for 1 hr was assayed by creating 10 fold serial dilutions and plating (100 uL) to Mannitol Salt Agar (BD #221173). A pre-ethanol treatment sample was plated in parallel. Plates are incubated aerobically at 37° C. for 48 hr, at which time colonies are counted to determine cfu/g pre and post ethanol treatment. Inactivation of presumptive Staphylococci is indicated by reduced cfu/ml. As known to one skilled in the art, there is no such entity as a perfect medium, so species other than those targeted by the selective conditions may be encountered that can grow on a given medium; the nature of the specimens and the physiologic state of the organisms can influence recovery of desired species, as well as modify the effects of inhibitory characteristics of this medium. Presumptive Staphylococci colonies are picked and their identities are determined by either 16S rDNA sequencing or by microbiological analysis.

### Example 22

### Residual Assay for the Presence of Fungi Including Candida spp

[0268] As a non-limiting example of a microbial composition, an ethanol treated fecal suspension is used. An ethanol treated fecal suspension was assayed for the presence of residual Candida spp by plating to Sabouraud Dextrose Agar which is used for the enumeration of pathogenic and nonpathogenic fungi, particularly dermatophytes (including in USP <62>, Microbial examination of nonsterile products: Tests for specified organisms, and USP <61>, Microbial examination of nonsterile products: Microbial Enumeration Tests). The high glucose concentration in Sabouraud Dextrose Agar provides an advantage for the growth of the (osmotically stable) fungi while most bacteria do not tolerate the high sugar concentration. In addition, the low pH is optimal for fungi, but not for many bacteria. Other medium used in isolation of fungi include Potato Dextrose agar, Czapeck dox agar (Sigma-Aldrich) supplemented with chloramphenicol (0.05 g/l) and gentamycin (0.1 g/l), Dixon agar supplemented with chloramphenicol (0.05 mg/mL) and cycloheximide (0.2 mg/mL). Candida spp that may be isolated from human feces include Candida albicans, Candida tropicalis, Candida krusei, Candida glabrata, and Candida guilleirmondii. A 15% suspension of feces treated with 50% Ethanol for 1 hr was assayed by creating 10-fold serial dilutions and plating (100 uL) to Sabouraud Dextrose Agar (BD #211584). A pre-ethanol treatment sample was plated in parallel. Plates are incubated aerobically at 20-25° C. for up 5 days, at which time colonies are counted to determine cfu/g pre and post ethanol treatment. Inactivation of presumptive fungi Candida is indicated by reduced cfu/ml. As known to one skilled in the art, there is no such entity as a perfect medium, so species other than those targeted by the selective conditions may be encountered that can grow on a given medium; the nature of the specimens and the physiologic state of the organisms can influence recovery of desired species, as well as modify the effects of inhibitory characteristics of this medium. Presumptive fungal colonies are picked and their identities are determined by either 18S rDNA or internal transcribed spacer region (ITS) sequencing or by microbiological analysis.

### Example 23

### Residual Assay for the Presence of the Gram Negative Organisms Escherichia, Salmonella Spp, Shigella Spp, Enterobacter Spp, Klebsiella spp and Pseudomonas spp

[0269] As a non-limiting example of a microbial composition, an ethanol treated fecal suspension is used. An ethanol treated fecal suspension was assayed for the presence of residual Gram-negative species including Escherichia, Salmonella, Shigella, Enterobacter, Klebsiella and Pseudomonas by plating to Xylose-Lysine-Desoxycholate (XLD) Agar aerobically, which is the agar recommended for the detection and enumeration of Salmonella spp (including in USP <62>, Microbial examination of nonsterile products: Tests for specified organisms, and USP <61>, Microbial examination of nonsterile products: Microbial Enumeration Tests), and allows the growth of other Gram negative species as well. XLD Agar is both a selective and differential medium. It contains yeast extract as a source of nutrients and vitamins. It utilizes sodium desoxycholate as the selective agent and, therefore, is inhibitory to gram-positive microorganisms. Xylose is incorporated into the medium since it is fermented by practically all enterics except for the shigellae and this property enables the differentiation of Shigella species. Lysine is included to enable the Salmonella group to be differentiated from the non pathogens since without lysine, salmonellae rapidly would ferment the xylose and be indistinguishable from nonpathogenic species. After the salmonellae exhaust the supply of xylose, the lysine is attacked via the enzyme lysine decarboxylase, with reversion to an alkaline pH which mimics the Shigella reaction. To prevent similar reversion by lysine decarboxylase-positive coliforms, lactose and sucrose are added to produce acid in excess. To add to the differentiating ability of the formulation, an H2S indicator system, consisting of sodium thiosulfate and ferric ammonium citrate, is included for the visualization of the hydrogen sulfide produced, resulting in the formation of colonies with black centers. The non pathogenic H2S-producers do not decarboxylate lysine; therefore, the acid reaction produced by them prevents the blackening of the colonies which takes place only at neutral or alkaline pH. Aerobic incubation prevents the growth of anaerobes. Differential colony morphologies are as follows: E. coli, large, yellow, flat; Enterobacter/Klebsiella, mucoid, yellow; Proteus, Red to yellow. Most strains have black centers; Salmonella, H2S-positive, Red-yellow with black centers, Red-yellow with black centers, Red; Pseudomonas, Red.

[0270] A 20% suspension of feces treated with 50% Ethanol for 1 hr was assayed by creating 10 fold serial dilutions and plating (100 uL) to XLD Agar (BD #254055). A pre-ethanol treatment sample was plated in parallel. Plates were incubated aerobically at 37° C. for 48 hr, at which time colonies were counted to determine cfu/g pre and post ethanol treatment. Inactivation of presumptive Gram negative spp was indicated by reduced cfu/ml. As known to one skilled in the art, there is no such entity as a perfect medium, so species other than those targeted by the selective conditions may be encountered that can grow on a given medium; the nature of the specimens and the physiologic state of the organisms can influence recovery of desired species, as well as modify the effects of inhibitory characteristics of this medium. Presumptive colonies of different species were picked based on their morphologies and their identities are determined by either 16S rDNA sequencing or by microbiological analysis.

### Example 24

### Detection of Undesired Gram-Negative Organisms Via LPS

[0271] Gram-negative organisms contain lipopolysaccharide (LPS) in their outer membranes. LPS is expressed on the cell surface and is also referred to as endotoxin, as it elicits a variety of inflammatory responses, and is toxic to animals, causing fever and disease when in the bloodstream. LPS can be used as the basis of an assay to detect the presence of undesired Gram-negative organisms in a mixed bacterial community that consists of only Gram positive organisms.

[0272] Endotoxin can be detected via a limulous amoebocyte lysate test (LAL test). This assay is based in the biology of the horseshoe crab (Limulous), which produces LAL enzymes in blood cells (amoebocytes) to bind and inactivate endotoxin from invading bacteria. A gel clot based assay is performed as follows: equal volumes of LAL reagents are mixed with undiluted or diluted test article and observed for clot formation. The dilutions are selected to cover the potential range of endotoxin in the sample and to reduce interference by the test material making the gel clot LAL test semi-quantitative. The sensitivity of this assay is 0.06 EU/ml. The USP chromogenic method of the LAL test is based on the activation of a serine protease (coagulase) by the endotoxin, which is the rate-limiting step of the clotting cascade. The assay measures the activation of the serine protease as opposed to the end result of this activation, which is clotting. The natural substrate, coagulogen, is replaced by a chromogenic substrate. On cleavage of this substrate a chromophore is released from the chromogenic peptide and is measured by spectrophotometry. The USP chromogenic method is quantitative and can provide a greater sensitivity over a wider range. The sensitivity of this assay is 0.10 EU/ml. This assay could be performed on the mixed community in its product form, or to increase sensitivity, it could be performed after a sample of the product has been grown in enrichment culture to expand the population of any contaminant Gram negative organism that might be present.

### Example 25

### Detection of Undesired Gram-Positive Organisms

[0273] The cell walls of Gram positive organisms consist of peptidoglycan and teichoic acids. Teichoic acids are polymers with glycerol or ribitol joined together through phosphodiester linkages. Many of these polymers have glucosyl or D-alanyl residues and are located exclusively in the walls, capsules or membranes of gram-positive bacteria. The teichoic acids may be divided into two groups by their cellular localization—the membrane teichoic acids or lipoteichoic acids linked covalently to lipids, and the wall teichoic acids linked covalently to the peptidoglycan. Wall teichoic acids may be composed of glycerol phosphate, ribitol phosphate and sugar-1-phosphate residues. Most of the ribitol containing teichoic acids also contain D-alanine residues.

[0274] As teichoic acids are a discriminating feature of Gram-positive cells, and are not found in Gram negative organisms they can thus be used as an indicator of the presence of undesired Gram positive organisms in a mixed bacterial community that consists of only Gram negative organisms, such as a community solely comprising Gram negative commensal Bacteroides spp.

[0275] Teichoic acids can be detected in the supernatant of a mixed bacterial community using an antiteichoic acid ELISA. Antiteichoic antibodies may also be used to detect Gram positive organisms via flow cytometry (e.g. see, Jung et al J Immunology, 2012).

[0276] Anti-teichoic acid antibodies with varying specificities may be used to detect different Gram positive organisms, including environmental contaminants such as Staphylococcus epidermidis or Bacillus spp.

### Example 26

### Rapid Detection of Spore Forming Organisms

[0277] Degenerate qPCR primers for the spo0A gene (primers described in Bueche et al, AEM, 2013), which encodes the master regulator of sporulation in spore forming organisms, may be used to detect the presence of sporeforming organisms in a mixed community, or to determine whether an organism which forms a colony in a microbiological colony forming unit QC assay is a spore former or not.

### Example 27

### Rapid Determination of Gram Positive or Gram Negative Status of Individual Cultures or Mixed Communities

[0278] Gram negative and gram positive cells respond differentially to treatment with detergent under alkaline conditions, with Gram negative organisms typically displaying rapid lysis, while Gram positives are more resistant. This is well known, and alkaline lysis of gram negatives is standard in DNA preparations, as is the need for additional treatments to achieve efficient lysis and DNA recovery from Gram positives. Differential lysis can be used to determine whether a community of only Gram negative organisms contains an undesired Gram positive component, or to determine whether a colony in a microbiological colony forming units assay is Gram positive or negative. In one version of this assay, the mixed community culture or a single colony derived from said community is resuspended in 1 mL of buffer and analyzed on an automated urine particle analyzer UF-1000i (Sysmex Corporation). The UF-1000i has a dedicated analytical flow channel named “BACT channel”, which employs specialized reagents and algorithm for bacteria detection and counting. These aspects of UF-1000i realize precise counting of bacteria in urine specimen or other samples in a short time (Wada et al PLoS One 2012). This is a rapid assay in which a 5 minute treatment with alkaline SDS followed by flow cytometry yields cell counts indicating lysis of Gram negative cells relative to untreated control samples, or resistance to lysis indicating the presence of Gram positive cells. For colony identification, this could be combined with subsequent microbiological identification strategies targeted at either Gram positives or Gram negatives.

### Example 28

### Residual Assay for Gram-Positive Aerobic Organisms (Enterococcus spp)

[0279] As a specific non-limiting example, a microbial composition e.g. an ethanol treated fecal suspension can be assayed for the presence of residual Enterococcus species by plating to selective media. Two 20% suspensions of feces (Sample1 and Sample2) were treated with 50% ethanol for 1 hr and assayed by creating 10 fold serial dilutions and plated (100 uL) to Enterococcosel Agar (BD #212205). A pre-ethanol treatment sample was also plated in parallel. Similar media selective for Enterococcus species such as m-Enterococcus Agar (BD #274610) can also be used. Enterococcosel Agar is suitable for the growth of Enterococcus faecalis and Enterococcus faecium and other Enterococcus spp. The selective and differential properties of this media are as follows. Enterococci hydrolyze the glycoside, esculin, to esculetin and dextrose. Esculetin reacts with an iron salt, ferric ammonium citrate, to form a dark brown or black complex. Oxgall is used to inhibit gram-positive bacteria other than enterococci. Sodium azide is inhibitory for gram-negative microorganisms. Other organisms that may grow on these plates include Listeria monocytogenes, Streptococcus bovis Group, pediococci and staphylococci. Plates were incubated aerobically at 37° C. for 48 hr. After incubation colonies were counted and used to back calculate the concentration of residual viable cells of Enterococcus. Any colonies with a black or brown precipitate are considered presumptive Enterococcus species until confirmed by identification by 16S rDNA amplification and sequencing. No colonies were detected on the ethanol treated Enterococcosel plates (limit of detection 10 CFU/mL). Selective media does not always counter select all other species that might be present in the sample being plated. Any colonies that grow need to be identified by amplification and sequencing of the 16S rDNA gene. For Sample1, colonies were counted on plates from the pre-ethanol 20% suspension and used to back-calculate a concentration of 4.75 Log CFU/mL of presumptive Enterococcus (3.75 Log reduction in titer to limit of detection) (Table 11). Four presumptive Enterococcus colonies from the pre-ethanol 20% suspension were picked for 16S rDNA amplification and sequencing and identified as Streptococcous bovis and Streptococcus pasteurianus (Table 9). For Sample2, colonies were counted on plates from the pre-ethanol 20% suspension and used to back-calculate a concentration of 5.14 Log CFU/mL of presumptive Enterococcus (4.14 Log reduction in titer to limit of detection) (Table 12). Four presumptive Enterococcus colonies from the pre-ethanol 20% suspension were picked for 16S rDNA amplification and sequencing and identified as Enterococcus faecium (Table 10).

### Example 29

### Residual Assay for Gram-Positive Aerobic Organisms (Streptococcus spp Assay)

[0280] As a specific non-limiting example, a microbial composition e.g. an ethanol treated fecal suspension can be assayed for the presence of residual Streptococcus species by plating to selective media. A 20% suspension of feces treated with 50% ethanol for 1 hr was assayed by creating 10 fold serial dilutions and plated to Mitis Salivarius Agar (BD #229810). Enzymatic Digest of Casein and Enzymatic Digest of Animal Tissue provide carbon, nitrogen, and amino acids used for general growth requirements in Mitis Salivarius Agar. Sucrose and Dextrose are carbohydrate sources. Dipotassium Phosphate is the buffering agent. Trypan Blue is absorbed by the colonies, producing a blue color. Crystal Violet and Potassium Tellurite inhibit most Gram-negative bacilli and Gram-positive bacteria except streptococci. Agar is the solidifying agent. A pre-ethanol treatment sample was also plated in parallel. Plates were incubated aerobically at 37° C. for 48 hr. After incubation colonies were counted and used to back calculate the concentration of residual viable cells of Streptococcus. Based on colony counts for Sample1 from the appropriate dilution plate a concentration of presumptive Streptococcus was determined to be 4.92 Log CFU/mL for the pre-ethanol sample and 1 Log CFU/mL for the ethanol treated sample (3.92 Log reduction in titer) (Table 11). Based on colony counts for Sample2 from the appropriate dilution plate a concentration of presumptive Streptococcus was determined to be 5.25 Log CFU/mL for the pre-ethanol sample and 1.90 Log CFU/mL for the ethanol treated sample (3.34 Log reduction in titer) (Table 12). Any colonies which appear are considered presumptive Streptococcus species until confirmed by identification by 16S rDNA amplification and sequencing. Colonies were picked from pre-ethanol plates and from ethanol treated and identified by 16S rDNA amplification and sequencing for each sample (Tables 9 and 10). Selective media does not always counter select all other species that might be present in the sample being plated. Any colonies that grow need to be identified by amplification and sequencing of the 16S rDNA gene.

### Example 30

### Residual Assay for Gram-Positive Anaerobic Organisms (Bifidobacterium spp Assay)

[0281] As a specific non-limiting example, a microbial composition e.g. an ethanol treated fecal suspension can be assayed for the presence of residual Bifidobacterium species by plating to selective media. A 20% suspension of feces treated with 50% ethanol for 1 hr was assayed by creating 10 fold serial dilutions and plated to Bifidobacterium Selective Agar (BIFIDO) (Anaerobe Systems #AS-6423) and Raffinose-Bifidobacterium Agar (Hartemink, et. al., Journal of Microbiological Methods, 1996). Bifidobacterium Selective Agar (BIFIDO) is a selective medium for the isolation and enumeration of Bifidobacterium species. BIFIDO contains Reinforced Clostridial Agar as the basal medium and Polymixin, Kanamycin, and Nalidixic acid as selective agents. The differential compounds of iodoacetate and 2, 3, 5-triphenyltetrazolium chloride are also added. Raffinose-Bifidobacterium Agar medium owes its selectivity to the presence of propionate (15 g/L) and lithium chloride (3 g/L) as inhibitory agents, and raffinose (7.5 g/L) as a selective carbon source. In addition, casein (5 g/L) is used as a protein source, which results in a zone of precipitation around the colonies of bifidobacteria. Plates were incubated anaerobically at 37° C. for 48 hr. After incubation colonies were counted and used to back calculate the concentration of residual viable cells of Bifidobacterium. Any colonies which appear are considered presumptive Bifidobacterium species until confirmed by identification by 16S rDNA amplification and sequencing. Colonies appearing on ethanol treated 20% fecal suspension were identified by 16S rDNA amplification and sequencing (Tables 9 and 10). Selective media does not always counter select all other species that might be present in the sample being plated. Any colonies that grow need to be identified by amplification and sequencing of the 16S rDNA gene.

### Example 31

### Residual Assay for Determining the Limit of Detection of Gram-Positive Anaerobic Organisms in Ethanol Treated Feces (Enterococcus Assay)

[0282] A spiking experiment was performed to determine the limit of detection of a representative Enterococcus isolate (Enterococcus durans) added to a microbial composition e.g. ethanol treated 20% fecal suspension. A 20% suspension of feces was treated with ethanol for 1 hr, split into multiple aliquots and then spiked with 0.77, 1.77, 2.77, 3.77 and 4.77 Log CFU/mL of Enterococcus durans. Each sample was serially diluted and 100 uL of each dilution was plated to Enterococcosel Agar and then incubated aerobically for 48 hr. Based on colony counts a limit of detection of 58 CFU/mL was determined for the assay in current format. The limit of detection could be reduced by plating additional volume of sample to multiple plates and checking for colonies. The concentration of spiked E. durans was plotted against the value calculated for colony counts on selective media (FIG. 10). Selective media does not always prevent growth of all other species that might be present in the sample being plated. Any colonies that grow need to be identified by amplification and sequencing of the 16S rDNA gene.

### Example 32

### Selective Enrichment Through Addition of a Live Bacterial Culture

[0283] The selective enrichment of a bacterial species or clade can be achieved by first pre-treating a bacterial mixture with a pure culture of a particular bacterial or fungal species before plating to general or selective agar plates. The bacterial suspension is mixed with a pure culture of a species which can produce an antibiotic, bacteriocin, short chain fatty acid, vitamin, acidic end product, sugar or other compounds which alter the media in a way to enrich for the bacterial species of interest. The sample is then plated to a general nutrient or selective media and incubated at 37 C for 1-5 days to grow colonies. Plates are incubated either aerobically or anaerobically depending on the growth requirements of the species being selected (See Tables 9-12 and FIG. 10.

[0284] Table 9 depicts the 16S rDNA identification of colony picks from plating a 20% fecal suspension (Sample1) or from plating a ethanol treated suspension to selective media (number of colony picks matching each species in parentheses).

[0285] Table 10 depicts the 16S rDNA identification of colony picks from plating a 20% fecal suspension (Sample2) or from plating a ethanol treated suspension to selective media (number of colony picks matching each species in parentheses).

[0286] Table 11 depicts the estimated concentration of a 20% fecal suspension and the ethanol treated spore composition Colonies were counted from plating a 20% feces suspension (Sample1) or ethanol treated suspension to selective media and used to back-calculate the concentration of presumptive cells in each sample (Log CFU/mL).

[0287] Table 12 depicts the estimated concentration of a 20% fecal suspension and the ethanol treated spore composition Colonies were counted from plating a 20% feces suspension (Sample2) or ethanol treated suspension to selective media and used to back-calculate the concentration of presumptive cells in each sample (Log CFU/mL).

[0288] FIG. 10 depicts the correlation between concentration of E. durans spiked into 20% ethanol treated feces and concentration calculated from colony counts on selective media (Enterococcosel Agar).

### Example 33

### Screening of Ethanol-Treated Fecal Samples for the Presence of Ethanol-Sensitive Gram-Negative Aerobic and Anaerobic Bacteria

[0289] As a specific non-limiting example, a microbial composition e.g. spore fraction derived from fecal material as previously described was used. Briefly, the suspensions of fecal material were treated with 200-proof ethanol at a 50% v/v concentration for 1 hour. To characterize killing of vegetative cells via ethanol treatment, after multiple steps of washing to remove residual ethanol, samples were collected for plating on Bacteroides Bile Esculin (BBE) agar and MacConkey II lactose agar. BBE agar is selective for the B. fragilis group of Gram-negative bacteria. MacConkey agar is selective for Enterobacteriaceae and a variety of other Gram negative bacteria. 100 uL of sample were plated on each plate type and spread with a sterile spreader. The BBE agar plates were incubated anaerobically at 37° C. for 48 hours. The MacConkey plates were incubated aerobically at 37° C. for 48 hours. After 48 hours, plates were inspected for the presence of colonies. The results are shown in this table:

[0290] Table 13 depicts the results of plating an ethanol treated fecal suspension on BBE and MacConkey II lactose agar showing no residual colonies observed. The limit of detection of this method is ten colonies per ml of sample.

[0291] Table 14 depicts the results from Sabouraud Dextrose agar plating of fecal suspensions before and after treatment with 50% Ethanol.

[0292] 15% suspension samples from 4 different donors were treated with 50% ethanol for 1 hour. Samples were serial diluted in 1×PBS and spot plated on Sabouraud Dextrose Agar both before and after ethanol treatment. Ethanol was washed out of each sample by centrifuging the sample at 13000 rpm, removing the supernatant fluid, and resuspending the pellet in fresh 1×PBS. Plates were incubated at 30° C. aerobically for 48 hours before analyzing colony counts. Colonies were counted to determine the reduction in cfu/mL due to treatment with ethanol.

[0293] The sensitivity of this method can be increased by plating additional volume of sample for enumeration. Alternatively, an enrichment step can be added in which the sample is inoculated into growth medium and incubated for 24-48 h, followed by plating to BBE or MacConkey lactose agar. Detection of any colony forming units would indicate the presence of organisms.

### Example 34

### Enrichment of a Spore Fraction by Chromatographic Separation from a Microbial Compositions

[0294] A microbial composition sample is pelleted by centrifugation at 15,000×g for 15 minutes at 4° C. and is resuspended phosphate buffered saline supplemented with NaCl to a final concentration of 4M total salt and contacted with octyl Sepharose 4 Fast Flow to bind the hydrophobic spore fraction. The resin is washed with 4M NaCl to remove less hydrophobic components, and the spores are eluted with distilled water, and the desired enriched spore fraction is collected via UV absorbance. Bacterial identification in the spore fraction can then proceed by the genomic and microbiological methods described herein.

### Example 35

### Spore Purification by Chromatographic Separation of Fecal Material

[0295] A spore-enriched population such as obtained from Examples 1-5 above, is mixed with NaCl to a final concentration of 4M total salt and contacted with octyl Sepharose 4 Fast Flow to bind the hydrophobic spore fraction. The resin is washed with 4M NaCl to remove less hydrophobic components, and the spores are eluted with distilled water, and the desired enriched spore fraction is collected via UV absorbance.

### Example 36

### Spore Purification by Filtration of Fecal Material

[0296] To reduce residual habitat products from a microbial composition filtration protocol is used. As a specific non-limiting example the ethanol treated fecal suspension is used as the microbial composition. The ethanol treated fecal suspension (e.g. see example 9) above is diluted 1:10 with PBS, and placed in the reservoir vessel of a tangential flow microfiltration system. A 0.2 um pore size mixed cellulose ester hydrophilic tangential flow filter is connected to the reservoir such as by a tubing loop. The diluted spore preparation is recirculated through the loop by pumping, and the pressure gradient across the walls of the microfilter forces the supernatant liquid through the filter pores. By appropriate selection of the filter pore size the desired bacterial spores are retained, while smaller contaminants such as cellular debris, and other contaminants in feces such as bacteriophage pass through the filter. Fresh PBS buffer is added to the reservoir periodically to enhance the washout of the contaminants. At the end of the diafiltration, the spores are concentrated approximately ten-fold to the original concentration. The purified spores are collected from the reservoir and stored as provided herein.

### Example 37

### Enrichment of Microbes by Affinity Chromatography

[0297] Microbes including but not limited to bacteria, fungus, virus, and phage contain immunogenic proteins, lipids, and other chemical moieties on their surfaces that can be used to specifically identify and serve as means to purify these components from a composition. With an appropriate affinity reagent including e.g. antibody, receptor, etc, specific microbes are selectively enriched from a microbial mixture as previously described (Accoceberry et al One Step Purification of Enterocytozoon bieneusi Spores from Human Stools by immunoaffinity expanded bed adsorption (EBA). J. of Clinical Microbiology, 39(5). 2001). As a specific, non-limiting example of the method, Enterocytozoon bieneusi spores can be enriched by from a microbial composition e.g. stool. Briefly a 1 kg scale, and a ‘stomacher’ BagMixer (Interscience, cat #023 230) is placed in the hood to allow all work to be done within containment. A 125 g stool sample is transferred to a filter bag. 475 mL of suspension solution (0.9% saline, 18.75% glycerol) is added to the bag. The bag is clamped in place in an Interscience BagMixer for 30 seconds to produce a slurry. The microbial sample is then removed from the filtered side of the bag for further enrichment. The microbial sample is centrifuged at 500×g for 6 min to eliminate large particles, and the sieved spores in the supernatant are pelleted by centrifugation at 2,500×g for 20 min. The pellet was resuspended in PBS (⅓ [vol/vol]) to produce a 25% slurry. Penicillin (5 IU/ml) and streptomycin (100 mg/ml) are added to the final slurry. For a microbial composition one can simply resuspend the the material in buffer to generate an appropriate suspension for further enrichment.

[0298] Production of Monoclonal Antibodies (MAbs) to a Microbial Contaminant or Pathogen

[0299] Two species-specific MAbs of pathogen specific surface marker e.g. E. bieneusi spore walls are produced as described previously (e.g. see Harlow and Lane, Antibodies: a laboratory Manual, 1988 or Accoceberry, I., M. Thellier, I. Desportes-Livage, A. Achbarou, S. Biligui, M. Danis, and A. Datry. 1999. Production of monoclonal antibodies directed against the microsporidium Enterocytozoon bieneusi. J. Clin. Microbiol. 37: 4107-4112). Briefly, 6E52D9, isotyped as IgG2a, is directed against the exospore, and 3B82H2, isotyped as IgM, is directed against the endospore. The MAbs are purified from hybridoma culture supernatants by affinity protein A chromatography for the 6E52D9 MAb and with Dynabead M-450 rat anti-mouse IgM (Dynal, Compiegne, France), according to the manufacturer's instructions, for the 3B82H2 MAb. The purified supernatants are stored at −20° C. until their use. The 6E52D9 IgG2a can be used as ligand in the immunoaffinity process. A total of 2×106 cells from the hybridoma line are injected via the intraperitoneal route into pristane-primed female BALB/c mice (Charles River Laboratories, Saint-Aubain-les-Elbeuf, France) to produce ascitic fluid that is collected 10 to 15 days later. The ascitic fluids generated are incubated 1 h at 37° C. and overnight at 4° C. and then centrifuged at 3,000×g for 10 min. The supernatants are collected and screened by an immunofluorescence antibody test (see below) using purified E. bieneusi spores or the antigen to which the antibodies are raised against, as previously described (e.g. see Harlow and Lane, Antibodies: a laboratory Manual, 1988 or Accoceberry, I., M. Thellier, I. Desportes-Livage, A. Achbarou, S. Biligui, M. Danis, and A. Datry. 1999. Production of monoclonal antibodies directed against the microsporidium Enterocytozoon bieneusi. J. Clin. Microbiol. 37: 4107-4112). Ascitic fluids yielding high titers are pooled, precipitated by adding an equal volume of saturated ammonium sulfate, and incubated at 4° C. for 4 h. The purified mouse immunoglobulin is recovered by centrifugation at 10,000×g at 4° C. for 20 min. The pellet is dissolved in a small volume of 0.05 M Tris-HCl (pH 9) and injected into a desalting Sephadex G-25 column (Amersham Pharmacia Biotech, Saclay, France) equilibrated with 1 M NaCl-0.05 M Tris-HCl (pH 9) to remove the residual ammonium sulfate and condition the MAb in the binding buffer. Alternatively, if recombinant antigen is used to generate the antibody, an affinity matrix of the antigen can be used to purify antibodies from the supernatant of the hybridomas. Immunoglobulin content can be determined by absorbance at 280 nm using a UV spectrophotometer or by Bradford assay.

[0300] Immunofluorescence Antibody Test

[0301] Briefly, the antigen is applied to 18-well slides (2 ml per 5-mm well) and incubated sequentially with purified supernatants, diluted at 1:64 in 0.1% bovine serum albumin in PBS, and fluorescein isothiocyanate-labeled goat antimouse IgG-IgM-IgA (1:200 dilution; Sigma Laboratories). Slides are washed, mounted with buffered glycerol mounting fluid, and examined with epifluorescence microscope using standard techniques. Alternatively a western blot or ELISA assay is used to determine the antibody production of a hybridoma supernatant using the antigen e.g. recombinant protein from the surface of the pathogen, purified protein from surface of the pathogen, whole pathogen (ELISA only).

[0302] Chromatographic System and EBA Method

[0303] The chromatographies are performed with fast-protein liquid chromatography and Biopilot workstations (Amersham Pharmacia Biotech). The Streamline rProtein A matrix (Amersham Pharmacia Biotech) is used for EBA of immunoglobulins. rProtein A is a recombinant protein. The base matrix is a 4% agarose derivative with an inert metal alloy core that provides the density required to use the adsorbent in expanded-bed mode. These porous beads have a size distribution of 80 to 165 mm and a particle density of 1.3 g/ml. The matrix is poured into a Streamline 25 column (Amersham Pharmacia Biotech). This is a glass column with an inner diameter of 25 mm, with a specially designed liquid distributor at the base of the column and a top mobile adapter. The bed is expanded by upward liquid flow. Adsorbent particles are suspended in equilibrium due to the balance between particle sedimentation velocity and upward flow. The sample is applied to the expanded bed with an upward flow. Target molecules and cells are captured on the adsorbent while cell debris, cells, particulates, and contaminants pass through unhindered. Flow is then reversed. The adsorbent particles settle quickly and target molecules are desorbed by an elution buffer, as in conventional packed-bed chromatography. The column is prepared by flowing the purified antibody specific to the microbe to be purified and enriched e.g. an antibody specific to Enterocytozoons bieneusi and allowing it to bind to the rProtein A matrix. It is then crosslinked and quenched. The column is then washed with PBS buffer to remove excess antibody and cross linker as previously described (Reeves, H. C., R. Heeren, and P. Malloy. 1981. Enzyme purification using antibody crosslinked to protein A agarose: application to Escherichia coli NADP-isocitrate dehydrogenase. Anal. Biochem. 115:194-196)

[0304] Purifying Bacterial Spores from a Microbial Suspension

[0305] A microbial suspension (75 ml) is injected into the prepared column and incubated with the gel at room temperature overnight. The gel is then expanded and washed, to remove all large particles and unbound spores, at an upward flow velocity of 32 ml/min, until the UV baseline is reached. PBS buffer (pH 7.2) is used during expansion and washing. The workstation pump is then turned off to allow the bed to settle. The column adapter was moved down toward the sedimented bed surface. After a wash with PBS, the run is performed at a downward flow rate of 15 ml/min. The elution buffer is run at the same flow rate. Several potential elution buffers are tested to determine the proper conditions empirically. The conditions that can be tested include the following: glycine at 50 mM (pH 2.49), ethylene glycol at 25%, 4 M guanidine HCl, and 6 M guanidine HCl. The elution fractions are then collected into 50-ml Falcon centrifuge tubes, sedimented at 2,500×g for 20 min, and washed four times by centrifugation in PBS to remove residual elution buffer. The pellets are pooled, resuspended in 5 ml of PBS, and stored at 4° C. Resulting spores or bacteria can be further analyzed by genetic or serological methods.

### Example 38

### Serological Identification and Enrichment by Flow Cytometry

[0306] Single cells and microbes including but not limited to bacteria and fungi are isolated, enriched, and identified by flow cytometry from a microbial composition using fluorescently labeled tags. These methods have been described previously (Nebe-von-Caron, G., Stephens, P. J. & Hewitt, C. J. Analysis of bacterial function by multi-colour fluorescence flow cytometry and single cell sorting. Journal of Microbiological Methods, 2000). Briefly, a specific affinity reagent e.g. antibody or receptor to a surface marker can be generated (e.g. see example 37) and fluorescently labeled by a variety of methods known to one skilled in the art via biochemical conjugation techniques previously described (e.g. see Hermanson. Bioconjugation, 2008) to commercially available fluorescent dyes, quantum dots, and fluorescent proteins. The process can be multiplexed to identify and enrich multiple different specific bacteria in the same microbial composition by labeling different specific antibody reagents with different color dyes. The single or multiple fluorescent antibody mix is incubated with a microbial composition for 16 hours at 4° C. to allow the fluorescent labeled antibodies to bind the specific bacteria of interest. Multiple wash steps are performed by pelleting the cells at 16,000×g for 5 minutes, resuspending with PBS, and repeating the process 5 times. The microbial composition can then be sorted on a flow cytometer enriching the population of fluorescently labeled microbes. Unlabeled cells can serve as controls to establish appropriate gates to identify fluorescent signal from background. Additionally, recombinant cells expressing ectopic surface antigens can be used as positive controls in a mixture of labeled cells and known ratios of antigen positive cells and antigen negative cells can be mixed to establish and validate the technique. The sorted cells can then be cultured or directly assessed via genetic techniques e.g. 16S sequencing to confirm the serological identity of the enriched cells. Furthermore, a nonspecific dye or light scattering properties can be used to assess total microbial cell counts in a separate sample of cells from the microbial suspension.

[0307] As an alternative method, a microbial suspension sample can be fixed, permeabilized, labeled by fluorescent in situ hybridization (FISH) with specific fluorescently labeled oligonucleotide probes to specific 16S rRNA hypervariable sequences and submitted for flow cytometry as previously described (e.g. see Zoetendal, E. G. et al. Quantification of Uncultured Ruminococcus obeum-Like Bacteria in Human Fecal Samples by Fluorescent In Situ Hybridization and Flow Cytometry Using 16S rRNA-Targeted Probes. Applied Environmental Microbiology (2002)). Nonspecific dyes like propidium iodide can be used to count total cell number in one sample and unlabeled cells can be used as negative controls to establish gates for Fluorescence Assisted Cell Sorting (FACS).

[0308] Once sorted these enriched cells can be submitted for 16S sequence analysis to further validate and confirm the cell identity.

### Example 39

### Use of Phage to Destroy Abundant Microbes Resulting in Enrichment of Resistant Microbes of Interest from a Microbial Composition

[0309] A major issue in detecting low levels of a contaminant of interest is the relatively high levels of other microbes in a microbial composition. One method of enriching a pathogen for further isolation and identification involves using a bacteriophage to lyse the abundant microbes in the composition leaving only phage resistant microbes including the contaminants of interest. As a specific example, phage phi-CD27 isolated previously (e.g. see Mayer, M. J., Narbad, A. & Gasson, M. J. Molecular Characterization of a Clostridium difficile Bacteriophage and Its Cloned Biologically Active Endolysin. Journal of Bacteriology 190, 6734-6740, 2008) is used to clear out clostridium species from a mixed microbial composition. Additionally, phage identified from various sources known to infect Bacteroides species (e.g. Payan, A. et al. Method for Isolation of Bacteroides Bacteriophage Host Strains Suitable for Tracking Sources of Fecal Pollution in Water. Applied and Environmental Microbiology 71, 5659-5662, 2005) is isolated and used to clear abundant bacteria in a microbial composition leaving behind viable, enriched contaminant microbes resistant to the exogenously added phage. The procedure involves mixing high titer of known phage to a microbial sample, incubating for a period of time for infection and lysis to occur. Afterward, the remaining microbes can be pelleted and washed of extraneous cell debris repeatedly leaving only viable microbes of interest behind. Alternatively washes are performed by using a 1 um filter trapping larger microbes of interest while allowing phage and small lysed particulate to be washed away. Subsequent microbes can be further cultured, enriched or identified and detected by other methods described herein.

### Example 40

### Use of Phage to Detect Pathogens of Interest from Microbial Composition

[0310] As a specific non-limiting example of the use of a phage for detection and biosensor, recombinant phage expressing reporter genes are used to detect a pathogen of interest at low levels in a microbial composition as previously described (e.g. see Loessner, M. J., Rudolf, M. & Scherer, S. Evaluation of luciferase reporter bacteriophage A511::luxAB for detection of Listeria monocytogenes in contaminated foods. Applied and environmental Microbiology, 1997). Briefly, the bacteriophage A511::luxAB detects listeria by transducing the bioluminescence protein bacterial luciferase (luxAB) generating a luminescence when decanal or other substrate is added to the sample. To test a microbial composition for the presence of listeria, test samples of the microbial composition are added to Brain heart infusion (BHI) medium (Oxoid) and incubated for 2 days at 30° C. as an initial enrichment step. Samples of 1 mL are removed from the enrichment cultures and are transferred to 4 mL of 0.5×BHI broth, and incubated at 30° C. for 2 h. Duplicate 1-mL portions of each sample are mixed with 30 uL of phage suspension (3×108 A511::luxAB Plaque forming units (PFU), which are pre-dispensed into clear polystyrene tubes (75 by 12 mm; Sarstedt) suitable for the luminometer. For expression of phage-encoded luciferase, samples are incubated at 20° C. for 140 min, before bioluminescence is measured in a photon-counting, single-tube luminometer (Lumat LB 9501/16; Berthold). Following injection of 50 ul of 0.25% nonanal (Aldrich) in 70% ethanol, light emission was determined with a 0.5-s delay and the output was integrated over a 10-s period. Results are expressed in relative light units (RLU), as a mean value from the duplicate tubes. Negative controls are samples without the lux phage added and vehicle with lux phage only. A sample is considered positive for Listeria when the phage-infected tube yields RLU at least 100 above the background level indicated by the negative control.

[0311] Recombinant methods for building such a phage starting with a wild-type strain are known to one skilled in the art and have been previously described (e.g. see Loessner, M. J., Rees, C. E., Stewart, G. S. & Scherer, S. Construction of luciferase reporter bacteriophage A511::luxAB for rapid and sensitive detection of viable Listeria cells. Applied and Environmental Microbiology 62, 1133-1140, 1996). These methods are used to build other phage to detect other microbes permissive to othorthogal phage infection.

### Example 41

### Selective Removal of Microbes by Targeting a Toxic Substrate to Undesired Cells

[0312] Abundant and unwanted species of microbes contained in a microbial composition can be selectively inactivated by targeting a toxin or toxigenic substances to these bacteria via an affinity reagent. Specifically, a Nile blue EtNBS compound, 5-ethylamino-9-diethylaminobenzo [a] phenthiazinium chloride described previously (see Vecchio, D. et al. Structure-function relationships of Nile blue (EtNBS) derivatives as antimicrobial photosensitizers. European Journal of Medicinal Chemistry (2014). doi:10.1016/j.ejmech.2014.01.064) is conjugated to an affinity reagent e.g. antibody selective for a particular microbe as described (see e.g. example 37 and Hermanson, Bioconjugation. Pierce, 2008). This reagent is added to a sample of the microbial composition and incubated for 16 hours at 4° C. in the dark. The microbial composition can then be pelleted by centrifugation at 10,000×g for 10 min and washed by repeating this procedure five times to remove excess antibody conjugate. Resuspending the microbial composition in PBS and exposing the sample to 635 nm light at 50 mW/cm2 for 1 minute to 1 hour will result in the production of radical oxygen species that can damage cellular components. The high local concentration of the photosensitizer results in damage preferentially occurring to the unwanted cells bound by the antibody conjugate. The microbial composition can then be washed of inactivated cells or further enriched and analyzed by techniques presented herein.

### Example 42

### Selective Killing of Microbes Recognized by Antibodies when Serum is Added

[0313] To enrich the pathogenic or contaminant microbes to be detected in a microbial composition, serum based inactivation is used to eliminate the microbial composition that would interfere with downstream assays. As a non-limiting, specific example, Pseudomonas aeruginosa is removed from a mixture containing Salmonella as previously described (Xiao et al New role of antibody in bacterial isolation J of AOAC Int. 95: 1. 2012). Briefly, a rabbit polyclonal antibody against P. aeruginosa is prepared by inoculating four New Zealand rabbits with the pathogen P. aeruginosa. The antiserum is purified using saturated ammonium sulfate and added into Rappaport-Vassiliadis medium with soya (RVS) broth and Muller-Kauffmann tetrathionate novobiocin broth (MKTTn broth) to evaluate whether it could inhibit the growth of P. aeruginosa. Alternatively, methods previously described for producing monoclonal antibodies could be used (e.g. see example 37) and added to the medias above to observe inhibition. Observations by scanning electron microscopy are used to demonstrate that P. aeruginosa is attacked and destroyed by the antibody when incubated for 10 min at 37° C. The activity of the antibody is also tested against other strains of P. aeruginosa. Twenty-six strains of Salmonella are mixed with P. aeruginosa in RVS and MKTTn broth at 37 C for 12 h, respectively, and the cultures are plated on Salmonella chromogenic medium (SCM; Oxoid, Basingstoke, UK) to validate the effectiveness of the antibody in a defined microbial composition. The experiment is then repeated in other microbial compositions as a mechanism for enriching Salmonella. It is expected that only Salmonella will grew on SCM; five colonies are randomly selected for identification by VITEK 2 (bioMerieux, Lyon, France) or other previously defined methods (e.g. see examples 1, 3, 4). Additionally, this method can be multiplexed for multiple pathogens of interest by adding a cocktail of antibodies to the microbial composition to inactivate other non-pathogens. Other methods previously described herein are used to identify and further enrich pathogens for detection purposes.

### Example 43

### Purification of DNA Sequences on a Bead Matrix

[0314] The limit of detection for determining the presence of a particular nucleic acid sequence can be problematic if the abundance of a sequence of interest is so low that it is not present in 1-2 ug for PCR amplification. Using techniques described above, DNA is purified from a microbial sample. To enrich sequences of interest, an amount of greater than used for PCR is enriched for sequences of interest by contacting the sample with a solid phase comprising bound DNA oligonucleotides that selectively bind to sequences of interest via hybridization and thus enrich them. Suitable solid phase materials include, by way of example and without limitation, polystyrene or magnetic beads, silicon chip surfaces, silica beads, or other suitable systems known to one skilled in the art. As a specific non-limiting example, short oligonucleotides (20-60 bp) are synthesized with biotin at the 5′ or 3′ ends and are bound to magnetic streptavidin beads (Life Sciences). Alternatively, longer probes are developed by using the biotinylated oligonucleotides as PCR primers to amplify sequences of interest, purifying these longer probes, attaching them to the bead matrix and washing away the complementary strand not labeled with biotin under conditions that denature DNA but not the biotin streptavidin linkage (Holmberg et al. The biotin streptavidin interaction can be reversibly broken using water at elevated temperatures, Electrophoresis 26:501-510, 2005). Alternative methods for attaching probes to beads are also possible and have been previously described (e.g. see U.S. Pat. No. 6,288,220 B1, Biophysical Journal 71, 1079-1086 (1996), and Analytical Biochemistry 247, 96-101 (1997)).

[0315] With the probe-bead complex generated, one can contact nucleic acid derived from the sample with the beads and incubate the mixture at a suitable temperature to allow the probes to capture the nucleic acid sequences of interest. The undesired, non-hybridizing nucleic acid can then be washed away. The captured DNA can be separated from the substrate using conditions that denature the hybrid including heat or alkaline pH, known to one skilled in the art, or by detaching the probe from the bead by treating the sample with conditions that break the biotin streptavidin interaction (Holmberg et al. The biotin streptavidin interaction can be reversibly broken using water at elevated temperatures, Electrophoresis 26:501-510, 2005).

[0316] The enriched DNA sequences can then be sequenced by techniques described (see e.g. examples 3 and 4) or detected by qPCR based techniques to quantify the amount of a particular DNA sequence present.

### Example 44

### Removal of Contaminating DNA Sequences Using the CRISPr System

[0317] The CRISPr system can specifically cleave undesired nucleic acid sequences and thus reduce their contaminating effects on downstream DNA detection methods. Systems like those described previously (e.g. see Jinek et al A programmable Dual-RNA-Guided DNA endonuclease in adaptive bacterial immunity. Science. 2012) are used to perform this cleavage of contaminating DNA in vitro. Briefly, the CRISPr protein complex is purified, synthetic RNAs designed to guide the system to cleave target sequences are loaded onto the system, and the complex is incubated with the DNA sample of interest to allow cleavage to ensue. Alternatively, there are several commercial sources for the generation of specific custom CRISPr systems to perform cleavage and these are amenable to in vitro cleavage techniques (e.g. see Sigma and Blue Heron).

[0318] Purification of the Cas9 System

[0319] The Cas9-CRISPR is commercially available and reagents are purchased from Sigma and all reagents can be designed according to the manufacturer's instructions. (http://www.sigmaaldrich.com/catalog/product/sigma/crispr?lang=en&region=US). Alternatively, the following protocol contains the protocol to produce a custom system based on the work previously published. Briefly, the sequence encoding Cas9 (residues 1-1368) on a custom pET-based expression vector using ligation-independent cloning (LIC) is used for this protocol as previously described (Jinek et al A programmable Dual-RNA-Guided DNA endonuclease in adaptive bacterial immunity. Science. 2012.) The resulting fusion construct contained an N-terminal hexahistidine-maltose binding protein (His6-MBP) tag, followed by a peptide sequence containing a tobacco etch virus (TEV) protease cleavage site is expressed in in E. coli strain BL21 Rosetta 2 (DE3) (EMD Biosciences), grown in 2×TY medium at 18° C. for 16 h following induction with 0.2 mM IPTG. The protein was purified by a combination of affinity, ion exchange and size exclusion chromatographic steps. Briefly, cells are lysed in 20 mM Tris pH 8.0, 500 mM NaCl, 1 mM TCEP (supplemented with protease inhibitor cocktail (Roche)) in a homogenizer (Avestin). Clarified lysate is bound in batch to Ni-NTA agarose (Qiagen). The resin is washed extensively with 20 mM Tris pH 8.0, 500 mM NaCl and the bound protein is eluted in 20 mM Tris pH 8.0, 250 mM NaCl, 10% glycerol. The His6-MBP affinity tag is removed by cleavage with TEV protease, while the protein is dialyzed overnight against 20 mM HEPES pH 7.5, 150 mM KCl, 1 mM TCEP, 10% glycerol. The cleaved Cas9 protein is separated from the fusion tag by purification on a 5 ml SP Sepharose HiTrap column (GE Life Sciences), eluting with a linear gradient of 100 mM-1 M KCl. The protein is further purified by size exclusion chromatography on a Superdex 200 16/60 column in 20 mM HEPES pH 7.5, 150 mM KCl and 1 mM TCEP. Eluted protein is concentrated to −8 mg·ml-1, flash-frozen in liquid nitrogen and stored at −80° C. Optionally, all four Cas9 proteins are purified by an additional heparin sepharose step prior to gel filtration, eluting the bound protein with a linear gradient of 100 mM-2 M KCl. All proteins are concentrated to 1-8 mg·ml-1 in 20 mM HEPES pH 7.5, 150 mM KCl and 1 mM TCEP, flash-frozen in liquid N2 and stored at −80° C.

[0320] Template RNA Generation

[0321] Templates for cleaving undesired sequences are cloned onto an appropriate plasmid based vector containing a T7 flash transcription site by standard molecular biological techniques known to one skilled in the art (Sambrook and Russell, Molecular Cloning, a laboratory manual, third edition, 2001). As a non-limiting specific example, short 16S sequences from bacteria found in the microbial composition can be cloned and subsequently generate RNA based templates to remove dominant 16S sequences leaving behind 16S sequences that are derived from pathogenic species. These sequences are designed as follows: ˜21 nucleotides of complementarity to the 16S region to be cleaved with an extra GG sequence at the followed by the tracrRNA sequence described previously (see Sigma, http://www.sigmaaldrich.comitechnical-documents/articles/biology/crispr-cas9-genome-editing.html). The short 16S regions will be cloned into the CRISPr gene in the spacer regions with the appropriate RNA based motifs in the repeat regions required for proper Cas9 processing. Importantly the protospacer adjacent motif (PAM) must be considered when designing where the template will cut and must be present in the DNA sequence that will be cut. Various cas9 systems have different PAM sequences to further expand the utility of this method. RNA templates are in vitro transcribed using T7 Flash in vitro Transcription Kit (Epicentre, Illumina company) and PCR-generated DNA templates carrying a T7 promoter sequence. RNAs are gel-purified and quality-checked prior to use.

[0322] Cleavage of Undesired Sequences

[0323] Synthetic or in vitro-transcribed RNAs are pre-annealed prior to the reaction by heating to 95° C. and slowly cooling down to room temperature. The DNA sample is incubated for 60 min at 37° C. with purified Cas9 protein mixture (50-500 nM) and RNA duplex (50-500 nM, 1:1) in a Cas9 plasmid cleavage buffer (20 mM HEPES pH 7.5, 150 mM KCl, 0.5 mM DTT, 0.1 mM EDTA) with or without 10 mM MgCl2. Higher concentrations of Cas9 and guide RNA can be added to scale the process up or longer incubation times can allow for more complete cleavage of undesired DNA sequences. The reactions are stopped with 5× loading buffer containing 50 mM Tris PH 8.0 and 250 mM EDTA with 50% glycerol, and are resolved by 0.8 or 1% agarose gel electrophoresis and visualized by ethidium bromide staining by standard techniques known to one skilled in the art. Alternatively the DNA can be gel purified by phenol chloroform extraction, ethanol extraction or other comparable methods described herein or known to one skilled in the art. DNA can then be further enriched, PCR amplified or sequenced by methods described herein.

### Example 45

### Rapid Detection of Microorganisms by Fluorescence Methods

[0324] To enable the rapid detection of microorganisms diluted to countable colonies a rapid detection test based on the EZ-fluo rapid detection system is described. The technique is a test for viable microorganisms and is not intrinsically specific to any particular organism. One skilled in the art will recognize many embodiments where a combination of previous examples generating specific enrichment of microorganisms as previous steps to this subsequent detection step will produce specificity for detection of various organisms. To ensure appropriate quantification of microorganisms using this method, the volume of liquid or resuspended sample used for this technique should be chosen to ensure less than 300 cfu are present. To ensure this concentration in an unknown sample, multiple dilutions of the test suspension should be performed and tested to determine the appropriate dilution factor and back calculate the concentration of microorganisms. For example if 10 ml of sample is to be applied to the filter then less than 30 cfu/ml should be present in the solution. As a nonlimiting example a culture of A. brasiliensis and C. albicans is prepared and tested with the EZ-Fluo™ Rapid Detection System (EMD Millipore, Billerica, Mass.) as previously described (e.g. see http://www.foodsafetymagazine.com/signature-series/rapid-detection-of-microorganisms-in-food-and-beverage-by-fluorescence/). Briefly, C. albicans and A. brasiliensis are spiked are spiked into sterile liquid media at 50-70 cfu/mL. 2 and 3 ml of solution is used on culture or optionally 2 and 3 ml are diluted to 10 ml in sterile culture and applied to the membrane.

[0325] The following steps are performed in accordance with the EZ-Fluo rapid detection method. The sample is filtered over the appropriate membrane according to the manufacturing instructions with a vacuum manifold device as previously describe (e.g. see Microfil® & S-Pak® Membrane Filters/Microfil® & EZ-Pak® Systems User Guide and EZ-Stream™ Pump User Guide, EMD Millipore). The membrane is then transferred into a Petri-Pad Petri dish containing EZ-Fluo reagent for 30 minutes at 30-35° C. Fluorescent micro-colonies are counted using the EZ-fluo reader and camera reading assistance (optionally) to facilitate counting. As a confirmatory test the membrane can be incubated on a petri dish with various media to transfer colonies and these colonies can be grown as previously described in aforementioned examples for subsequent analysis and detection by genomic or microbiological mechanisms described herein.

### Example 46

### Identifying Pathogenicity Islands and Molecular Detection of Components in a Microbial Composition

[0326] To validate the microbial composition is substantially free of pathogens, virulence factors and mechanisms of pathogenic horizontal gene transfer including but not limited to pathogenicity island identification, plasmid identification, and transposon elements can be examined by genetic techniques. As a non-limiting specific example, pathogenicity islands are identified in E. faecalis, validated by genetic manipulation of the genome and tested in animal toxicology models, and finally developed into a screenable test using PCR or other similar molecular tests.

[0327] In the literature, a handful of E. faecalis genes have been characterized as virulence factors. They include the genes in the cytolysin operon that encode a cytolytic toxin (Coburn et al., 2003), the esp gene encoding a surface protein that contributes to urinary tract colonization and biofilm formation (Shankar et al., Infection derived Enterococcus faecalis strains are enriched in esp, a gene encoding a novel surface protein, Infect Immun. 67(1) 1999 and Tendolkar et al., Enterococcal surface protein, Esp, enhances biofilm formation by Enterococcus faecalis. Infect Immun. 72(10). 2004), and the agg gene encoding a surface protein necessary for conjugative gene transfer that also seems to enhance adherence to and internalization into eukaryotic cells (Rakita et al., 1999; Vanek et al. 1999; Kreft et al., 1992; Olmsted et al., 1994; Waters et al., 2004). These traits are enriched in clinical isolates as compared to isolates from healthy individuals (Lempiainen et al., 2005), but the correlation between infection and characterized virulence traits is not absolute. Similarly, genetic loci that confer resistance to antibiotics such as gentamicin and vancomycin (Zervos et al., 1987; Boyce et al., 1992) are enriched in clinical isolates, but are not essential for infection.

[0328] Using esp gene to identify a possible larger cassette conferring virulence, further elucidation of the pathogenicity island is determined by using one of the E. faecalis virulence factors, esp, and sequencing 1000 random clones derived from the genome of a Madison hospital outbreak strain MMH594. Closer examination of the esp locus in MMH594 and related strains that turned up in a St. Louis hospital outbreak revealed the presence of a pathogenicity island. With a size of approximately 150 kb, a G+C content of 32% (as compared to 38% for the rest of the genome), and terminally repeated 10 by flanking sequences, this element possesses all of the hallmarks of a typical pathogenicity island (Shankar et al., 2002). The PAI codes for 129 open reading frames (ORFs), and includes a number of genes of unknown function in addition to the known virulence traits cytolysin, Esp, and aggregation substance. Importantly, the island encodes additional, previously unstudied genes with putative functions that could have important roles in adaptation and survival in hostile environments. The lack of these genes in most non-infection-derived E. faecalis isolates suggests a class of potential new targets associated with disease, that are not essential for the commensal behavior of the organism. As such, this genetic marker can serve as a molecular marker of pathogenicity in a microbial composition.

[0329] The roles of genes and gene products, including toxins, in pathogenicity can be validated by deleting or disrupting these genes by standard genetic techniques and testing these strains in appropriate toxicology animal models. A given gene may be deleted via recombination with a DNA molecule carrying a deletion of that gene (a molecule in which the coding region of the gene has been deleted and flanking sequences have been joined to create a novel junction). The gene deletion sequence is created in vitro using standard molecular methods ((e.g. see Sambrook and Russell, Molecular cloning: a laboratory manual) and introduced into E. faecalis using conjugation or transformation (e.g., see Kristich, et al. 2005).

[0330] Once a specific gene or genomic loci is identified and validated as important for conferring pathogenicity or as being associated with a clinical isolates, or as a marker of a horizontal gene transfer element that carries pathogenicity factors, a molecular test is developed to detect the gene directly through qPCR techniques. Probes and appropriate primers are designed by one skilled in the art (e.g. see example 3 and 5). The protocol described herein for qPCR is then be performed on a microbial composition to identify the presence or absence of the pathogenic elements.

[0331] Alternatively, if the specific gene is a toxin or other protein product e.g. esp that is highly expressed in the pathogen or present on the surface, a recombinant version of the whole gene or a smaller antigenic piece (e.g. the external facing region of the gene of esp) of the gene is affinity tagged by a 6×His tag, MBP, or other common tags of the protein is expressed in a common expression system e.g. E. coli, S. cerevisiae, S2 insect cells, or baculovirus infected SF9 expression systems and purified by standard biochemical techniques using affinity chromatography. The protein is then used to produce two orthogonal antibodies by methods described herein (e.g. see Example 37 or Harlow and Lane, Antibodies: a laboratory Manual, 1988 or Accoceberry, I., M. Thellier, I. Desportes-Livage, A. Achbarou, S. Biligui, M. Danis, and A. Datry. 1999. Production of monoclonal antibodies directed against the microsporidium Enterocytozoon bieneusi. J. Clin. Microbiol. 37: 4107-4112). The two antibodies are derived from two different organisms e.g. mouse and rabbit, or rabbit and rat and must be able to simultaneously bind to the toxin or protein product in order to construct a sandwich ELISA assay. Monoclonal antibodies can also be used but should be derived from different animals and have unique, non-overlapping binding sites. Polyclonal antibodies derived from two different species from the a large antigenic fragment will have likely have this property. Optionally, the antibody reagents are generated from two different recombinant subunits of the same protein to ensure they can both bind and recognize non overlapping antigenic sites.

[0332] Kits are commercially available to generate an ELISA assay (Pierce Protein Biology Products, http://www.piercenet.com/cat/western-blotting-elisa-cell-imaging). Briefly, to perform an ELISA a first antibody or polyclonal antibody preparation is immobilized to the surface of a 96 well plate by chemical conjugation or physical adsorption techniques known to one skilled in the art, and excess is washed away (e.g. see Hermanson. Bioconjugation, 2008). Various dilutions of the test article, PBS buffer (negative control), or buffer containing various concentrations of the recombinant protein or toxin (positive control), are then incubated in separate wells of the plate for 16 hours at 4° C. with gentle rocking The wells are then washed to remove unbound material and the second orthogonal antibody is added, incubated for 1 hour, then washed five times. Finally the detection antibody (e.g. rabbit anti-mouse) or probe (e.g. streptavidin with a label if the second antibody is biotinylated) is added containing either the fluorescent, chemiluminescent, enzyme or other detection probe for 1 hour and subsequently washed per the manufacturer's instructions. Detection probe is used to determine the quantitative amount of toxin present and standard curves based on the positive control dilution are used to estimate the amount of protein or toxin present in a test solution. Test solutions derived from microbial compositions include but are not limited to the lysate of such microbial compositions, the spent media of a liquid culture from a microbial composition, and other embodiments are easily recognizable by one skilled in the art. One skilled in the art will also recognize several embodiments of the antigen based detection techniques or the genetic based techniques that are provided herein.

### Example 47

### Detection of C. difficile Toxin

[0333] To detect pathogenicity, toxins and other genes products unique to pathogens are used to detect the presence of a pathogen in a microbial composition. As a non-limiting example the following protocol demonstrates this methodology for detecting C. difficile toxin in a microbial composition as previously described (see e.g. Russman et al Evaluation of three rapid assays for detections of clostridium difficile toxin A and toxin B in stool specimens. Eur J Clin Microbiol Infect Dis. 26: 115-119, 2007). The commercially available kits are the rapid enzyme immunoassay Ridascreen Clostridium difficile Toxin A/B (R-Biopharm, Darmstadt, Germany) test, the C. difficile Tox A/B II Assay (TechLab, Blacksburg, Va., USA) and the ProSpecT C. difficile Toxin A/B Microplate Assay (Remel, Lenexa, Kans., USA). Similar assays can be adapted for other toxin products and will be recognized as other embodiments of this protocol by one skilled in the art. All three enzyme immuno assays (EIA) used are qualitative 96-well microplate assays to detect toxin A and toxin B of C. difficile. Assays are carried out and interpreted according to the manufacturers' instructions. All three tests are performed from the same portion of stool homogenized with a wooden applicator stick on the same day, after a single thaw at room temperature of the stored specimen or alternatively by methods previously described herein. Optionally, other microbial compositions are produced by alternative methods described herein to generate a suspension for testing. Washing of microplates between steps is done manually. Microplates for all assays are read spectrophotometrically. The C. difficile strain VPI 10463 (ATCC 43255) is used as an internal positive control.

[0334] In the RIDASCREEN® Clostridium difficile Toxin A/B test, monoclonal antibodies are used in a sandwich-type method. Monoclonal antibodies against toxins A and B of Clostridium difficile are bound to the surface of the microwells of the microtiter plate. A suspension of the stool sample to be examined and the controls, together with biotinylated monoclonal anti-toxin A and B antibodies (Conjugate 1), are pipetted into the well in the microwell plate at ambient temperature (20-25° C.) for incubation. After a wash step, polystreptavidin peroxidase conjugate (Conjugate 2) is added and the microwell plate incubated again at ambient temperature (20-25° C.). If toxin A and B are present in the stool sample, a sandwich complex is formed made up of the immobilised antibodies, the toxins and the antibodies conjugated with the biotine streptavidin peroxidase complex. Unbound enzyme-labelled antibodies are removed in another washing step. After adding substrate, the bound enzyme with positive samples transforms the colourless solution in the microwells in a blue solution. By addition of stop reagent a colour RIDASCREEN® Clostridium difficile Toxin A/B 12-05-24 3 change from blue to yellow occurs. The measured absorbance of the colour is proportional to the concentration of the existing Toxins A and B in the sample. The following protocol is from the manufacturer instructions (e.g. see http://www.r-biopharm.com/wp-content/uploads/items/ridascreen-clostridium-difficile-toxin-ab-3865/C0801-Clostridium-difficileToxin-AB_{—}12-05-24_GB.pdf) and all references to buffers are commercially available to allow the procedure to be performed)

[0335] All reagents and the microwell plate Plate must be brought to room temperature (20-25° C.) before use. The microwell strips must not be removed from the aluminium bag until they have reached room temperature. The reagents must be thoroughly mixed immediately before use. After use, the microwell strips (in sealed bags) and the reagents must be stored at 2-8° C. Once used, the microwell strips must not be used again. The reagents and microwell strips must not be used if the packaging is damaged or the vials are leaking. In order to prevent cross contamination, the samples must be prevented from coming into direct contact with the kit components. The test must not be carried out in direct sunlight. We recommend that the microwell plate be covered or sealed with film in order to prevent evaporation losses. Mix 1 part wash buffer concentrate with 9 parts distilled water. Any crystals present in the concentrate must be dissolved beforehand by warming in a water bath at 37° C. Place 1 ml RIDASCREEN® sample dilution buffer Diluent-1 in a labelled test tube. Suck up liquid stool in a disposable pipette (Article no Z0001) until it passes the second thickening (approx. 100 μl) and suspend it in the sample dilution buffer. With solid stools, take an equivalent amount (100 mg) with a spatula or a disposable inoculation loop and suspend it in solution. Homogenise the stool suspension by suction and ejection from a disposable pipette or, alternatively, by mixing in a vortex mixer. After leaving for a short time for the coarse stool particles to settle, the clarified supernatant of the stool suspension can be used directly in the test. If the test procedure is carried out in an automated ELISA system, the supernatant must be particle-free. In this case, it is advisable to centrifuge the sample at 2500 G for 5 minutes. In order to test colonies after culturing them on solid media (CCF agar or Schaedler agar), remove them from the agar plate with an inoculation loop and suspend them in 1 ml sample dilution buffer Diluent-1 and mix well. After this, centrifuge the suspension (5 minutes at 2500 g). The clear supernatant can be used in the test directly. To test liquid cultures, suspend 100 μl of this in 1 ml sample dilution buffer Diluent |1 and mix well. After this, centrifuge the suspension (5 minutes at 2500 g). The clear supernatant can be used in the test directly. After selecting a sufficient number of wells in the frame, pipette 2 drops (or 100 μl) of positive control Control+, the sample dilution buffer Diluent 1 (=negative control) or the stool suspension in the wells. Then add 2 drops (100 μl) of the biotin-conjugated antibody Conjugate 1 and, after mixing thoroughly (by lightly tapping on the edge of the plate), incubate at room temperature (20-25° C.) for 60 minutes. Careful washing is important in order to achieve the correct results and should therefore take place strictly according to the instructions. The incubated substance in the wells must be emptied into a waste container containing hypochlorite for disinfection. After this, knock out the plate onto absorbent paper in order to remove the residual moisture. Then wash the plate 5 times using 300 μl wash buffer each time.

[0336] Make sure that the wells are emptied completely by knocking them out after each wash on a part of the absorbent paper which is still dry and unused. Add 2 drops (100 μl) of the polystreptavidin peroxidase conjugate Conjugate 2 to the wells and incubate at room temperature (20-25° C.) for 30 minutes. Repeat washing step then proceed. Add 2 drops (100 μl) of substrate Substrate to each well. Then incubate the plate at room temperature (20-25° C.) for 15 minutes in the dark. After this, stop the reaction by adding 1 drop (50 μl) of stop reagent Stop to each well. After carefully mixing (slight tipping on the plate frame) the absorbance is measured at 450 nm (optional: reference wave length ≧600 nm). Then calibrate the zero against air, that means without microtiter plate. In order to establish the cut-off, 0.15 extinction units are added to the measured extinction for the negative control. Cut-off=Extinction for the negative control+0.15. The quantitative change in color of the reagent can be measured with a standard plate reader and positives are evaluated by standard techniques known to one skilled in the art e.g. 3 standard deviations above the negative control or significantly different after multiple replicates are performed.

[0337] The CBA (C. difficile TOX-B Test; TechLab) is performed either with supernatants from stool suspensions. The cytotoxin assay is carried out in 96-well plates according to the manufacturer's instructions using Vero cells (ATCC CCL-81). Briefly, Vero cells are incubated with the respective supernatants for 48 h. Cells are checked for cytotoxic effects after 24 and 48 h.

### Example 47

### Identification of Keystone OTUs and Functions

[0338] The human body is an ecosystem in which the microbiota, and the microbiome, play a significant role in the basic healthy function of human systems (e.g. metabolic, immunological, and neurological). The microbiota and resulting microbiome comprise an ecology of microorganisms that co-exist within single subjects interacting with one another and their host (i.e., the mammalian subject) to form a dynamic unit with inherent biodiversity and functional characteristics. Within these networks of interacting microbes (i.e. ecologies), particular members can contribute more significantly than others; as such these members are also found in many different ecologies, and the loss of these microbes from the ecology can have a significant impact on the functional capabilities of the specific ecology. Robert Paine coined the concept “Keystone Species” in 1969 (see Paine R T. 1969. A note on trophic complexity and community stability. The American Naturalist 103: 91-93.) to describe the existence of such lynchpin species that are integral to a given ecosystem regardless of their abundance in the ecological community. Paine originally describe the role of the starfish Pisaster ochraceus in marine systems and since the concept has been experimentally validated in numerous ecosystems.

[0339] Keystone OTUs and/or Functions are computationally-derived by analysis of network ecologies elucidated from a defined set of samples that share a specific phenotype. Keystone OTUs and/or Functions are defined as all Nodes within a defined set of networks that meet two or more of the following criteria. Using Criterion 1, the node is frequently observed in networks, and the networks in which the node is observed are found in a large number of individual subjects; the frequency of occurrence of these Nodes in networks and the pervasiveness of the networks in individuals indicates these Nodes perform an important biological function in many individuals. Using Criterion 2, the node is frequently observed in networks, and each the networks in which the node is observed contain a large number of Nodes—these Nodes are thus “super-connectors”, meaning that they form a nucleus of a majority of networks and as such have high biological significance with respect to their functional contributions to a given ecology. Using Criterion 3, the node is found in networks containing a large number of Nodes (i.e. they are large networks), and the networks in which the node is found occur in a large number of subjects; these networks are potentially of high interest as it is unlikely that large networks occurring in many individuals would occur by chance alone strongly suggesting biological relevance. Optionally, the required thresholds for the frequency at which a node is observed in network ecologies, the frequency at which a given network is observed across subject samples, and the size of a given network to be considered a Keystone node are defined by the 50th, 70th, 80th, or 90th percentiles of the distribution of these variables. Optionally, the required thresholds are defined by the value for a given variable that is significantly different from the mean or median value for a given variable using standard parametric or non-parametric measures of statistical significance. In another embodiment a Keystone node is defined as one that occurs in a sample phenotype of interest such as but not limited to “health” and simultaneously does not occur in a sample phenotype that is not of interest such as but not limited to “disease.” Optionally, a Keystone Node is defined as one that is shown to be significantly different from what is observed using permuted test datasets to measure significance.

### Example 48

### Microbial Population (Engraftment and Augmentation) and Reduction of Pathogen Carriage in Patients Treated with Spore Compositions

[0340] The following example is a non-limiting example of how one could determine what is present in the microbial composition using genomic techniques. Complementary genomic and microbiological methods were used to characterize the composition of the microbiota from Patient 1, 2, 3, 4, and 5, 6, 7, 8, 9, and 10 at pretreatment (pretreatment) and on up to 4 weeks post-treatment. To determine the OTUs that engraft from treatment with an ethanol treated spore preparation in the patients and how their microbiome changed in response, the microbiome was characterized by 16S-V4 sequencing prior to treatment (pretreatment) with an ethanol treated spore preparation and up to 25 days after receiving treatment. Alternatively, one might use a bacterial composition in the vegetative state, or a mixture of vegetative bacteria and bacterial spores. For example, the treatment of patient 1 with an ethanol treated spore preparation led to microbial population via the engraftment of OTUs from the spore treatment and augmentation in the microbiome of the patient (FIG. 11 and FIG. 12). By day 25 following treatment, the total microbial carriage was dominated by species of the following taxonomic groups: Bacteroides, Sutterella, Ruminococcus, Blautia, Eubacterium, Gemmiger/Faecalibacterium, and the non-sporeforming Lactobacillus (see Table 26 for specific OTUs). The first two genera represent OTUs that do not form spores while the latter taxonomic groups represent OTUs that are believed to form spores.

[0341] Table 26 shows bacterial OTUs associated with engraftment and ecological augmentation and establishment of a more diverse microbial ecology in patients treated with an ethanol treated spore preparation. OTUs that comprise an augmented ecology are not present in the patient prior to treatment and/or exist at extremely low frequencies such that they do not comprise a significant fraction of the total microbial carriage and are not detectable by genomic and/or microbiological assay methods. OTUs that are members of the engrafting and augmented ecologies were identified by characterizing the OTUs that increase in their relative abundance post treatment and that respectively are: (i) present in the ethanol treated spore preparation and absent in the patient pretreatment (engrafting OTUs), or (ii) absent in the ethanol treated spore preparation, but increase in their relative abundance through time post treatment with the preparation due to the formation of favorable growth conditions by the treatment (augmenting OTUs). Notably, the latter OTUs can grow from low frequency reservoirs in the patient, or be introduced from exogenous sources such as diet. OTUs that comprise a “core” augmented or engrafted ecology can be defined by the percentage of total patients in which they are observed to engraft and/or augment; the greater this percentage the more likely they are to be part of a core ecology responsible for catalyzing a shift away from a dysbiotic ecology. The dominant OTUs in an ecology can be identified using several methods including but not limited to defining the OTUs that have the greatest relative abundance in either the augmented or engrafted ecologies and defining a total relative abundance threshold. As example, the dominant OTUs in the augmented ecology of Patient-1 were identified by defining the OTUs with the greatest relative abundance, which together comprise 60% of the microbial carriage in this patient's augmented ecology.

[0342] Patient treatment with the ethanol treated spore preparation led to the population of a microbial ecology that has greater diversity than prior to treatment (FIG. 11). Genomic-based microbiome characterization confirmed engraftment of a range of OTUs that were absent in the patient pretreatment (Table 26). These OTUs comprised both bacterial species that were capable and not capable of forming spores, and OTUs that represent multiple phylogenetic clades. Organisms absent in Patient 1 pre-treatment either engraft directly from the ethanol treated spore fraction or are augmented by the creation of a gut environment favoring a healthy, diverse microbiota. Furthermore, Bacteroides fragilis group species were increased by 4 and 6 logs in patients 1 and 2 (FIG. 13).

[0343] FIG. 12 shows patient microbial ecology is shifted by treatment with an ethanol treated spore treatment from a dysbiotic state to a state of health. Principle Coordinates Analysis based on the total diversity and structure of the microbiome (Bray-Curtis Beta-Diversity) of the patient pre- and post-treatment delineates that the engraftment of OTUs from the spore treatment and the augmentation of the patient microbial ecology leads to a microbial ecology that is distinct from both the pretreatment microbiome and the ecology of the ethanol treated spore treatment (Table 26).

[0344] FIG. 13 shows the augmentation of Bacteroides species in patients. Comparing the number of Bacteroides fragilis groups species per cfu/g of feces pre-treatment and in week 4 post treatment reveals an increase of 4 logs or greater. The ability of 16S-V4 OTU identification to assign an OTU as a specific species depends in part on the resolution of the 16S-V4 region of the 16S gene for a particular species or group of species. Both the density of available reference 16S sequences for different regions of the tree as well as the inherent variability in the 16S gene between different species will determine the definitiveness of a taxonomic annotation to a given sequence read. Given the topological nature of a phylogenetic tree and that the tree represents hierarchical relationships of OTUs to one another based on their sequence similarity and an underlying evolutionary model, taxonomic annotations of a read can be rolled up to a higher level using a clade-based assignment procedure (Table 1). Using this approach, clades are defined based on the topology of a phylogenetic tree that is constructed from full-length 16S sequences using maximum likelihood or other phylogenetic models familiar to individuals with ordinary skill in the art of phylogenetics. Clades are constructed to ensure that all OTUs in a given clade are: (i) within a specified number of bootstrap supported nodes from one another (generally, 1-5 bootstraps), and (ii) within a 5% genetic similarity. OTUs that are within the same clade can be distinguished as genetically and phylogenetically distinct from OTUs in a different clade based on 16S-V4 sequence data. OTUs falling within the same clade are evolutionarily closely related and may or may not be distinguishable from one another using 16S-V4 sequence data. The power of clade based analysis is that members of the same clade, due to their evolutionary relatedness, play similar functional roles in a microbial ecology such as that found in the human gut. Compositions substituting one species with another from the same clade are likely to have conserved ecological function and therefore are useful in the present invention.

[0345] Stool samples were aliquoted and resuspended 10×vol/wt in either 100% ethanol (for genomic characterization) or PBS containing 15% glycerol (for isolation of microbes) and then stored at −80° C. until needed for use. For genomic 16S sequence analysis colonies picked from plate isolates had their full-length 16S sequence characterized as described in Examples 2 and 3, and primary stool samples were prepared targeting the 16S-V4 region using the method for heterogeneous samples described herein.

[0346] Notably, 16S sequences of isolates of a given OTU are phylogenetically placed within their respective clades despite that the actual taxonomic assignment of species and genus may suggest they are taxonomically distinct from other members of the clades in which they fall. Discrepancies between taxonomic names given to an OTU is based on microbiological characteristics versus genetic sequencing are known to exist from the literature. The OTUs footnoted in this table are known to be discrepant between the different methods for assigning a taxonomic name.

[0347] Engraftment of OTUs from the ethanol treated spore preparation treatment into the patient as well as the resulting augmentation of the resident microbiome led to a significant decrease in and elimination of the carriage of pathogenic species other than C. difficile in the patient. 16S-V4 sequencing of primary stool samples demonstrated that at pretreatment, 20% of reads were from the genus Klebsiella and an additional 19% were assigned to the genus Fusobacterium. These data are evidence of a profoundly dysbiotic microbiota associated with recurrent C. difficile infection and chronic antibiotic use. In healthy individuals, Klebsiella is a resident of the human microbiome in only about 2% of subjects based on an analysis of HMP database (www.hmpdacc.org), and the mean relative abundance of Klebsiella is only about 0.09% in the stool of these people. The 20% relative abundance in Patient 1 before treatment is an indicator of a proinflammatory gut environment enabling a “pathobiont” to overgrow and outcompete the commensal organisms normally found in the gut. Similarly, the dramatic overgrowth of Fusobacterium indicates a profoundly dysbiotic gut microbiota. One species of Fusobacterium, F. nucleatum (an OTU phylogenetically indistinguishable from Fusobacterium sp. 3_{—}1_{—}33 based on 16S-V4), has been termed “an emerging gut pathogen” based on its association with IBD, Crohn's disease, and colorectal cancer in humans and its demonstrated causative role in the development of colorectal cancer in animal models [Allen-Vercoe, Gut Microbes (2011) 2:294-8]. Importantly, neither Klebsiella nor Fusobacterium was detected in the 16S-V4 reads by Day 25 (Table 27).

[0348] To further characterize the colonization of the gut by Klebsiella and other Enterobacteriaceae and to speciate these organisms, pretreatment and Day 25 fecal samples stored at −80 C as PBS-glycerol suspensions were plated on a variety of selective media including MacConkey lactose media (selective for gram negative enterobacteria) and Simmons Citrate Inositol media (selective for Klebsiella spp) [Van Cregten et al, J. Clin. Microbiol. (1984) 20: 936-41]. Enterobacteria identified in the patient samples included K. pneumoniae, Klebsiella sp. Co_{—}9935 and E. coli. Strikingly, each Klebsiella species was reduced by 2-4 logs whereas E. coli, a normal commensal organism present in a healthy microbiota, was reduced by less than 1 log (Table 28 below). This decrease in Klebsiella spp. carriage is consistent across multiple patients. Four separate patients were evaluated for the presence of Klebsiella spp. pre treatment and 4 weeks post treatment. Klebsiella spp. were detected by growth on selective Simmons Citrate Inositol media as previously described. Serial dilution and plating, followed by determining cfu/mL titers of morphologically distinct species and 16S full length sequence identification of representatives of those distinct morphological classes, allowed calculation of titers of specific species.

[0349] The genus Bacteroides is an important member of the gastrointestinal microbiota; 100% of stool samples from the Human Microbiome Project contain at least one species of Bacteroides with total relative abundance in these samples ranging from 0.96% to 93.92% with a median relative abundance of 52.67% (www.hmpdacc.org reference data set HMSMCP). Bacteroides in the gut has been associated with amino acid fermentation and degradation of complex polysaccharides. Its presence in the gut is enhanced by diets rich in animal-derived products as found in the typical western diet [David, L. A. et al, Nature (2013) doi:10.1038/nature12820]. Prior to treatment, fewer than 0.008% of the 16S-V4 reads from Patient 1 mapped to the genus Bacteroides strongly suggesting that Bacteroides species were absent or that viable Bacteroides were reduced to an extremely minor component of the patient's gut microbiome. Post treatment, >42% of the 16S-V4 reads were assigned to the genus Bacteroides within 5 days of treatment and by Day 25 post treatment 59.48% of the patients gut microbiome was comprised of Bacteroides. These results were confirmed microbiologically by the absence of detectable Bacteroides in the pretreatment sample plated on two different Bacteroides selective media: Bacteroides Bile Esculin (BBE) agar which is selective for Bacteroides fragilis group species [Livingston, S. J. et al J. Clin. Microbiol (1978). 7: 448-453] and Polyamine Free Arabinose (PFA) agar [Noack et al. J. Nutr. (1998) 128: 1385-1391; modified by replacing glucose with arabinose]. The highly selective BBE agar had a limit of detection of <2×103 cfu/g, while the limit of detection for Bacteroides on PFA agar was approximately 2×107 cfu/g due to the growth of multiple non-Bacteroides species in the pretreatment sample on that medium. Colony counts of Bacteroides species on Day 25 were up to 2×1010 cfu/g, consistent with the 16S-V4 sequencing, demonstrating a profound reconstitution of the gut microbiota in Patient 1 (Table 29 below).

[0350] The significant abundance of Bacteroides in Patient 1 on Day 25 (and as early as Day 5 as shown by 16S-V4 sequencing) is remarkable. Viable Bacteroides fragilis group species were not present in the ethanol treated spore population based on microbiological plating (limit of detection of 10 cfu/ml). Thus, administration of the ethanol treated spore population to Patient 1 resulted in microbial population of the patient's GI tract, not only due to the engraftment of bacterial species such as but not limited to spore forming species, but also the restoration of high levels of non-spore forming species commonly found in healthy individuals through the creation of a niche that allowed for the repopulation of Bacteroides species. These organisms were most likely either present at extremely low abundance in the GI tract of Patient 1, or present in a reservoir in the GI tract from which they could rebound to high titer. Those species may also be reinoculated via oral uptake from food following treatment. We term this healthy repopulation of the gut with OTUs that are not present in the bacterial composition such as but not limited to a spore population or ethanol treated spore population, “Augmentation.” Augmentation is an important phenomenon in that it shows the ability to use an ethanol treated spore ecology or other bacterial composition to restore a healthy microbiota by seeding a diverse array or commensal organisms beyond the actual component organisms in the bacterial composition such as but not limited to an ethanol treated spore population itself; specifically the spore composition treatment itself and the engraftment of OTUs from the spore composition create a niche that enables the outgrowth of OTUs required to shift a dysbiotic microbiome to a microbial ecology that is associated with health. The diversity of Bacteroides species and their approximate relative abundance in the gut of Patient 1 is shown in Table 30, comprising at least 8 different species.

[0351] FIG. 14 shows species engrafting versus species augmenting in patients microbiomes after treatment with a bacterial composition such as but not limited to an ethanol-treated spore population. Relative abundance of species that engrafted or augmented as described were determined based on the number of 16S sequence reads. Each plot is from a different patient treated with the bacterial composition such as but not limited to an ethanol-treated spore population for recurrent C. difficile.

[0352] The impact of the bacterial composition such as but not limited to an ethanol treated spore population treatment on carriage of imipenem resistant Enterobacteriaceae was assessed by plating pretreatment and Day 28 clinical samples from Patients 2, 4 and 5 on MacConkey lactose plus 1 ug/mL of imipenem. Resistant organisms were scored by morphology, enumerated and DNA was submitted for full length 16S rDNA sequencing as described above. Isolates were identified as Morganella morganii, Providencia rettgeri and Proteus pennerii. Each of these are gut commensal organisms; overgrowth can lead to bacteremia and/or urinary tract infections requiring aggressive antibiotic treatment and, in some cases, hospitalization [Kim, B-N, et al Scan J. Inf Dis (2003) 35: 98-103; Lee, I-K and Liu, J-W J. Microbiol Immunol Infect (2006) 39: 328-334; O'Hara et al, Clin Microbiol Rev (2000) 13: 534]. The titer of organisms at pretreatment and Day 28 by patient is shown in Table 31. Importantly, administration of the bacterial composition such as but not limited to an ethanol treated spore preparation resulted in greater than 100-fold reduction in 4 of 5 cases of Enterobacteriaceae carriage with multiple imipenem resistant organisms (See Table 31 which shows titers (in cfu/g) of imipenem-resistant M. morganii, P. rettgeri and P. pennerii from Patients 2, 4 & 5).

[0353] In addition to speciation and enumeration, multiple isolates of each organism from Patient 4 were grown overnight in 96-well trays containing a 2-fold dilution series of imipenem in order to quantitatively determine the minimum inhibitory concentration (MIC) of antibiotic. Growth of organisms was detected by light scattering at 600 nm on a SpectraMax M5e plate reader. In the clinical setting, these species are considered resistant to imipenem if they have an MIC of 1 ug/mL or greater. M. morganii isolates from pretreatment samples from Patient D had MICs of 2-4 ug/mL and P. pennerii isolates had MICs of 4-8 ug/mL. Thus, the bacterial composition, such as but not limited to, an ethanol treated spores administered to Patient 4 caused the clearance of 2 imipenem resistant organisms (Table 26). While this example specifically uses a spore preparation, the methods herein describe how one skilled in the art would use a more general bacterial composition to achieve the same effects. The specific example should not be viewed as a limitation of the scope of this disclosure.

### Example 49

### Identifying the Core Ecology from the Bacterial Combination

[0354] To identify the composition of microbes in a complex microbial composition, genomic methods were employed. Ten different bacterial compositions were made by the ethanol treated spore preparation methods from 6 different donors (as described in Example 9). The spore preparations were used to treat 10 patients, each suffering from recurrent C. difficile infection. Patients were identified using the inclusion/exclusion criteria described in herein, and donors were identified using the criteria described in AAAJ. None of the patients experienced a relapse of C. difficile in the 4 weeks of follow up after treatment, whereas the literature would predict that 70-80% of subjects would experience a relapse following cessation of antibiotic [Van Nood, et al, NEJM (2013)]. Thus, the ethanol treated spore preparations derived from multiple different donors and donations showed remarkable clinical efficacy. These ethanol treated spore preparations are a subset of the bacterial compositions described herein and the results should not be viewed as a limitation on the scope of the broader set of bacterial compositions.

[0355] To define the Core Ecology underlying the remarkable clinical efficacy of the bacterial compositions e.g. ethanol treated spore preparations, the following analysis was carried out. The OTU composition of the spore preparation was determined by 16S-V4 rDNA sequencing and computational assignment of OTUs per Example 3. A requirement to detect at least ten sequence reads in the ethanol treated spore preparation was set as a conservative threshold to define only OTUs that were highly unlikely to arise from errors during amplification or sequencing. Methods routinely employed by those familiar to the art of genomic-based microbiome characterization use a read relative abundance threshold of 0.005% (see e.g. Bokulich, A. et al. 2013. Quality-filtering vastly improves diversity estimates from Illumina amplicon sequencing. Nature Methods 10: 57-59), which would equate to ≧2 reads given the sequencing depth obtained for the samples analyzed in this example, as cut-off which is substantially lower than the ≧10 reads used in this analysis. All taxonomic and clade assignments were made for each OTU as described in Example 4. The resulting list of OTUs, clade assignments, and frequency of detection in the spore preparations are shown in Table 32. Table 32 shows OTUs detected by a minimum of ten 16S-V4 sequence reads in at least a one ethanol treated spore preparation (pan-microbiome). OTUs that engraft in a treated patients and the percentage of patients in which they engraft are denoted, as are the clades, spore forming status, and Keystone OTU status. Starred OTUs occur in ≧80% of the ethanol preps and engraft in ≧50% of the treated patients.

[0356] Next, it was reasoned that for an OTU to be considered a member of the Core Ecology of the bacterial composition, that OTU was shown to engraft in a patient. Engraftment is important for two reasons. First, engraftment is a sine qua non of the mechanism to reshape the microbiome and eliminate C. difficile colonization. OTUs that engraft with higher frequency are highly likely to be a component of the Core Ecology of the spore preparation or broadly speaking a set bacterial composition. Second, OTUs detected by sequencing a bacterial composition (as in Table 32 may include non-viable cells or other contaminant DNA molecules not associated with the composition. The requirement that an OTU was shown to engraft in the patient eliminates OTUs that represent non-viable cells or contaminating sequences. Table 32 also identifies all OTUs detected in the bacterial composition that also were shown to engraft in at least one patient post-treatment. OTUs that are present in a large percentage of the bacterial composition e.g. ethanol spore preparations analyzed and that engraft in a large number of patients represent a subset of the Core Ecology that are highly likely to catalyze the shift from a dysbiotic disease ecology to a healthy microbiome.

[0357] A third lens was applied to further refine insights into the Core Ecology of the bacterial composition e.g. spore preparation. Computational-based, network analysis has enabled the description of microbial ecologies that are present in the microbiota of a broad population of healthy individuals. These network ecologies are comprised of multiple OTUs, some of which are defined as Keystone OTUs. Keystone OTUs form a foundation to the microbially ecologies in that they are found and as such are central to the function of network ecologies in healthy subjects. Keystone OTUs associated with microbial ecologies associated with healthy subjects are often are missing or exist at reduced levels in subjects with disease. Keystone OTUs may exist in low, moderate, or high abundance in subjects. Table 32 further notes which of the OTUs in the bacterial composition e.g. spore preparation are Keystone OTUs exclusively associated with individuals that are healthy and do not harbor disease.

[0358] A relatively small number of species, 16 in total, are detected in all of the spore preparations from 6 donors and 10 donations. The HMP database (www.hmpdacc.org) describes the enormous variability of commensal species across healthy individuals. The presence of a small number of consistent OTUs lends support to the concept of a Core Ecology. The engraftment data further supports this conclusion. A regression analysis shows a significant correlation between frequency of detection in a spore preparation and frequency of engraftment in a donor: R=0.43 (p<0.001). There is no a priori requirement that an OTU detected frequently in the bacterial composition e.g. spore preparation will or should engraft. For instance, Lutispora thermophila, a spore former found in all ten spore preparations, did not engraft in any of the patients. Bilophila wadsworthia, a gram negative anaerobe, is present in 9 of 10 donations, yet it does not engraft in any patient, indicating that it is likely a non-viable contaminant in the ethanol treated spore preparation. Finally, it is worth noting the high preponderance of previously defined Keystone OTUs among the most frequent OTUs in the spore preparations.

[0359] These three factors—prevalence in the bacterial composition such as but not limited to a spore preparation, frequency of engraftment, and designation as a Keystone OTUs—enabled the creation of a “Core Ecology Score” (CES) to rank individual OTUs. CES was defined as follows:
[0360] 40% weighting for presence of OTU in spore preparation
   [0361] multiplier of 1 for presence in 1-3 spore preparations
   [0362] multiplier of 2.5 for presence in 4-8 spore preparations
   [0363] multiplier of 5 for presences in ≧9 spore preparations
[0364] 40% weighting for engraftment in a patient
   [0365] multiplier of 1 for engraftment in 1-4 patients
   [0366] multiplier of 2.5 for engraftment in 5-6 patients
   [0367] multiplier of 5 for engraftment in ≧7 patients
[0368] 20% weighting to Keystone OTUs
   [0369] multiplier of 1 for a Keystone OTU
   [0370] multiplier of 0 for a non-Keystone OTU

[0371] Using this guide, the CES has a maximum possible score of 5 and a minimum possible score of 0.8. As an example, an OTU found in 8 of the 10 bacterial composition such as but not limited to a spore preparations that engrafted in 3 patients and was a Keystone OTU would be assigned the follow CES:

CES=(0.4×2.5)+(0.4×1)+(0.2×1)=1.6

[0372] Table 33 ranks the top 20 OTUs by CES with the further requirement that an OTU was shown to engraft to be a considered an element of a core ecology.

### Example 50

### Defining Efficacious Subsets of the Core Ecology

[0373] The number of organisms in the human gastrointestinal tract, as well as the diversity between healthy individuals, is indicative of the functional redundancy of a healthy gut microbiome ecology (see The Human Microbiome Consortia. 2012. Structure, function and diversity of the healthy human microbiome. Nature 486: 207-214). This redundancy makes it highly likely that subsets of the Core Ecology describe therapeutically beneficial components of the bacterial composition such as but not limited to an ethanol treated spore preparation and that such subsets may themselves be useful compositions for populating the GI tract and for the treatment of C. difficile infection given the ecologies functional characteristics. Using the CES, individual OTUs can be prioritized for evaluation as an efficacious subset of the Core Ecology.

[0374] Another aspect of functional redundancy is that evolutionarily related organisms (i.e. those close to one another on the phylogenetic tree, e.g. those grouped into a single clade) will also be effective substitutes in the Core Ecology or a subset thereof for treating C. difficile.

[0375] To one skilled in the art, the selection of appropriate OTU subsets for testing in vitro (e.g. see Example 51 below) or in vivo is straightforward. Subsets may be selected by picking any 2, 3, 4, 5, 6, 7, 8, 9, 10, or more than 10 OTUs from Table 32, with a particular emphasis on those with higher CES, such as the OTUs described Table 33. In addition, using the clade relationships defined in Example 3 and Table 1 above, related OTUs can be selected as substitutes for OTUs with acceptable CES values. These organisms can be cultured anaerobically in vitro using the appropriate media (selected from those described in Example 5 above), and then combined in a desired ratio. A typical experiment in the mouse C. difficile model utilizes at least 104 and preferably at least 105, 106, 107, 108, 109 or more than 109 colony forming units of a each microbe in the composition. Variations in the culture yields may sometimes mean that organisms are combined in unequal ratios, e.g. 1:10, 1:100, 1:1,000, 1:10,000, 1:100,000, or greater than 1:100,000. What is important in these compositions is that each strain be provided in a minimum amount so that the strain's contribution to the efficacy of the Core Ecology subset can be measured. Using the principles and instructions described here, it is straightforward for one of skill in the art to make clade-based substitutions to test the efficacy of subsets of the Core Ecology. Table 32 describes the clades for each OTU detected in a spore preparation and Table 1 describes the OTUs that can be used for substitutions based on clade relationships.

### Example 51

### Testing Subsets of the Core Ecology in the Mouse Model

[0376] Several subsets of the Core Ecology were tested in the C. difficile mouse model. The negative control was phosphate buffered saline and the positive control was a 10% human fecal suspension. The subsets are described in Table 34 (Subsets of the Core Ecology tested in the C. difficile mouse model).

[0377] Two cages of five mice each were tested for each arm of the experiment. All mice received an antibiotic cocktail consisting of 10% glucose, kanamycin (0.5 mg/ml), gentamicin (0.044 mg/ml), colistin (1062.5 U/ml), metronidazole (0.269 mg/ml), ciprofloxacin (0.156 mg/ml), ampicillin (0.1 mg/ml) and Vancomycin (0.056 mg/ml) in their drinking water on days −14 through −5 and a dose of 10 mg/kg Clindamycin by oral gavage on day −3. On day −1, they received either the test articles or control articles via oral gavage. On day 0, they were challenged by administration of approximately 4.5 log 10 cfu of C. difficile (ATCC 43255) via oral gavage. Mortality was assessed every day from day 0 to day 6 and the weight and subsequent weight change of the animal was assessed with weight loss being associated with C. difficile infection. Mortality and reduced weight loss of the test article compared to the empty vehicle was used to assess the success of the test article. Additionally, a C. difficile symptom scoring was performed each day from day −1 through day 6. Symptom scoring was based on Appearance (0-2 pts based on normal, hunched, piloerection, or lethargic), Respiration (0-2 pts based on normal, rapid or shallow, with abdominal breathing), Clinical Signs (0-2 points based on normal, wet tail, cold-to-the-touch, or isolation from other animals).

[0378] In addition to compiling the cumulative mortality for each arm, the average minimum relative weight is calculated as the mean of each mouse's minimum weight relative to Day −1 and the average maximum clinical score is calculated as the mean of each mouse's maximum combined clinical score with a score of 4 assigned in the case of death. The results are reported in Table 35 below (Results of bacterial compositions tested in a C. difficile mouse model).

### Example 52

### Defining Subsets of the Core Ecology in the In Vitro C. difficile Inhibition Assay

[0379] Vials of −80° C. glycerol stock banks were thawed and diluted to le8 CFU/mL. Selected strains and their clade assignment are given in Table 36. Each strain was then diluted 10× (to a final concentration of le7 CFU/mL of each strain) into 200 uL of PBS+15% glycerol in the wells of a 96-well plate. Plates were then frozen at −80° C. When needed for the assay, plates were removed from −80° C. and thawed at room temperature under anaerobic conditions when testing in a in vitro C. difficile inhibition assay (CivSim).

[0380] An overnight culture of Clostridium difficile was grown under anaerobic conditions in SweetB-FosIn or other suitable media for the growth of C. difficile. SweetB-FosIn is a complex media composed of brain heart infusion, yeast extract, cysteine, cellobiose, maltose, soluble starch, and fructooligosaccharides/inulin, and hemin, and is buffered with MOPs. After 24 hr of growth the culture was diluted 100,000 fold into a complex media such as SweetB-FosIn which is suitable for the growth of a wide variety of anaerobic bacterial species. The diluted C. difficile mixture was then aliquoted to wells of a 96-well plate (180 uL to each well). 20 uL of a subset Core Ecology is then added to each well at a final concentration of le6 CFU/mL of each species. Alternatively the assay can be tested each species at different initial concentrations (1e9 CFU/mL, le8 CFU/mL, le7 CFU/mL, le5 CFU/mL, le4 CFU/mL, le3 CFU/mL, le2 CFU/mL). Control wells only inoculated with C. difficile were included for a comparison to the growth of C. difficile without inhibition. Additional wells were used for controls that either inhibit or do not inhibit the growth of C. difficile. One example of a positive control that inhibits growth was a combination of Blautia producta, Clostridium bifermentans and Escherichia coli. One example of a control that shows reduced inhibition of C. difficile growth was a combination of Bacteroides thetaiotaomicron, Bacteroides ovatus and Bacteroides vulgatus. Plates were wrapped with parafilm and incubated for 24 hr at 37° C. under anaerobic conditions. After 24 hr the wells containing C. difficile alone were serially diluted and plated to determine titer. The 96-well plate was then frozen at −80 C before quantifying C. difficile by qPCR assay.

[0381] A standard curve was generated from a well on each assay plate containing only pathogenic C. difficile grown in SweetB+FosIn media and quantified by selective spot plating. Serial dilutions of the culture were performed in sterile phosphate-buffered saline. Genomic DNA was extracted from the standard curve samples along with the other wells.

[0382] Genomic DNA was extracted from 5 μl of each sample using a dilution, freeze/thaw, and heat lysis protocol. 5 μL of thawed samples is added to 45 μL of UltraPure water (Life Technologies, Carlsbad, Calif.) and mixed by pipetting. The plates with diluted samples were frozen at −20° C. until use for qPCR which includes a heated lysis step prior to amplification. Alternatively the genomic DNA was isolated using the Mo Bio Powersoil®-htp 96 Well Soil DNA Isolation Kit (Mo Bio Laboratories, Carlsbad, Calif.), Mo Bio Powersoil® DNA Isolation Kit (Mo Bio Laboratories, Carlsbad, Calif.), or the QIAamp DNA Stool Mini Kit (QIAGEN, Valencia, Calif.) according to the manufacturer's instructions.

[0383] The qPCR reaction mixture contains 1× SsoAdvanced Universal Probes Supermix, 900 nM of Wr-tcdB-F primer (AGCAGTTGAATATAGTGGTTTAGTTAGAGTTG, IDT, Coralville, Iowa), 900 nM of Wr-tcdB-R primer (CATGCTTTTTTAGTTTCTGGATTGAA, IDT, Coralville, Iowa), 250 nM of Wr-tcdB-P probe (6FAM-CATCCAGTCTCAATTGTATATGTTTCTCCA-MGB, Life Technologies, Grand Island, N.Y.), and Molecular Biology Grade Water (Mo Bio Laboratories, Carlsbad, Calif.) to 18 μl (Primers adapted from: Wroblewski, D. et al., Rapid Molecular Characterization of Clostridium difficile and Assessment of Populations of C. difficile in Stool Specimens, Journal of Clinical Microbiology 47:2142-2148 (2009)). This reaction mixture was aliquoted to wells of a Hard-shell Low-Profile Thin Wall 96-well Skirted PCR Plate (BioRad, Hercules, Calif.). To this reaction mixture, 2 μl of diluted, frozen, and thawed samples are added and the plate sealed with a Microseal ‘B’ Adhesive Seal (BioRad, Hercules, Calif.). The qPCR is performed on a BioRad C1000™ Thermal Cycler equipped with a CFX96™ Real-Time System (BioRad, Hercules, Calif.). The thermocycling conditions were 95° C. for 15 minutes followed by 45 cycles of 95° C. for 5 seconds, 60° C. for 30 seconds, and fluorescent readings of the FAM channel. Alternatively, the qPCR was performed with other standard methods known to those skilled in the art.

[0384] The Cq value for each well on the FAM channel was determined by the CFX Manager™ 3.0 software. The log 10 (cfu/mL) of C. difficile each experimental sample was calculated by inputting a given sample's Cq value into a linear regression model generated from the standard curve comparing the Cq values of the standard curve wells to the known log 10 (cfu/mL) of those samples. The log inhibition was calculated for each sample by subtracting the log 10 (cfu/mL) of C. difficile in the sample from the log 10 (cfu/mL) of C. difficile in the sample on each assay plate used for the generation of the standard curve that has no additional bacteria added. The mean log inhibition was calculated for all replicates for each composition.

[0385] A histogram of the range and standard deviation of each composition was plotted. Ranges or standard deviations of the log inhibitions that are distinct from the overall distribution are examined as possible outliers. If the removal of a single log inhibition datum from one of the binary pairs that is identified in the histograms would bring the range or standard deviation in line with those from the majority of the samples, that datum is removed as an outlier, and the mean log inhibition is recalculated.

[0386] The pooled variance of all samples evaluated in the assay is estimated as the average of the sample variances weighted by the sample's degrees of freedom. The pooled standard error is then calculated as the square root of the pooled variance divided by the square root of the number of samples. Confidence intervals for the null hypothesis are determined by multiplying the pooled standard error to the z score corresponding to a given percentage threshold. Mean log inhibitions outside the confidence interval are considered to be inhibitory if positive or stimulatory if negative with the percent confidence corresponding to the interval used. Ternary combinations with mean log inhibition greater than 0.312 are reported as ++++(≧99% confidence interval (C.I.) of the null hypothesis), those with mean log inhibition between 0.221 and 0.312 as +++(95%<C.I.<99%), those with mean log inhibition between 0.171 and 0.221 as ++(90%<C.I.<95%), those with mean log inhibition between 0.113 and 0.171 as +(80%<C.I.<90%), those with mean log inhibition between −0.113 and −0.171 as −(80%<C.I.<90%), those with mean log inhibition between −0.171 and −0.221 as −−(90%<C.I.<95%), those with mean log inhibition between −0.221 and −0.312 as −−−(95%<C.I.<99%), and those with mean log inhibition less than −0.312 as −−−−(99%<C.I.).

[0387] Table 36 below shows OTUs and their clade assignments tested in ternary combinations with results in the in vitro inhibition assay The CivSim shows that many ternary combinations inhibit C. difficile. 39 of 56 combinations show inhibition with a confidence interval >80%; 36 of 56 with a C.I.>90%; 36 of 56 with a C.I.>95%; 29 of 56 with a C.I. of >99%. Non-limiting but exemplary ternary combinations include those with mean log reduction greater than 0.171, e.g. any combination shown in Table 36 with a score of ++++, such as Colinsella aerofaciens, Coprococcus comes, and Blautia producta. Equally important, the CivSim assay describes ternary combinations that do not effectively inhibit C. difficile. 5 of 56 combinations promote growth with >80% confidence; 2 of 56 promote growth with >90% confidence; 1 of 56, Coprococcus comes, Clostridium symbiosum and Eubacterium rectale, promote growth with >95% confidence. 12 of 56 combinations are neutral in the assay, meaning they neither promote nor inhibit C. difficile growth to the limit of measurement.

[0388] It is straightforward for one of skill in the art to use the in vitro competition assay described below to determine efficacious subsets of the Core Ecology derived from the bacterial composition shown to be efficacious in treating C. difficile in humans.

### Example 53

### Use of In Vitro Competition Assay to Test Potential Bacterial Competitor Consortia for Functionality

[0389] An in vitro assay is performed to test the ability of a chosen species or combination of species to inhibit the growth of a pathogen such as Clostridium difficile in media that is otherwise suitable for growth of the pathogen. A liquid media suitable for growth of the pathogen is chosen, such as Brain Heart Infusion Broth (BHI) for C. difficile (see Example 7). The potential competitor species or a combination of competitor species were inoculated into 3 mL of the media and incubated anaerobically for 24 hr at 37° C. After incubation the cells were pelleted in a centrifuge at 10,000 rcf for 5 min. Supernatant was removed and filtered through a 0.22 μm filter to remove all cells. C. difficile or another pathogen of interest was then inoculated into the filtered spent supernatant and grown anaerobically at 37° C. for 24 hr. A control culture in fresh media was incubated in parallel. After incubation, the titer of C. difficile was determined by serially diluting and plating to Brucella Blood Agar (BBA) plates and incubated anaerobically for 24 hr at 37° C. Colonies were counted to determine the final titer of the pathogen after incubation in competitor conditioned media and control media. The percent reduction in final titer was calculated and considered inhibitory if a statistically significant reduction in growth was measured. Alternatively, the inhibition of pathogen growth was monitored by OD600 measurement of the test and control cultures.

[0390] Unless otherwise indicated, all numbers expressing quantities of ingredients, reaction conditions, and so forth used in the specification, including claims, are to be understood as being modified in all instances by the term “about.” Accordingly, unless otherwise indicated to the contrary, the numerical parameters are approximations and may vary depending upon the desired properties sought to be obtained. At the very least, and not as an attempt to limit the application of the doctrine of equivalents to the scope of the claims, each numerical parameter should be construed in light of the number of significant digits and ordinary rounding approaches.

[0391] Unless otherwise indicated, the term “at least” preceding a series of elements is to be understood to refer to every element in the series.

[0392] While the invention has been particularly shown and described with reference to a preferred embodiment and various alternate embodiments, it will be understood by persons skilled in the relevant art that various changes in form and details can be made therein without departing from the spirit and scope of the invention.

[0393] All references, issued patents and patent applications cited within the body of the instant specification are hereby incorporated by reference in their entirety, for all purposes.

### Tables

TABLE 1

| | SEQ ID | Public DB | | Spore | Pathogen |
|---|---|---|---|---|---|
| OTU | Number | Accession | Clade | Former | Status |
| Eubacterium saburreum | 858 | AB525414 | clade_178 | Y | N |
| Eubacterium sp. oral clone IR009 | 866 | AY349376 | clade_178 | Y | N |
| Lachnospiraceae bacterium ICM62 | 1061 | HQ616401 | clade_178 | Y | N |
| Lachnospiraceae bacterium MSX33 | 1062 | HQ616384 | clade_178 | Y | N |
| Lachnospiraceae bacterium oral taxon 107 | 1063 | ADDS01000069 | clade_178 | Y | N |
| Alicyclobacillus acidocaldarius | 122 | NR_074721 | clade_179 | Y | N |
| Clostridium baratii | 555 | NR_029229 | clade_223 | Y | N |
| Clostridium colicanis | 576 | FJ957863 | clade_223 | Y | N |
| Clostridium paraputrificum | 611 | AB536771 | clade_223 | Y | N |
| Clostridium sardiniense | 621 | NR_041006 | clade_223 | Y | N |
| Eubacterium budayi | 837 | NR_024682 | clade_223 | Y | N |
| Eubacterium moniliforme | 851 | HF558373 | clade_223 | Y | N |
| Eubacterium multiforme | 852 | NR_024683 | clade_223 | Y | N |
| Eubacterium nitritogenes | 853 | NR_024684 | clade_223 | Y | N |
| Anoxybacillus flavithermus | 173 | NR_074667 | clade_238 | Y | N |
| Bacillus aerophilus | 196 | NR_042339 | clade_238 | Y | N |
| Bacillus aestuarii | 197 | GQ980243 | clade_238 | Y | N |
| Bacillus amyloliquefaciens | 199 | NR_075005 | clade_238 | Y | N |
| Bacillus anthracis | 200 | AAEN01000020 | clade_238 | Y | Category-A |
| Bacillus atrophaeus | 201 | NR_075016 | clade_238 | Y | OP |
| Bacillus badius | 202 | NR_036893 | clade_238 | Y | OP |
| Bacillus cereus | 203 | ABDJ01000015 | clade_238 | Y | OP |
| Bacillus circulans | 204 | AB271747 | clade_238 | Y | OP |
| Bacillus firmus | 207 | NR_025842 | clade_238 | Y | OP |
| Bacillus flexus | 208 | NR_024691 | clade_238 | Y | OP |
| Bacillus fordii | 209 | NR_025786 | clade_238 | Y | OP |
| Bacillus halmapalus | 211 | NR_026144 | clade_238 | Y | OP |
| Bacillus herbersteinensis | 213 | NR_042286 | clade_238 | Y | OP |
| Bacillus idriensis | 215 | NR_043268 | clade_238 | Y | OP |
| Bacillus lentus | 216 | NR_040792 | clade_238 | Y | OP |
| Bacillus licheniformis | 217 | NC_006270 | clade_238 | Y | OP |
| Bacillus megaterium | 218 | GU252124 | clade_238 | Y | OP |
| Bacillus nealsonii | 219 | NR_044546 | clade_238 | Y | OP |
| Bacillus niabensis | 220 | NR_043334 | clade_238 | Y | OP |
| Bacillus niacini | 221 | NR_024695 | clade_238 | Y | OP |
| Bacillus pocheonensis | 222 | NR_041377 | clade_238 | Y | OP |
| Bacillus pumilus | 223 | NR_074977 | clade_238 | Y | OP |
| Bacillus safensis | 224 | JQ624766 | clade_238 | Y | OP |
| Bacillus simplex | 225 | NR_042136 | clade_238 | Y | OP |
| Bacillus sonorensis | 226 | NR_025130 | clade_238 | Y | OP |
| Bacillus sp. 10403023 MM10403188 | 227 | CAET01000089 | clade_238 | Y | OP |
| Bacillus sp. 2_A_57_CT2 | 230 | ACWD01000095 | clade_238 | Y | OP |
| Bacillus sp. 2008724126 | 228 | GU252108 | clade_238 | Y | OP |
| Bacillus sp. 2008724139 | 229 | GU252111 | clade_238 | Y | OP |
| Bacillus sp. 7_16AIA | 231 | FN397518 | clade_238 | Y | OP |
| Bacillus sp. AP8 | 233 | JX101689 | clade_238 | Y | OP |
| Bacillus sp. B27(2008) | 234 | EU362173 | clade_238 | Y | OP |
| Bacillus sp. BT1B_CT2 | 235 | ACWC01000034 | clade_238 | Y | OP |
| Bacillus sp. GB1.1 | 236 | FJ897765 | clade_238 | Y | OP |
| Bacillus sp. GB9 | 237 | FJ897766 | clade_238 | Y | OP |
| Bacillus sp. HU19.1 | 238 | FJ897769 | clade_238 | Y | OP |
| Bacillus sp. HU29 | 239 | FJ897771 | clade_238 | Y | OP |
| Bacillus sp. HU33.1 | 240 | FJ897772 | clade_238 | Y | OP |
| Bacillus sp. JC6 | 241 | JF824800 | clade_238 | Y | OP |
| Bacillus sp. oral taxon F79 | 248 | HM099654 | clade_238 | Y | OP |
| Bacillus sp. SRC_DSF1 | 243 | GU797283 | clade_238 | Y | OP |
| Bacillus sp. SRC_DSF10 | 242 | GU797292 | clade_238 | Y | OP |
| Bacillus sp. SRC_DSF2 | 244 | GU797284 | clade_238 | Y | OP |
| Bacillus sp. SRC_DSF6 | 245 | GU797288 | clade_238 | Y | OP |
| Bacillus sp. tc09 | 249 | HQ844242 | clade_238 | Y | OP |
| Bacillus sp. zh168 | 250 | FJ851424 | clade_238 | Y | OP |
| Bacillus sphaericus | 251 | DQ286318 | clade_238 | Y | OP |
| Bacillus sporothermodurans | 252 | NR_026010 | clade_238 | Y | OP |
| Bacillus subtilis | 253 | EU627588 | clade_238 | Y | OP |
| Bacillus thermoamylovorans | 254 | NR_029151 | clade_238 | Y | OP |
| Bacillus thuringiensis | 255 | NC_008600 | clade_238 | Y | OP |
| Bacillus weihenstephanensis | 256 | NR_074926 | clade_238 | Y | OP |
| Geobacillus kaustophilus | 933 | NR_074989 | clade_238 | Y | N |
| Geobacillus stearothermophilus | 936 | NR_040794 | clade_238 | Y | N |
| Geobacillus thermodenitrificans | 938 | NR_074976 | clade_238 | Y | N |
| Geobacillus thermoglucosidasius | 939 | NR_043022 | clade_238 | Y | N |
| Lysinibacillus sphaericus | 1193 | NR_074883 | clade_238 | Y | N |
| Clostridiales sp. SS3_4 | 543 | AY305316 | clade_246 | Y | N |
| Clostridium beijerinckii | 557 | NR_074434 | clade_252 | Y | N |
| Clostridium botulinum | 560 | NC_010723 | clade_252 | Y | Category-A |
| Clostridium butyricum | 561 | ABDT01000017 | clade_252 | Y | N |
| Clostridium chauvoei | 568 | EU106372 | clade_252 | Y | N |
| Clostridium favososporum | 582 | X76749 | clade_252 | Y | N |
| Clostridium histolyticum | 592 | HF558362 | clade_252 | Y | N |
| Clostridium isatidis | 597 | NR_026347 | clade_252 | Y | N |
| Clostridium limosum | 602 | FR870444 | clade_252 | Y | N |
| Clostridium sartagoforme | 622 | NR_026490 | clade_252 | Y | N |
| Clostridium septicum | 624 | NR_026020 | clade_252 | Y | N |
| Clostridium sp. 7_2_43FAA | 626 | ACDK01000101 | clade_252 | Y | N |
| Clostridium sporogenes | 645 | ABKW02000003 | clade_252 | Y | N |
| Clostridium tertium | 653 | Y18174 | clade_252 | Y | N |
| Clostridium carnis | 564 | NR_044716 | clade_253 | Y | N |
| Clostridium celatum | 565 | X77844 | clade_253 | Y | N |
| Clostridium disporicum | 579 | NR_026491 | clade_253 | Y | N |
| Clostridium gasigenes | 585 | NR_024945 | clade_253 | Y | N |
| Clostridium quinii | 616 | NR_026149 | clade_253 | Y | N |
| Clostridium hylemonae | 593 | AB023973 | clade_260 | Y | N |
| Clostridium scindens | 623 | AF262238 | clade_260 | Y | N |
| Lachnospiraceae bacterium 5_1_57FAA | 1054 | ACTR01000020 | clade_260 | Y | N |
| Clostridium glycyrrhizinilyticum | 588 | AB233029 | clade_262 | Y | N |
| Clostridium nexile | 607 | X73443 | clade_262 | Y | N |
| Coprococcus comes | 674 | ABVR01000038 | clade_262 | Y | N |
| Lachnospiraceae bacterium 1_1_57FAA | 1048 | ACTM01000065 | clade_262 | Y | N |
| Lachnospiraceae bacterium 1_4_56FAA | 1049 | ACTN01000028 | clade_262 | Y | N |
| Lachnospiraceae bacterium 8_1_57FAA | 1057 | ACWQ01000079 | clade_262 | Y | N |
| Ruminococcus lactaris | 1663 | ABOU02000049 | clade_262 | Y | N |
| Ruminococcus torques | 1670 | AAVP02000002 | clade_262 | Y | N |
| Paenibacillus lautus | 1397 | NR_040882 | clade_270 | Y | N |
| Paenibacillus polymyxa | 1399 | NR_037006 | clade_270 | Y | N |
| Paenibacillus sp. HGF5 | 1402 | AEXS01000095 | clade_270 | Y | N |
| Paenibacillus sp. HGF7 | 1403 | AFDH01000147 | clade_270 | Y | N |
| Eubacterium sp. oral clone JI012 | 868 | AY349379 | clade_298 | Y | N |
| Alicyclobacillus contaminans | 124 | NR_041475 | clade_301 | Y | N |
| Alicyclobacillus herbarius | 126 | NR_024753 | clade_301 | Y | N |
| Alicyclobacillus pomorum | 127 | NR_024801 | clade_301 | Y | N |
| Blautia coccoides | 373 | AB571656 | clade_309 | Y | N |
| Blautia glucerasea | 374 | AB588023 | clade_309 | Y | N |
| Blautia glucerasei | 375 | AB439724 | clade_309 | Y | N |
| Blautia hansenii | 376 | ABYU02000037 | clade_309 | Y | N |
| Blautia luti | 378 | AB691576 | clade_309 | Y | N |
| Blautia producta | 379 | AB600998 | clade_309 | Y | N |
| Blautia schinkii | 380 | NR_026312 | clade_309 | Y | N |
| Blautia sp. M25 | 381 | HM626178 | clade_309 | Y | N |
| Blautia stercoris | 382 | HM626177 | clade_309 | Y | N |
| Blautia wexlerae | 383 | EF036467 | clade_309 | Y | N |
| Bryantella formatexigens | 439 | ACCL02000018 | clade_309 | Y | N |
| Clostridium coccoides | 573 | EF025906 | clade_309 | Y | N |
| Eubacterium cellulosolvens | 839 | AY178842 | clade_309 | Y | N |
| Lachnospiraceae bacterium 6_1_63FAA | 1056 | ACTV01000014 | clade_309 | Y | N |
| Ruminococcus hansenii | 1662 | M59114 | clade_309 | Y | N |
| Ruminococcus obeum | 1664 | AY169419 | clade_309 | Y | N |
| Ruminococcus sp. 5_1_39BFAA | 1666 | ACII01000172 | clade_309 | Y | N |
| Ruminococcus sp. K_1 | 1669 | AB222208 | clade_309 | Y | N |
| Syntrophococcus sucromutans | 1911 | NR_036869 | clade_309 | Y | N |
| Bacillus alcalophilus | 198 | X76436 | clade_327 | Y | N |
| Bacillus clausii | 205 | FN397477 | clade_327 | Y | OP |
| Bacillus gelatini | 210 | NR_025595 | clade_327 | Y | OP |
| Bacillus halodurans | 212 | AY144582 | clade_327 | Y | OP |
| Bacillus sp. oral taxon F26 | 246 | HM099642 | clade_327 | Y | OP |
| Clostridium innocuum | 595 | M23732 | clade_351 | Y | N |
| Clostridium sp. HGF2 | 628 | AENW01000022 | clade_351 | Y | N |
| Clostridium perfringens | 612 | ABDW01000023 | clade_353 | Y | Category-B |
| Sarcina ventriculi | 1687 | NR_026146 | clade_353 | Y | N |
| Clostridium bartlettii | 556 | ABEZ02000012 | clade_354 | Y | N |
| Clostridium bifermentans | 558 | X73437 | clade_354 | Y | N |
| Clostridium ghonii | 586 | AB542933 | clade_354 | Y | N |
| Clostridium glycolicum | 587 | FJ384385 | clade_354 | Y | N |
| Clostridium mayombei | 605 | FR733682 | clade_354 | Y | N |
| Clostridium sordellii | 625 | AB448946 | clade_354 | Y | N |
| Clostridium sp. MT4 E | 635 | FJ159523 | clade_354 | Y | N |
| Eubacterium tenue | 872 | M59118 | clade_354 | Y | N |
| Clostridium argentinense | 553 | NR_029232 | clade_355 | Y | N |
| Clostridium sp. JC122 | 630 | CAEV01000127 | clade_355 | Y | N |
| Clostridium sp. NMBHI_1 | 636 | JN093130 | clade_355 | Y | N |
| Clostridium subterminale | 650 | NR_041795 | clade_355 | Y | N |
| Clostridium sulfidigenes | 651 | NR_044161 | clade_355 | Y | N |
| Dorea formicigenerans | 773 | AAXA02000006 | clade_360 | Y | N |
| Dorea longicatena | 774 | AJ132842 | clade_360 | Y | N |
| Lachnospiraceae bacterium 2_1_46FAA | 1050 | ADLB01000035 | clade_360 | Y | N |
| Lachnospiraceae bacterium 2_1_58FAA | 1051 | ACTO01000052 | clade_360 | Y | N |
| Lachnospiraceae bacterium 4_1_37FAA | 1053 | ADCR01000030 | clade_360 | Y | N |
| Lachnospiraceae bacterium 9_1_43BFAA | 1058 | ACTX01000023 | clade_360 | Y | N |
| Ruminococcus gnavus | 1661 | X94967 | clade_360 | Y | N |
| Ruminococcus sp. ID8 | 1668 | AY960564 | clade_360 | Y | N |
| Blautia hydrogenotrophica | 377 | ACBZ01000217 | clade_368 | Y | N |
| Lactonifactor longoviformis | 1147 | DQ100449 | clade_368 | Y | N |
| Robinsoniella peoriensis | 1633 | AF445258 | clade_368 | Y | N |
| Eubacterium infirmum | 849 | U13039 | clade_384 | Y | N |
| Eubacterium sp. WAL 14571 | 864 | FJ687606 | clade_384 | Y | N |
| Erysipelotrichaceae bacterium 5_2_54FAA | 823 | ACZW01000054 | clade_385 | Y | N |
| Eubacterium biforme | 835 | ABYT01000002 | clade_385 | Y | N |
| Eubacterium cylindroides | 842 | FP929041 | clade_385 | Y | N |
| Eubacterium dolichum | 844 | L34682 | clade_385 | Y | N |
| Eubacterium sp. 3_1_31 | 861 | ACTL01000045 | clade_385 | Y | N |
| Eubacterium tortuosum | 873 | NR_044648 | clade_385 | Y | N |
| Bulleidia extructa | 441 | ADFR01000011 | clade_388 | Y | N |
| Solobacterium moorei | 1739 | AECQ01000039 | clade_388 | Y | N |
| Coprococcus catus | 673 | EU266552 | clade_393 | Y | N |
| Lachnospiraceae bacterium oral taxon F15 | 1064 | HM099641 | clade_393 | Y | N |
| Clostridium cochlearium | 574 | NR_044717 | clade_395 | Y | N |
| Clostridium malenominatum | 604 | FR749893 | clade_395 | Y | N |
| Clostridium tetani | 654 | NC_004557 | clade_395 | Y | N |
| Acetivibrio ethanolgignens | 6 | FR749897 | clade_396 | Y | N |
| Anaerosporobacter mobilis | 161 | NR_042953 | clade_396 | Y | N |
| Bacteroides pectinophilus | 288 | ABVQ01000036 | clade_396 | Y | N |
| Clostridium aminovalericum | 551 | NR_029245 | clade_396 | Y | N |
| Clostridium phytofermentans | 613 | NR_074652 | clade_396 | Y | N |
| Eubacterium hallii | 848 | L34621 | clade_396 | Y | N |
| Eubacterium xylanophilum | 875 | L34628 | clade_396 | Y | N |
| Ruminococcus callidus | 1658 | NR_029160 | clade_406 | Y | N |
| Ruminococcus champanellensis | 1659 | FP929052 | clade_406 | Y | N |
| Ruminococcus sp. 18P13 | 1665 | AJ515913 | clade_406 | Y | N |
| Ruminococcus sp. 9SE51 | 1667 | FM954974 | clade_406 | Y | N |
| Anaerostipes caccae | 162 | ABAX03000023 | clade_408 | Y | N |
| Anaerostipes sp. 3_2_56FAA | 163 | ACWB01000002 | clade_408 | Y | N |
| Clostridiales bacterium 1_7_47FAA | 541 | ABQR01000074 | clade_408 | Y | N |
| Clostridiales sp. SM4_1 | 542 | FP929060 | clade_408 | Y | N |
| Clostridiales sp. SSC_2 | 544 | FP929061 | clade_408 | Y | N |
| Clostridium aerotolerans | 546 | X76163 | clade_408 | Y | N |
| Clostridium aldenense | 547 | NR_043680 | clade_408 | Y | N |
| Clostridium algidixylanolyticum | 550 | NR_028726 | clade_408 | Y | N |
| Clostridium amygdalinum | 552 | AY353957 | clade_408 | Y | N |
| Clostridium asparagiforme | 554 | ACCJ01000522 | clade_408 | Y | N |
| Clostridium bolteae | 559 | ABCC02000039 | clade_408 | Y | N |
| Clostridium celerecrescens | 566 | JQ246092 | clade_408 | Y | N |
| Clostridium citroniae | 569 | ADLJ01000059 | clade_408 | Y | N |
| Clostridium clostridiiformes | 571 | M59089 | clade_408 | Y | N |
| Clostridium clostridioforme | 572 | NR_044715 | clade_408 | Y | N |
| Clostridium hathewayi | 590 | AY552788 | clade_408 | Y | N |
| Clostridium indolis | 594 | AF028351 | clade_408 | Y | N |
| Clostridium lavalense | 600 | EF564277 | clade_408 | Y | N |
| Clostridium saccharolyticum | 620 | CP002109 | clade_408 | Y | N |
| Clostridium sp. M62_1 | 633 | ACFX02000046 | clade_408 | Y | N |
| Clostridium sp. SS2_1 | 638 | ABGC03000041 | clade_408 | Y | N |
| Clostridium sphenoides | 643 | X73449 | clade_408 | Y | N |
| Clostridium symbiosum | 652 | ADLQ01000114 | clade_408 | Y | N |
| Clostridium xylanolyticum | 658 | NR_037068 | clade_408 | Y | N |
| Eubacterium hadrum | 847 | FR749933 | clade_408 | Y | N |
| Lachnospiraceae bacterium 3_1_57FAA_CT1 | 1052 | ACTP01000124 | clade_408 | Y | N |
| Lachnospiraceae bacterium 5_1_63FAA | 1055 | ACTS01000081 | clade_408 | Y | N |
| Lachnospiraceae bacterium A4 | 1059 | DQ789118 | clade_408 | Y | N |
| Lachnospiraceae bacterium DJF VP30 | 1060 | EU728771 | clade_408 | Y | N |
| Lachnospiraceae genomosp. C1 | 1065 | AY278618 | clade_408 | Y | N |
| Clostridium difficile | 578 | NC_013315 | clade_409 | Y | OP |
| Eubacterium sp. AS15b | 862 | HQ616364 | clade_428 | Y | N |
| Eubacterium sp. OBRC9 | 863 | HQ616354 | clade_428 | Y | N |
| Eubacterium sp. oral clone OH3A | 871 | AY947497 | clade_428 | Y | N |
| Eubacterium yurii | 876 | AEES01000073 | clade_428 | Y | N |
| Clostridium acetobutylicum | 545 | NR_074511 | clade_430 | Y | N |
| Clostridium algidicarnis | 549 | NR_041746 | clade_430 | Y | N |
| Clostridium cadaveris | 562 | AB542932 | clade_430 | Y | N |
| Clostridium carboxidivorans | 563 | FR733710 | clade_430 | Y | N |
| Clostridium estertheticum | 580 | NR_042153 | clade_430 | Y | N |
| Clostridium fallax | 581 | NR_044714 | clade_430 | Y | N |
| Clostridium felsineum | 583 | AF270502 | clade_430 | Y | N |
| Clostridium frigidicarnis | 584 | NR_024919 | clade_430 | Y | N |
| Clostridium kluyveri | 598 | NR_074165 | clade_430 | Y | N |
| Clostridium magnum | 603 | X77835 | clade_430 | Y | N |
| Clostridium putrefaciens | 615 | NR_024995 | clade_430 | Y | N |
| Clostridium sp. HPB_46 | 629 | AY862516 | clade_430 | Y | N |
| Clostridium tyrobutyricum | 656 | NR_044718 | clade_430 | Y | N |
| Sutterella parvirubra | 1899 | AB300989 | clade_432 | Y | N |
| Acetanaerobacterium elongatum | 4 | NR_042930 | clade_439 | Y | N |
| Clostridium cellulosi | 567 | NR_044624 | clade_439 | Y | N |
| Ethanoligenens harbinense | 832 | AY675965 | clade_439 | Y | N |
| Eubacterium rectale | 856 | FP929042 | clade_444 | Y | N |
| Eubacterium sp. oral clone GI038 | 865 | AY349374 | clade_444 | Y | N |
| Lachnobacterium bovis | 1045 | GU324407 | clade_444 | Y | N |
| Roseburia cecicola | 1634 | GU233441 | clade_444 | Y | N |
| Roseburia faecalis | 1635 | AY804149 | clade_444 | Y | N |
| Roseburia faecis | 1636 | AY305310 | clade_444 | Y | N |
| Roseburia hominis | 1637 | AJ270482 | clade_444 | Y | N |
| Roseburia intestinalis | 1638 | FP929050 | clade_444 | Y | N |
| Roseburia inulinivorans | 1639 | AJ270473 | clade_444 | Y | N |
| Brevibacillus brevis | 410 | NR_041524 | clade_448 | Y | N |
| Brevibacillus laterosporus | 414 | NR_037005 | clade_448 | Y | N |
| Bacillus coagulans | 206 | DQ297928 | clade_451 | Y | OP |
| Sporolactobacillus inulinus | 1752 | NR_040962 | clade_451 | Y | N |
| Kocuria palustris | 1041 | EU333884 | clade_453 | Y | N |
| Nocardia farcinica | 1353 | NC_006361 | clade_455 | Y | N |
| Bacillus sp. oral taxon F28 | 247 | HM099650 | clade_456 | Y | OP |
| Catenibacterium mitsuokai | 495 | AB030224 | clade_469 | Y | N |
| Clostridium sp. TM_40 | 640 | AB249652 | clade_469 | Y | N |
| Coprobacillus cateniformis | 670 | AB030218 | clade_469 | Y | N |
| Coprobacillus sp. 29_1 | 671 | ADKX01000057 | clade_469 | Y | N |
| Clostridium rectum | 618 | NR_029271 | clade_470 | Y | N |
| Eubacterium nodatum | 854 | U13041 | clade_476 | Y | N |
| Eubacterium saphenum | 859 | NR_026031 | clade_476 | Y | N |
| Eubacterium sp. oral clone JH012 | 867 | AY349373 | clade_476 | Y | N |
| Eubacterium sp. oral clone JS001 | 870 | AY349378 | clade_476 | Y | N |
| Faecalibacterium prausnitzii | 880 | ACOP02000011 | clade_478 | Y | N |
| Gemmiger formicilis | 932 | GU562446 | clade_478 | Y | N |
| Subdoligranulum variabile | 1896 | AJ518869 | clade_478 | Y | N |
| Clostridiaceae bacterium JC13 | 532 | JF824807 | clade_479 | Y | N |
| Clostridium sp. MLG055 | 634 | AF304435 | clade_479 | Y | N |
| Erysipelotrichaceae bacterium 3_1_53 | 822 | ACTJ01000113 | clade_479 | Y | N |
| Clostridium cocleatum | 575 | NR_026495 | clade_481 | Y | N |
| Clostridium ramosum | 617 | M23731 | clade_481 | Y | N |
| Clostridium saccharogumia | 619 | DQ100445 | clade_481 | Y | N |
| Clostridium spiroforme | 644 | X73441 | clade_481 | Y | N |
| Coprobacillus sp. D7 | 672 | ACDT01000199 | clade_481 | Y | N |
| Clostridiales bacterium SY8519 | 535 | AB477431 | clade_482 | Y | N |
| Clostridium sp. SY8519 | 639 | AP012212 | clade_482 | Y | N |
| Eubacterium ramulus | 855 | AJ011522 | clade_482 | Y | N |
| Erysipelothrix inopinata | 819 | NR_025594 | clade_485 | Y | N |
| Erysipelothrix rhusiopathiae | 820 | ACLK01000021 | clade_485 | Y | N |
| Erysipelothrix tonsillarum | 821 | NR_040871 | clade_485 | Y | N |
| Holdemania filiformis | 1004 | Y11466 | clade_485 | Y | N |
| Mollicutes bacterium pACH93 | 1258 | AY297808 | clade_485 | Y | N |
| Coxiella burnetii | 736 | CP000890 | clade_486 | Y | Category-B |
| Clostridium hiranonis | 591 | AB023970 | clade_487 | Y | N |
| Clostridium irregulare | 596 | NR_029249 | clade_487 | Y | N |
| Clostridium orbiscindens | 609 | Y18187 | clade_494 | Y | N |
| Clostridium sp. NML 04A032 | 637 | EU815224 | clade_494 | Y | N |
| Flavonifractor plautii | 886 | AY724678 | clade_494 | Y | N |
| Pseudoflavonifractor capillosus | 1591 | AY136666 | clade_494 | Y | N |
| Ruminococcaceae bacterium D16 | 1655 | ADDX01000083 | clade_494 | Y | N |
| Acetivibrio cellulolyticus | 5 | NR_025917 | clade_495 | Y | N |
| Clostridium aldrichii | 548 | NR_026099 | clade_495 | Y | N |
| Clostridium clariflavum | 570 | NR_041235 | clade_495 | Y | N |
| Clostridium stercorarium | 647 | NR_025100 | clade_495 | Y | N |
| Clostridium straminisolvens | 649 | NR_024829 | clade_495 | Y | N |
| Clostridium thermocellum | 655 | NR_074629 | clade_495 | Y | N |
| Fusobacterium nucleatum | 901 | ADVK01000034 | clade_497 | Y | N |
| Eubacterium barkeri | 834 | NR_044661 | clade_512 | Y | N |
| Eubacterium callanderi | 838 | NR_026330 | clade_512 | Y | N |
| Eubacterium limosum | 850 | CP002273 | clade_512 | Y | N |
| Anaerotruncus colihominis | 164 | ABGD02000021 | clade_516 | Y | N |
| Clostridium methylpentosum | 606 | ACEC01000059 | clade_516 | Y | N |
| Clostridium sp. YIT 12070 | 642 | AB491208 | clade_516 | Y | N |
| Hydrogenoanaerobacterium saccharovorans | 1005 | NR_044425 | clade_516 | Y | N |
| Ruminococcus albus | 1656 | AY445600 | clade_516 | Y | N |
| Ruminococcus flavefaciens | 1660 | NR_025931 | clade_516 | Y | N |
| Clostridium haemolyticum | 589 | NR_024749 | clade_517 | Y | N |
| Clostridium novyi | 608 | NR_074343 | clade_517 | Y | N |
| Clostridium sp. LMG 16094 | 632 | X95274 | clade_517 | Y | N |
| Eubacterium ventriosum | 874 | L34421 | clade_519 | Y | N |
| Bacteroides galacturonicus | 280 | DQ497994 | clade_522 | Y | N |
| Eubacterium eligens | 845 | CP001104 | clade_522 | Y | N |
| Lachnospira multipara | 1046 | FR733699 | clade_522 | Y | N |
| Lachnospira pectinoschiza | 1047 | L14675 | clade_522 | Y | N |
| Lactobacillus rogosae | 1114 | GU269544 | clade_522 | Y | N |
| Bacillus horti | 214 | NR_036860 | clade_527 | Y | OP |
| Bacillus sp. 9_3AIA | 232 | FN397519 | clade_527 | Y | OP |
| Eubacterium brachy | 836 | U13038 | clade_533 | Y | N |
| Filifactor alocis | 881 | CP002390 | clade_533 | Y | N |
| Filifactor villosus | 882 | NR_041928 | clade_533 | Y | N |
| Clostridium leptum | 601 | AJ305238 | clade_537 | Y | N |
| Clostridium sp. YIT 12069 | 641 | AB491207 | clade_537 | Y | N |
| Clostridium sporosphaeroides | 646 | NR_044835 | clade_537 | Y | N |
| Eubacterium coprostanoligenes | 841 | HM037995 | clade_537 | Y | N |
| Ruminococcus bromii | 1657 | EU266549 | clade_537 | Y | N |
| Eubacterium siraeum | 860 | ABCA03000054 | clade_538 | Y | N |
| Clostridium viride | 657 | NR_026204 | clade_540 | Y | N |
| Oscillibacter sp. G2 | 1386 | HM626173 | clade_540 | Y | N |
| Oscillibacter valericigenes | 1387 | NR_074793 | clade_540 | Y | N |
| Oscillospira guilliermondii | 1388 | AB040495 | clade_540 | Y | N |
| Butyrivibrio crossotus | 455 | ABWN01000012 | clade_543 | Y | N |
| Clostridium sp. L2_50 | 631 | AAYW02000018 | clade_543 | Y | N |
| Coprococcus eutactus | 675 | EF031543 | clade_543 | Y | N |
| Coprococcus sp. ART55_1 | 676 | AY350746 | clade_543 | Y | N |
| Eubacterium ruminantium | 857 | NR_024661 | clade_543 | Y | N |
| Collinsella aerofaciens | 659 | AAVN02000007 | clade_553 | Y | N |
| Alkaliphilus metalliredigenes | 137 | AY137848 | clade_554 | Y | N |
| Alkaliphilus oremlandii | 138 | NR_043674 | clade_554 | Y | N |
| Clostridium sticklandii | 648 | L04167 | clade_554 | Y | N |
| Turicibacter sanguinis | 1965 | AF349724 | clade_555 | Y | N |
| Fulvimonas sp. NML 060897 | 892 | EF589680 | clade_557 | Y | N |
| Desulfitobacterium frappieri | 753 | AJ276701 | clade_560 | Y | N |
| Desulfitobacterium hafniense | 754 | NR_074996 | clade_560 | Y | N |
| Desulfotomaculum nigrificans | 756 | NR_044832 | clade_560 | Y | N |
| Lutispora thermophila | 1191 | NR_041236 | clade_564 | Y | N |
| Brachyspira pilosicoli | 405 | NR_075069 | clade_565 | Y | N |
| Eggerthella lenta | 778 | AF292375 | clade_566 | Y | N |
| Streptomyces albus | 1888 | AJ697941 | clade_566 | Y | N |
| Chlamydiales bacterium NS11 | 505 | JN606074 | clade_567 | Y | N |
| Anaerofustis stercorihominis | 159 | ABIL02000005 | clade_570 | Y | N |
| Butyricicoccus pullicaecorum | 453 | HH793440 | clade_572 | Y | N |
| Eubacterium desmolans | 843 | NR_044644 | clade_572 | Y | N |
| Papillibacter cinnamivorans | 1415 | NR_025025 | clade_572 | Y | N |
| Sporobacter termitidis | 1751 | NR_044972 | clade_572 | Y | N |
| Deferribacteres sp. oral clone JV006 | 744 | AY349371 | clade_575 | Y | N |
| Clostridium colinum | 577 | NR_026151 | clade_576 | Y | N |
| Clostridium lactatifermentans | 599 | NR_025651 | clade_576 | Y | N |
| Clostridium piliforme | 614 | D14639 | clade_576 | Y | N |
| Saccharomonospora viridis | 1671 | X54286 | clade_579 | Y | N |
| Thermobifida fusca | 1921 | NC_007333 | clade_579 | Y | N |
| Leptospira licerasiae | 1164 | EF612284 | clade_585 | Y | OP |
| Moorella thermoacetica | 1259 | NR_075001 | clade_590 | Y | N |
| Thermoanaerobacter pseudethanolicus | 1920 | CP000924 | clade_590 | Y | N |
| Flexistipes sinusarabici | 888 | NR_074881 | clade_591 | Y | N |
| Gloeobacter violaceus | 942 | NR_074282 | clade_596 | Y | N |
| Eubacterium sp. oral clone JN088 | 869 | AY349377 | clade_90 | Y | N |
| Clostridium oroticum | 610 | FR749922 | clade_96 | Y | N |
| Clostridium sp. D5 | 627 | ADBG01000142 | clade_96 | Y | N |
| Eubacterium contortum | 840 | FR749946 | clade_96 | Y | N |
| Eubacterium fissicatena | 846 | FR749935 | clade_96 | Y | N |
| Corynebacterium coyleae | 692 | X96497 | clade_100 | N | N |
| Corynebacterium mucifaciens | 711 | NR_026396 | clade_100 | N | N |
| Corynebacterium ureicelerivorans | 733 | AM397636 | clade_100 | N | N |
| Corynebacterium appendicis | 684 | NR_028951 | clade_102 | N | N |
| Corynebacterium genitalium | 698 | ACLJ01000031 | clade_102 | N | N |
| Corynebacterium glaucum | 699 | NR_028971 | clade_102 | N | N |
| Corynebacterium imitans | 703 | AF537597 | clade_102 | N | N |
| Corynebacterium riegelii | 719 | EU848548 | clade_102 | N | N |
| Corynebacterium sp. L_2012475 | 723 | HE575405 | clade_102 | N | N |
| Corynebacterium sp. NML 93_0481 | 724 | GU238409 | clade_102 | N | N |
| Corynebacterium sundsvallense | 728 | Y09655 | clade_102 | N | N |
| Corynebacterium tuscaniae | 730 | AY677186 | clade_102 | N | N |
| Prevotella maculosa | 1504 | AGEK01000035 | clade_104 | N | N |
| Prevotella oris | 1513 | ADDV01000091 | clade_104 | N | N |
| Prevotella salivae | 1517 | AB108826 | clade_104 | N | N |
| Prevotella sp. ICM55 | 1521 | HQ616399 | clade_104 | N | N |
| Prevotella sp. oral clone AA020 | 1528 | AY005057 | clade_104 | N | N |
| Prevotella sp. oral clone GI032 | 1538 | AY349396 | clade_104 | N | N |
| Prevotella sp. oral taxon G70 | 1558 | GU432179 | clade_104 | N | N |
| Prevotella corporis | 1491 | L16465 | clade_105 | N | N |
| Bacteroides sp. 4_1_36 | 312 | ACTC01000133 | clade_110 | N | N |
| Bacteroides sp. AR20 | 315 | AF139524 | clade_110 | N | N |
| Bacteroides sp. D20 | 319 | ACPT01000052 | clade_110 | N | N |
| Bacteroides sp. F_4 | 322 | AB470322 | clade_110 | N | N |
| Bacteroides uniformis | 329 | AB050110 | clade_110 | N | N |
| Prevotella nanceiensis | 1510 | JN867228 | clade_127 | N | N |
| Prevotella sp. oral taxon 299 | 1548 | ACWZ01000026 | clade_127 | N | N |
| Prevotella bergensis | 1485 | ACKS01000100 | clade_128 | N | N |
| Prevotella buccalis | 1489 | JN867261 | clade_129 | N | N |
| Prevotella timonensis | 1564 | ADEF01000012 | clade_129 | N | N |
| Prevotella oralis | 1512 | AEPE01000021 | clade_130 | N | N |
| Prevotella sp. SEQ072 | 1525 | JN867238 | clade_130 | N | N |
| Leuconostoc carnosum | 1177 | NR_040811 | clade_135 | N | N |
| Leuconostoc gasicomitatum | 1179 | FN822744 | clade_135 | N | N |
| Leuconostoc inhae | 1180 | NR_025204 | clade_135 | N | N |
| Leuconostoc kimchii | 1181 | NR_075014 | clade_135 | N | N |
| Edwardsiella tarda | 777 | CP002154 | clade_139 | N | N |
| Photorhabdus asymbiotica | 1466 | Z76752 | clade_139 | N | N |
| Psychrobacter arcticus | 1607 | CP000082 | clade_141 | N | N |
| Psychrobacter cibarius | 1608 | HQ698586 | clade_141 | N | N |
| Psychrobacter cryohalolentis | 1609 | CP000323 | clade_141 | N | N |
| Psychrobacter faecalis | 1610 | HQ698566 | clade_141 | N | N |
| Psychrobacter nivimaris | 1611 | HQ698587 | clade_141 | N | N |
| Psychrobacter pulmonis | 1612 | HQ698582 | clade_141 | N | N |
| Pseudomonas aeruginosa | 1592 | AABQ07000001 | clade_154 | N | N |
| Pseudomonas sp. 2_1_26 | 1600 | ACWU01000257 | clade_154 | N | N |
| Corynebacterium confusum | 691 | Y15886 | clade_158 | N | N |
| Corynebacterium propinquum | 712 | NR_037038 | clade_158 | N | N |
| Corynebacterium pseudodiphtheriticum | 713 | X84258 | clade_158 | N | N |
| Bartonella bacilliformis | 338 | NC_008783 | clade_159 | N | N |
| Bartonella grahamii | 339 | CP001562 | clade_159 | N | N |
| Bartonella henselae | 340 | NC_005956 | clade_159 | N | N |
| Bartonella quintana | 341 | BX897700 | clade_159 | N | N |
| Bartonella tamiae | 342 | EF672728 | clade_159 | N | N |
| Bartonella washoensis | 343 | FJ719017 | clade_159 | N | N |
| Brucella abortus | 430 | ACBJ01000075 | clade_159 | N | Category-B |
| Brucella canis | 431 | NR_044652 | clade_159 | N | Category-B |
| Brucella ceti | 432 | ACJD01000006 | clade_159 | N | Category-B |
| Brucella melitensis | 433 | AE009462 | clade_159 | N | Category-B |
| Brucella microti | 434 | NR_042549 | clade_159 | N | Category-B |
| Brucella ovis | 435 | NC_009504 | clade_159 | N | Category-B |
| Brucella sp. 83_13 | 436 | ACBQ01000040 | clade_159 | N | Category-B |
| Brucella sp. BO1 | 437 | EU053207 | clade_159 | N | Category-B |
| Brucella suis | 438 | ACBK01000034 | clade_159 | N | Category-B |
| Ochrobactrum anthropi | 1360 | NC_009667 | clade_159 | N | N |
| Ochrobactrum intermedium | 1361 | ACQA01000001 | clade_159 | N | N |
| Ochrobactrum pseudintermedium | 1362 | DQ365921 | clade_159 | N | N |
| Prevotella genomosp. C2 | 1496 | AY278625 | clade_164 | N | N |
| Prevotella multisaccharivorax | 1509 | AFJE01000016 | clade_164 | N | N |
| Prevotella sp. oral clone IDR_CEC_0055 | 1543 | AY550997 | clade_164 | N | N |
| Prevotella sp. oral taxon 292 | 1547 | GQ422735 | clade_164 | N | N |
| Prevotella sp. oral taxon 300 | 1549 | GU409549 | clade_164 | N | N |
| Prevotella marshii | 1505 | AEEI01000070 | clade_166 | N | N |
| Prevotella sp. oral clone IK053 | 1544 | AY349401 | clade_166 | N | N |
| Prevotella sp. oral taxon 781 | 1554 | GQ422744 | clade_166 | N | N |
| Prevotella stercorea | 1562 | AB244774 | clade_166 | N | N |
| Prevotella brevis | 1487 | NR_041954 | clade_167 | N | N |
| Prevotella ruminicola | 1516 | CP002006 | clade_167 | N | N |
| Prevotella sp. sp24 | 1560 | AB003384 | clade_167 | N | N |
| Prevotella sp. sp34 | 1561 | AB003385 | clade_167 | N | N |
| Prevotella albensis | 1483 | NR_025300 | clade_168 | N | N |
| Prevotella copri | 1490 | ACBX02000014 | clade_168 | N | N |
| Prevotella oulorum | 1514 | L16472 | clade_168 | N | N |
| Prevotella sp. BI_42 | 1518 | AJ581354 | clade_168 | N | N |
| Prevotella sp. oral clone P4PB_83 P2 | 1546 | AY207050 | clade_168 | N | N |
| Prevotella sp. oral taxon G60 | 1557 | GU432133 | clade_168 | N | N |
| Prevotella amnii | 1484 | AB547670 | clade_169 | N | N |
| Bacteroides caccae | 268 | EU136686 | clade_170 | N | N |
| Bacteroides finegoldii | 277 | AB222699 | clade_170 | N | N |
| Bacteroides intestinalis | 283 | ABJL02000006 | clade_171 | N | N |
| Bacteroides sp. XB44A | 326 | AM230649 | clade_171 | N | N |
| Bifidobacteriaceae genomosp. C1 | 345 | AY278612 | clade_172 | N | N |
| Bifidobacterium adolescentis | 346 | AAXD02000018 | clade_172 | N | N |
| Bifidobacterium angulatum | 347 | ABYS02000004 | clade_172 | N | N |
| Bifidobacterium animalis | 348 | CP001606 | clade_172 | N | N |
| Bifidobacterium breve | 350 | CP002743 | clade_172 | N | N |
| Bifidobacterium catenulatum | 351 | ABXY01000019 | clade_172 | N | N |
| Bifidobacterium dentium | 352 | CP001750 | clade_172 | N | OP |
| Bifidobacterium gallicum | 353 | ABXB03000004 | clade_172 | N | N |
| Bifidobacterium infantis | 354 | AY151398 | clade_172 | N | N |
| Bifidobacterium kashiwanohense | 355 | AB491757 | clade_172 | N | N |
| Bifidobacterium longum | 356 | ABQQ01000041 | clade_172 | N | N |
| Bifidobacterium pseudocatenulatum | 357 | ABXX02000002 | clade_172 | N | N |
| Bifidobacterium pseudolongum | 358 | NR_043442 | clade_172 | N | N |
| Bifidobacterium scardovii | 359 | AJ307005 | clade_172 | N | N |
| Bifidobacterium sp. HM2 | 360 | AB425276 | clade_172 | N | N |
| Bifidobacterium sp. HMLN12 | 361 | JF519685 | clade_172 | N | N |
| Bifidobacterium sp. M45 | 362 | HM626176 | clade_172 | N | N |
| Bifidobacterium sp. MSX5B | 363 | HQ616382 | clade_172 | N | N |
| Bifidobacterium sp. TM_7 | 364 | AB218972 | clade_172 | N | N |
| Bifidobacterium thermophilum | 365 | DQ340557 | clade_172 | N | N |
| Leuconostoc citreum | 1178 | AM157444 | clade_175 | N | N |
| Leuconostoc lactis | 1182 | NR_040823 | clade_175 | N | N |
| Alicyclobacillus acidoterrestris | 123 | NR_040844 | clade_179 | N | N |
| Alicyclobacillus cycloheptanicus | 125 | NR_024754 | clade_179 | N | N |
| Acinetobacter baumannii | 27 | ACYQ01000014 | clade_181 | N | N |
| Acinetobacter calcoaceticus | 28 | AM157426 | clade_181 | N | N |
| Acinetobacter genomosp. C1 | 29 | AY278636 | clade_181 | N | N |
| Acinetobacter haemolyticus | 30 | ADMT01000017 | clade_181 | N | N |
| Acinetobacter johnsonii | 31 | ACPL01000162 | clade_181 | N | N |
| Acinetobacter junii | 32 | ACPM01000135 | clade_181 | N | N |
| Acinetobacter lwoffii | 33 | ACPN01000204 | clade_181 | N | N |
| Acinetobacter parvus | 34 | AIEB01000124 | clade_181 | N | N |
| Acinetobacter schindleri | 36 | NR_025412 | clade_181 | N | N |
| Acinetobacter sp. 56A1 | 37 | GQ178049 | clade_181 | N | N |
| Acinetobacter sp. CIP 101934 | 38 | JQ638573 | clade_181 | N | N |
| Acinetobacter sp. CIP 102143 | 39 | JQ638578 | clade_181 | N | N |
| Acinetobacter sp. M16_22 | 41 | HM366447 | clade_181 | N | N |
| Acinetobacter sp. RUH2624 | 42 | ACQF01000094 | clade_181 | N | N |
| Acinetobacter sp. SH024 | 43 | ADCH01000068 | clade_181 | N | N |
| Lactobacillus jensenii | 1092 | ACQD01000066 | clade_182 | N | N |
| Alcaligenes faecalis | 119 | AB680368 | clade_183 | N | N |
| Alcaligenes sp. CO14 | 120 | DQ643040 | clade_183 | N | N |
| Alcaligenes sp. S3 | 121 | HQ262549 | clade_183 | N | N |
| Oligella ureolytica | 1366 | NR_041998 | clade_183 | N | N |
| Oligella urethralis | 1367 | NR_041753 | clade_183 | N | N |
| Eikenella corrodens | 784 | ACEA01000028 | clade_185 | N | N |
| Kingella denitrificans | 1019 | AEWV01000047 | clade_185 | N | N |
| Kingella genomosp. P1 oral cone MB2_C20 | 1020 | DQ003616 | clade_185 | N | N |
| Kingella kingae | 1021 | AFHS01000073 | clade_185 | N | N |
| Kingella oralis | 1022 | ACJW02000005 | clade_185 | N | N |
| Kingella sp. oral clone ID059 | 1023 | AY349381 | clade_185 | N | N |
| Neisseria elongata | 1330 | ADBF01000003 | clade_185 | N | N |
| Neisseria genomosp. P2 oral clone MB5_P15 | 1332 | DQ003630 | clade_185 | N | N |
| Neisseria sp. oral clone JC012 | 1345 | AY349388 | clade_185 | N | N |
| Neisseria sp. SMC_A9199 | 1342 | FJ763637 | clade_185 | N | N |
| Simonsiella muelleri | 1731 | ADCY01000105 | clade_185 | N | N |
| Corynebacterium glucuronolyticum | 700 | ABYP01000081 | clade_193 | N | N |
| Corynebacterium pyruviciproducens | 716 | FJ185225 | clade_193 | N | N |
| Rothia aeria | 1649 | DQ673320 | clade_194 | N | N |
| Rothia dentocariosa | 1650 | ADDW01000024 | clade_194 | N | N |
| Rothia sp. oral taxon 188 | 1653 | GU470892 | clade_194 | N | N |
| Corynebacterium accolens | 681 | ACGD01000048 | clade_195 | N | N |
| Corynebacterium macginleyi | 707 | AB359393 | clade_195 | N | N |
| Corynebacterium pseudogenitalium | 714 | ABYQ01000237 | clade_195 | N | N |
| Corynebacterium tuberculostearicum | 729 | ACVP01000009 | clade_195 | N | N |
| Lactobacillus casei | 1074 | CP000423 | clade_198 | N | N |
| Lactobacillus paracasei | 1106 | ABQV01000067 | clade_198 | N | N |
| Lactobacillus zeae | 1143 | NR_037122 | clade_198 | N | N |
| Prevotella dentalis | 1492 | AB547678 | clade_205 | N | N |
| Prevotella sp. oral clone ASCG10 | 1529 | AY923148 | clade_206 | N | N |
| Prevotella sp. oral clone HF050 | 1541 | AY349399 | clade_206 | N | N |
| Prevotella sp. oral clone ID019 | 1542 | AY349400 | clade_206 | N | N |
| Prevotella sp. oral clone IK062 | 1545 | AY349402 | clade_206 | N | N |
| Prevotella genomosp. P9 oral clone MB7_G16 | 1499 | DQ003633 | clade_207 | N | N |
| Prevotella sp. oral clone AU069 | 1531 | AY005062 | clade_207 | N | N |
| Prevotella sp. oral clone CY006 | 1532 | AY005063 | clade_207 | N | N |
| Prevotella sp. oral clone FL019 | 1534 | AY349392 | clade_207 | N | N |
| Actinomyces genomosp. C1 | 56 | AY278610 | clade_212 | N | N |
| Actinomyces genomosp. C2 | 57 | AY278611 | clade_212 | N | N |
| Actinomyces genomosp. P1 oral clone MB6_C03 | 58 | DQ003632 | clade_212 | N | N |
| Actinomyces georgiae | 59 | GU561319 | clade_212 | N | N |
| Actinomyces israelii | 60 | AF479270 | clade_212 | N | N |
| Actinomyces massiliensis | 61 | AB545934 | clade_212 | N | N |
| Actinomyces meyeri | 62 | GU561321 | clade_212 | N | N |
| Actinomyces odontolyticus | 66 | ACYT01000123 | clade_212 | N | N |
| Actinomyces orihominis | 68 | AJ575186 | clade_212 | N | N |
| Actinomyces sp. CCUG 37290 | 71 | AJ234058 | clade_212 | N | N |
| Actinomyces sp. ICM34 | 75 | HQ616391 | clade_212 | N | N |
| Actinomyces sp. ICM41 | 76 | HQ616392 | clade_212 | N | N |
| Actinomyces sp. ICM47 | 77 | HQ616395 | clade_212 | N | N |
| Actinomyces sp. ICM54 | 78 | HQ616398 | clade_212 | N | N |
| Actinomyces sp. oral clone IP081 | 87 | AY349366 | clade_212 | N | N |
| Actinomyces sp. oral taxon 178 | 91 | AEUH01000060 | clade_212 | N | N |
| Actinomyces sp. oral taxon 180 | 92 | AEPP01000041 | clade_212 | N | N |
| Actinomyces sp. TeJ5 | 80 | GU561315 | clade_212 | N | N |
| Haematobacter sp. BC14248 | 968 | GU396991 | clade_213 | N | N |
| Paracoccus denitrificans | 1424 | CP000490 | clade_213 | N | N |
| Paracoccus marcusii | 1425 | NR_044922 | clade_213 | N | N |
| Grimontia hollisae | 967 | ADAQ01000013 | clade_216 | N | N |
| Shewanella putrefaciens | 1723 | CP002457 | clade_216 | N | N |
| Afipia genomosp. 4 | 111 | EU117385 | clade_217 | N | N |
| Rhodopseudomonas palustris | 1626 | CP000301 | clade_217 | N | N |
| Methylobacterium extorquens | 1223 | NC_010172 | clade_218 | N | N |
| Methylobacterium podarium | 1224 | AY468363 | clade_218 | N | N |
| Methylobacterium radiotolerans | 1225 | GU294320 | clade_218 | N | N |
| Methylobacterium sp. 1sub | 1226 | AY468371 | clade_218 | N | N |
| Methylobacterium sp. MM4 | 1227 | AY468370 | clade_218 | N | N |
| Achromobacter denitrificans | 18 | NR_042021 | clade_224 | N | N |
| Achromobacter piechaudii | 19 | ADMS01000149 | clade_224 | N | N |
| Achromobacter xylosoxidans | 20 | ACRC01000072 | clade_224 | N | N |
| Bordetella bronchiseptica | 384 | NR_025949 | clade_224 | N | OP |
| Bordetella holmesii | 385 | AB683187 | clade_224 | N | OP |
| Bordetella parapertussis | 386 | NR_025950 | clade_224 | N | OP |
| Bordetella pertussis | 387 | BX640418 | clade_224 | N | OP |
| Microbacterium chocolatum | 1230 | NR_037045 | clade_225 | N | N |
| Microbacterium flavescens | 1231 | EU714363 | clade_225 | N | N |
| Microbacterium lacticum | 1233 | EU714351 | clade_225 | N | N |
| Microbacterium oleivorans | 1234 | EU714381 | clade_225 | N | N |
| Microbacterium oxydans | 1235 | EU714348 | clade_225 | N | N |
| Microbacterium paraoxydans | 1236 | AJ491806 | clade_225 | N | N |
| Microbacterium phyllosphaerae | 1237 | EU714359 | clade_225 | N | N |
| Microbacterium schleiferi | 1238 | NR_044936 | clade_225 | N | N |
| Microbacterium sp. 768 | 1239 | EU714378 | clade_225 | N | N |
| Microbacterium sp. oral strain C24KA | 1240 | AF287752 | clade_225 | N | N |
| Microbacterium testaceum | 1241 | EU714365 | clade_225 | N | N |
| Corynebacterium atypicum | 686 | NR_025540 | clade_229 | N | N |
| Corynebacterium mastitidis | 708 | AB359395 | clade_229 | N | N |
| Corynebacterium sp. NML 97_0186 | 725 | GU238411 | clade_229 | N | N |
| Mycobacterium elephantis | 1275 | AF385898 | clade_237 | N | OP |
| Mycobacterium paraterrae | 1288 | EU919229 | clade_237 | N | OP |
| Mycobacterium phlei | 1289 | GU142920 | clade_237 | N | OP |
| Mycobacterium sp. 1776 | 1293 | EU703152 | clade_237 | N | N |
| Mycobacterium sp. 1781 | 1294 | EU703147 | clade_237 | N | N |
| Mycobacterium sp. AQ1GA4 | 1297 | HM210417 | clade_237 | N | N |
| Mycobacterium sp. GN_10546 | 1299 | FJ497243 | clade_237 | N | N |
| Mycobacterium sp. GN_10827 | 1300 | FJ497247 | clade_237 | N | N |
| Mycobacterium sp. GN_11124 | 1301 | FJ652846 | clade_237 | N | N |
| Mycobacterium sp. GN_9188 | 1302 | FJ497240 | clade_237 | N | N |
| Mycobacterium sp. GR_2007_210 | 1303 | FJ555538 | clade_237 | N | N |
| Anoxybacillus contaminans | 172 | NR_029006 | clade_238 | N | N |
| Bacillus aeolius | 195 | NR_025557 | clade_238 | N | N |
| Brevibacterium frigoritolerans | 422 | NR_042639 | clade_238 | N | N |
| Geobacillus sp. E263 | 934 | DQ647387 | clade_238 | N | N |
| Geobacillus sp. WCH70 | 935 | CP001638 | clade_238 | N | N |
| Geobacillus thermocatenulatus | 937 | NR_043020 | clade_238 | N | N |
| Geobacillus thermoleovorans | 940 | NR_074931 | clade_238 | N | N |
| Lysinibacillus fusiformis | 1192 | FN397522 | clade_238 | N | N |
| Planomicrobium koreense | 1468 | NR_025011 | clade_238 | N | N |
| Sporosarcina newyorkensis | 1754 | AFPZ01000142 | clade_238 | N | N |
| Sporosarcina sp. 2681 | 1755 | GU994081 | clade_238 | N | N |
| Ureibacillus composti | 1968 | NR_043746 | clade_238 | N | N |
| Ureibacillus suwonensis | 1969 | NR_043232 | clade_238 | N | N |
| Ureibacillus terrenus | 1970 | NR_025394 | clade_238 | N | N |
| Ureibacillus thermophilus | 1971 | NR_043747 | clade_238 | N | N |
| Ureibacillus thermosphaericus | 1972 | NR_040961 | clade_238 | N | N |
| Prevotella micans | 1507 | AGWK01000061 | clade_239 | N | N |
| Prevotella sp. oral clone DA058 | 1533 | AY005065 | clade_239 | N | N |
| Prevotella sp. SEQ053 | 1523 | JN867222 | clade_239 | N | N |
| Treponema socranskii | 1937 | NR_024868 | clade_240 | N | OP |
| Treponema sp. 6:H:D15A_4 | 1938 | AY005083 | clade_240 | N | N |
| Treponema sp. oral taxon 265 | 1953 | GU408850 | clade_240 | N | N |
| Treponema sp. oral taxon G85 | 1958 | GU432215 | clade_240 | N | N |
| Porphyromonas endodontalis | 1472 | ACNN01000021 | clade_241 | N | N |
| Porphyromonas sp. oral clone BB134 | 1478 | AY005068 | clade_241 | N | N |
| Porphyromonas sp. oral clone F016 | 1479 | AY005069 | clade_241 | N | N |
| Porphyromonas sp. oral clone P2PB_52 P1 | 1480 | AY207054 | clade_241 | N | N |
| Porphyromonas sp. oral clone P4GB_100 P2 | 1481 | AY207057 | clade_241 | N | N |
| Acidovorax sp. 98_63833 | 26 | AY258065 | clade_245 | N | N |
| Comamonadaceae bacterium NML000135 | 663 | JN585335 | clade_245 | N | N |
| Comamonadaceae bacterium NML790751 | 664 | JN585331 | clade_245 | N | N |
| Comamonadaceae bacterium NML910035 | 665 | JN585332 | clade_245 | N | N |
| Comamonadaceae bacterium NML910036 | 666 | JN585333 | clade_245 | N | N |
| Comamonas sp. NSP5 | 668 | AB076850 | clade_245 | N | N |
| Delftia acidovorans | 748 | CP000884 | clade_245 | N | N |
| Xenophilus aerolatus | 2018 | JN585329 | clade_245 | N | N |
| Oribacterium sp. oral taxon 078 | 1380 | ACIQ02000009 | clade_246 | N | N |
| Oribacterium sp. oral taxon 102 | 1381 | GQ422713 | clade_246 | N | N |
| Weissella cibaria | 2007 | NR_036924 | clade_247 | N | N |
| Weissella confusa | 2008 | NR_040816 | clade_247 | N | N |
| Weissella hellenica | 2009 | AB680902 | clade_247 | N | N |
| Weissella kandleri | 2010 | NR_044659 | clade_247 | N | N |
| Weissella koreensis | 2011 | NR_075058 | clade_247 | N | N |
| Weissella paramesenteroides | 2012 | ACKU01000017 | clade_247 | N | N |
| Weissella sp. KLDS 7.0701 | 2013 | EU600924 | clade_247 | N | N |
| Mobiluncus curtisii | 1251 | AEPZ01000013 | clade_249 | N | N |
| Enhydrobacter aerosaccus | 785 | ACYI01000081 | clade_256 | N | N |
| Moraxella osloensis | 1262 | JN175341 | clade_256 | N | N |
| Moraxella sp. GM2 | 1264 | JF837191 | clade_256 | N | N |
| Brevibacterium casei | 420 | JF951998 | clade_257 | N | N |
| Brevibacterium epidermidis | 421 | NR_029262 | clade_257 | N | N |
| Brevibacterium sanguinis | 426 | NR_028016 | clade_257 | N | N |
| Brevibacterium sp. H15 | 427 | AB177640 | clade_257 | N | N |
| Acinetobacter radioresistens | 35 | ACVR01000010 | clade_261 | N | N |
| Lactobacillus alimentarius | 1068 | NR_044701 | clade_263 | N | N |
| Lactobacillus farciminis | 1082 | NR_044707 | clade_263 | N | N |
| Lactobacillus kimchii | 1097 | NR_025045 | clade_263 | N | N |
| Lactobacillus nodensis | 1101 | NR_041629 | clade_263 | N | N |
| Lactobacillus tucceti | 1138 | NR_042194 | clade_263 | N | N |
| Pseudomonas mendocina | 1595 | AAUL01000021 | clade_265 | N | N |
| Pseudomonas pseudoalcaligenes | 1598 | NR_037000 | clade_265 | N | N |
| Pseudomonas sp. NP522b | 1602 | EU723211 | clade_265 | N | N |
| Pseudomonas stutzeri | 1603 | AM905854 | clade_265 | N | N |
| Paenibacillus barcinonensis | 1390 | NR_042272 | clade_270 | N | N |
| Paenibacillus barengoltzii | 1391 | NR_042756 | clade_270 | N | N |
| Paenibacillus chibensis | 1392 | NR_040885 | clade_270 | N | N |
| Paenibacillus cookii | 1393 | NR_025372 | clade_270 | N | N |
| Paenibacillus durus | 1394 | NR_037017 | clade_270 | N | N |
| Paenibacillus glucanolyticus | 1395 | D78470 | clade_270 | N | N |
| Paenibacillus lactis | 1396 | NR_025739 | clade_270 | N | N |
| Paenibacillus pabuli | 1398 | NR_040853 | clade_270 | N | N |
| Paenibacillus popilliae | 1400 | NR_040888 | clade_270 | N | N |
| Paenibacillus sp. CIP 101062 | 1401 | HM212646 | clade_270 | N | N |
| Paenibacillus sp. JC66 | 1404 | JF824808 | clade_270 | N | N |
| Paenibacillus sp. R_27413 | 1405 | HE586333 | clade_270 | N | N |
| Paenibacillus sp. R_27422 | 1406 | HE586338 | clade_270 | N | N |
| Paenibacillus timonensis | 1408 | NR_042844 | clade_270 | N | N |
| Rothia mucilaginosa | 1651 | ACVO01000020 | clade_271 | N | N |
| Rothia nasimurium | 1652 | NR_025310 | clade_271 | N | N |
| Prevotella sp. oral taxon 302 | 1550 | ACZK01000043 | clade_280 | N | N |
| Prevotella sp. oral taxon F68 | 1556 | HM099652 | clade_280 | N | N |
| Prevotella tannerae | 1563 | ACIJ02000018 | clade_280 | N | N |
| Prevotellaceae bacterium P4P_62 P1 | 1566 | AY207061 | clade_280 | N | N |
| Porphyromonas asaccharolytica | 1471 | AENO01000048 | clade_281 | N | N |
| Porphyromonas gingivalis | 1473 | AE015924 | clade_281 | N | N |
| Porphyromonas macacae | 1475 | NR_025908 | clade_281 | N | N |
| Porphyromonas sp. UQD 301 | 1477 | EU012301 | clade_281 | N | N |
| Porphyromonas uenonis | 1482 | ACLR01000152 | clade_281 | N | N |
| Leptotrichia buccalis | 1165 | CP001685 | clade_282 | N | N |
| Leptotrichia hofstadii | 1168 | ACVB02000032 | clade_282 | N | N |
| Leptotrichia sp. oral clone HE012 | 1173 | AY349386 | clade_282 | N | N |
| Leptotrichia sp. oral taxon 223 | 1176 | GU408547 | clade_282 | N | N |
| Bacteroides fluxus | 278 | AFBN01000029 | clade_285 | N | N |
| Bacteroides helcogenes | 281 | CP002352 | clade_285 | N | N |
| Parabacteroides johnsonii | 1419 | ABYH01000014 | clade_286 | N | N |
| Parabacteroides merdae | 1420 | EU136685 | clade_286 | N | N |
| Treponema denticola | 1926 | ADEC01000002 | clade_288 | N | OP |
| Treponema genomosp. P5 oral clone MB3_P23 | 1929 | DQ003624 | clade_288 | N | N |
| Treponema putidum | 1935 | AJ543428 | clade_288 | N | OP |
| Treponema sp. oral clone P2PB_53 P3 | 1942 | AY207055 | clade_288 | N | N |
| Treponema sp. oral taxon 247 | 1949 | GU408748 | clade_288 | N | N |
| Treponema sp. oral taxon 250 | 1950 | GU408776 | clade_288 | N | N |
| Treponema sp. oral taxon 251 | 1951 | GU408781 | clade_288 | N | N |
| Anaerococcus hydrogenalis | 144 | ABXA01000039 | clade_289 | N | N |
| Anaerococcus sp. 8404299 | 148 | HM587318 | clade_289 | N | N |
| Anaerococcus sp. gpac215 | 156 | AM176540 | clade_289 | N | N |
| Anaerococcus vaginalis | 158 | ACXU01000016 | clade_289 | N | N |
| Propionibacterium acidipropionici | 1569 | NC_019395 | clade_290 | N | N |
| Propionibacterium avidum | 1571 | AJ003055 | clade_290 | N | N |
| Propionibacterium granulosum | 1573 | FJ785716 | clade_290 | N | N |
| Propionibacterium jensenii | 1574 | NR_042269 | clade_290 | N | N |
| Propionibacterium propionicum | 1575 | NR_025277 | clade_290 | N | N |
| Propionibacterium sp. H456 | 1577 | AB177643 | clade_290 | N | N |
| Propionibacterium thoenii | 1581 | NR_042270 | clade_290 | N | N |
| Bifidobacterium bifidum | 349 | ABQP01000027 | clade_293 | N | N |
| Leuconostoc mesenteroides | 1183 | ACKV01000113 | clade_295 | N | N |
| Leuconostoc pseudomesenteroides | 1184 | NR_040814 | clade_295 | N | N |
| Johnsonella ignava | 1016 | X87152 | clade_298 | N | N |
| Propionibacterium acnes | 1570 | ADJM01000010 | clade_299 | N | N |
| Propionibacterium sp. 434_HC2 | 1576 | AFIL01000035 | clade_299 | N | N |
| Propionibacterium sp. LG | 1578 | AY354921 | clade_299 | N | N |
| Propionibacterium sp. S555a | 1579 | AB264622 | clade_299 | N | N |
| Alicyclobacillus sp. CCUG 53762 | 128 | HE613268 | clade_301 | N | N |
| Actinomyces cardiffensis | 53 | GU470888 | clade_303 | N | N |
| Actinomyces funkei | 55 | HQ906497 | clade_303 | N | N |
| Actinomyces sp. HKU31 | 74 | HQ335393 | clade_303 | N | N |
| Actinomyces sp. oral taxon C55 | 94 | HM099646 | clade_303 | N | N |
| Kerstersia gyiorum | 1018 | NR_025669 | clade_307 | N | N |
| Pigmentiphaga daeguensis | 1467 | JN585327 | clade_307 | N | N |
| Aeromonas allosaccharophila | 104 | S39232 | clade_308 | N | N |
| Aeromonas enteropelogenes | 105 | X71121 | clade_308 | N | N |
| Aeromonas hydrophila | 106 | NC_008570 | clade_308 | N | N |
| Aeromonas jandaei | 107 | X60413 | clade_308 | N | N |
| Aeromonas salmonicida | 108 | NC_009348 | clade_308 | N | N |
| Aeromonas trota | 109 | X60415 | clade_308 | N | N |
| Aeromonas veronii | 110 | NR_044845 | clade_308 | N | N |
| Marvinbryantia formatexigens | 1196 | AJ505973 | clade_309 | N | N |
| Rhodobacter sp. oral taxon C30 | 1620 | HM099648 | clade_310 | N | N |
| Rhodobacter sphaeroides | 1621 | CP000144 | clade_310 | N | N |
| Lactobacillus antri | 1071 | ACLL01000037 | clade_313 | N | N |
| Lactobacillus coleohominis | 1076 | ACOH01000030 | clade_313 | N | N |
| Lactobacillus fermentum | 1083 | CP002033 | clade_313 | N | N |
| Lactobacillus gastricus | 1085 | AICN01000060 | clade_313 | N | N |
| Lactobacillus mucosae | 1099 | FR693800 | clade_313 | N | N |
| Lactobacillus oris | 1103 | AEKL01000077 | clade_313 | N | N |
| Lactobacillus pontis | 1111 | HM218420 | clade_313 | N | N |
| Lactobacillus reuteri | 1112 | ACGW02000012 | clade_313 | N | N |
| Lactobacillus sp. KLDS 1.0707 | 1127 | EU600911 | clade_313 | N | N |
| Lactobacillus sp. KLDS 1.0709 | 1128 | EU600913 | clade_313 | N | N |
| Lactobacillus sp. KLDS 1.0711 | 1129 | EU600915 | clade_313 | N | N |
| Lactobacillus sp. KLDS 1.0713 | 1131 | EU600917 | clade_313 | N | N |
| Lactobacillus sp. KLDS 1.0716 | 1132 | EU600921 | clade_313 | N | N |
| Lactobacillus sp. KLDS 1.0718 | 1133 | EU600922 | clade_313 | N | N |
| Lactobacillus sp. oral taxon 052 | 1137 | GQ422710 | clade_313 | N | N |
| Lactobacillus vaginalis | 1140 | ACGV01000168 | clade_313 | N | N |
| Brevibacterium aurantiacum | 419 | NR_044854 | clade_314 | N | N |
| Brevibacterium linens | 423 | AJ315491 | clade_314 | N | N |
| Lactobacillus pentosus | 1108 | JN813103 | clade_315 | N | N |
| Lactobacillus plantarum | 1110 | ACGZ02000033 | clade_315 | N | N |
| Lactobacillus sp. KLDS 1.0702 | 1123 | EU600906 | clade_315 | N | N |
| Lactobacillus sp. KLDS 1.0703 | 1124 | EU600907 | clade_315 | N | N |
| Lactobacillus sp. KLDS 1.0704 | 1125 | EU600908 | clade_315 | N | N |
| Lactobacillus sp. KLDS 1.0705 | 1126 | EU600909 | clade_315 | N | N |
| Agrobacterium radiobacter | 115 | CP000628 | clade_316 | N | N |
| Agrobacterium tumefaciens | 116 | AJ389893 | clade_316 | N | N |
| Corynebacterium argentoratense | 685 | EF463055 | clade_317 | N | N |
| Corynebacterium diphtheriae | 693 | NC_002935 | clade_317 | N | OP |
| Corynebacterium pseudotuberculosis | 715 | NR_037070 | clade_317 | N | N |
| Corynebacterium renale | 717 | NR_037069 | clade_317 | N | N |
| Corynebacterium ulcerans | 731 | NR_074467 | clade_317 | N | N |
| Aurantimonas coralicida | 191 | AY065627 | clade_318 | N | N |
| Aureimonas altamirensis | 192 | FN658986 | clade_318 | N | N |
| Lactobacillus acidipiscis | 1066 | NR_024718 | clade_320 | N | N |
| Lactobacillus salivarius | 1117 | AEBA01000145 | clade_320 | N | N |
| Lactobacillus sp. KLDS 1.0719 | 1134 | EU600923 | clade_320 | N | N |
| Lactobacillus buchneri | 1073 | ACGH01000101 | clade_321 | N | N |
| Lactobacillus genomosp. C1 | 1086 | AY278619 | clade_321 | N | N |
| Lactobacillus genomosp. C2 | 1087 | AY278620 | clade_321 | N | N |
| Lactobacillus hilgardii | 1089 | ACGP01000200 | clade_321 | N | N |
| Lactobacillus kefiri | 1096 | NR_042230 | clade_321 | N | N |
| Lactobacillus parabuchneri | 1105 | NR_041294 | clade_321 | N | N |
| Lactobacillus parakefiri | 1107 | NR_029039 | clade_321 | N | N |
| Lactobacillus curvatus | 1079 | NR_042437 | clade_322 | N | N |
| Lactobacillus sakei | 1116 | DQ989236 | clade_322 | N | N |
| Aneurinibacillus aneurinilyticus | 167 | AB101592 | clade_323 | N | N |
| Aneurinibacillus danicus | 168 | NR_028657 | clade_323 | N | N |
| Aneurinibacillus migulanus | 169 | NR_036799 | clade_323 | N | N |
| Aneurinibacillus terranovensis | 170 | NR_042271 | clade_323 | N | N |
| Staphylococcus aureus | 1757 | CP002643 | clade_325 | N | Category-B |
| Staphylococcus auricularis | 1758 | JQ624774 | clade_325 | N | N |
| Staphylococcus capitis | 1759 | ACFR01000029 | clade_325 | N | N |
| Staphylococcus caprae | 1760 | ACRH01000033 | clade_325 | N | N |
| Staphylococcus carnosus | 1761 | NR_075003 | clade_325 | N | N |
| Staphylococcus cohnii | 1762 | JN175375 | clade_325 | N | N |
| Staphylococcus condimenti | 1763 | NR_029345 | clade_325 | N | N |
| Staphylococcus epidermidis | 1764 | ACHE01000056 | clade_325 | N | N |
| Staphylococcus equorum | 1765 | NR_027520 | clade_325 | N | N |
| Staphylococcus haemolyticus | 1767 | NC_007168 | clade_325 | N | N |
| Staphylococcus hominis | 1768 | AM157418 | clade_325 | N | N |
| Staphylococcus lugdunensis | 1769 | AEQA01000024 | clade_325 | N | N |
| Staphylococcus pasteuri | 1770 | FJ189773 | clade_325 | N | N |
| Staphylococcus pseudintermedius | 1771 | CP002439 | clade_325 | N | N |
| Staphylococcus saccharolyticus | 1772 | NR_029158 | clade_325 | N | N |
| Staphylococcus saprophyticus | 1773 | NC_007350 | clade_325 | N | N |
| Staphylococcus sp. clone bottae7 | 1777 | AF467424 | clade_325 | N | N |
| Staphylococcus sp. H292 | 1775 | AB177642 | clade_325 | N | N |
| Staphylococcus sp. H780 | 1776 | AB177644 | clade_325 | N | N |
| Staphylococcus succinus | 1778 | NR_028667 | clade_325 | N | N |
| Staphylococcus warneri | 1780 | ACPZ01000009 | clade_325 | N | N |
| Staphylococcus xylosus | 1781 | AY395016 | clade_325 | N | N |
| Cardiobacterium hominis | 490 | ACKY01000036 | clade_326 | N | N |
| Cardiobacterium valvarum | 491 | NR_028847 | clade_326 | N | N |
| Pseudomonas fluorescens | 1593 | AY622220 | clade_326 | N | N |
| Pseudomonas gessardii | 1594 | FJ943496 | clade_326 | N | N |
| Pseudomonas monteilii | 1596 | NR_024910 | clade_326 | N | N |
| Pseudomonas poae | 1597 | GU188951 | clade_326 | N | N |
| Pseudomonas putida | 1599 | AF094741 | clade_326 | N | N |
| Pseudomonas sp. G1229 | 1601 | DQ910482 | clade_326 | N | N |
| Pseudomonas tolaasii | 1604 | AF320988 | clade_326 | N | N |
| Pseudomonas viridiflava | 1605 | NR_042764 | clade_326 | N | N |
| Listeria grayi | 1185 | ACCR02000003 | clade_328 | N | OP |
| Listeria innocua | 1186 | JF967625 | clade_328 | N | N |
| Listeria ivanovii | 1187 | X56151 | clade_328 | N | N |
| Listeria monocytogenes | 1188 | CP002003 | clade_328 | N | Category-B |
| Listeria welshimeri | 1189 | AM263198 | clade_328 | N | OP |
| Capnocytophaga sp. oral clone ASCH05 | 484 | AY923149 | clade_333 | N | N |
| Capnocytophaga sputigena | 489 | ABZV01000054 | clade_333 | N | N |
| Leptotrichia genomosp. C1 | 1166 | AY278621 | clade_334 | N | N |
| Leptotrichia shahii | 1169 | AY029806 | clade_334 | N | N |
| Leptotrichia sp. neutropenicPatient | 1170 | AF189244 | clade_334 | N | N |
| Leptotrichia sp. oral clone GT018 | 1171 | AY349384 | clade_334 | N | N |
| Leptotrichia sp. oral clone GT020 | 1172 | AY349385 | clade_334 | N | N |
| Bacteroides sp. 20_3 | 296 | ACRQ01000064 | clade_335 | N | N |
| Bacteroides sp. 3_1_19 | 307 | ADCJ01000062 | clade_335 | N | N |
| Bacteroides sp. 3_2_5 | 311 | ACIB01000079 | clade_335 | N | N |
| Parabacteroides distasonis | 1416 | CP000140 | clade_335 | N | N |
| Parabacteroides goldsteinii | 1417 | AY974070 | clade_335 | N | N |
| Parabacteroides gordonii | 1418 | AB470344 | clade_335 | N | N |
| Parabacteroides sp. D13 | 1421 | ACPW01000017 | clade_335 | N | N |
| Capnocytophaga genomosp. C1 | 477 | AY278613 | clade_336 | N | N |
| Capnocytophaga ochracea | 480 | AEOH01000054 | clade_336 | N | N |
| Capnocytophaga sp. GEJ8 | 481 | GU561335 | clade_336 | N | N |
| Capnocytophaga sp. oral strain A47ROY | 486 | AY005077 | clade_336 | N | N |
| Capnocytophaga sp. S1b | 482 | U42009 | clade_336 | N | N |
| Paraprevotella clara | 1426 | AFFY01000068 | clade_336 | N | N |
| Bacteroides heparinolyticus | 282 | JN867284 | clade_338 | N | N |
| Prevotella heparinolytica | 1500 | GQ422742 | clade_338 | N | N |
| Treponema genomosp. P4 oral clone MB2_G19 | 1928 | DQ003618 | clade_339 | N | N |
| Treponema genomosp. P6 oral clone MB4_G11 | 1930 | DQ003625 | clade_339 | N | N |
| Treponema sp. oral taxon 254 | 1952 | GU408803 | clade_339 | N | N |
| Treponema sp. oral taxon 508 | 1956 | GU413616 | clade_339 | N | N |
| Treponema sp. oral taxon 518 | 1957 | GU413640 | clade_339 | N | N |
| Chlamydia muridarum | 502 | AE002160 | clade_341 | N | OP |
| Chlamydia trachomatis | 504 | U68443 | clade_341 | N | OP |
| Chlamydia psittaci | 503 | NR_036864 | clade_342 | N | Category-B |
| Chlamydophila pneumoniae | 509 | NC_002179 | clade_342 | N | OP |
| Chlamydophila psittaci | 510 | D85712 | clade_342 | N | OP |
| Anaerococcus octavius | 146 | NR_026360 | clade_343 | N | N |
| Anaerococcus sp. 8405254 | 149 | HM587319 | clade_343 | N | N |
| Anaerococcus sp. 9401487 | 150 | HM587322 | clade_343 | N | N |
| Anaerococcus sp. 9403502 | 151 | HM587325 | clade_343 | N | N |
| Gardnerella vaginalis | 923 | CP001849 | clade_344 | N | N |
| Campylobacter lari | 466 | CP000932 | clade_346 | N | OP |
| Anaerobiospirillum succiniciproducens | 142 | NR_026075 | clade_347 | N | N |
| Anaerobiospirillum thomasii | 143 | AJ420985 | clade_347 | N | N |
| Ruminobacter amylophilus | 1654 | NR_026450 | clade_347 | N | N |
| Succinatimonas hippei | 1897 | AEVO01000027 | clade_347 | N | N |
| Actinomyces europaeus | 54 | NR_026363 | clade_348 | N | N |
| Actinomyces sp. oral clone GU009 | 82 | AY349361 | clade_348 | N | N |
| Moraxella catarrhalis | 1260 | CP002005 | clade_349 | N | N |
| Moraxella lincolnii | 1261 | FR822735 | clade_349 | N | N |
| Moraxella sp. 16285 | 1263 | JF682466 | clade_349 | N | N |
| Psychrobacter sp. 13983 | 1613 | HM212668 | clade_349 | N | N |
| Actinobaculum massiliae | 49 | AF487679 | clade_350 | N | N |
| Actinobaculum schaalii | 50 | AY957507 | clade_350 | N | N |
| Actinobaculum sp. BM#101342 | 51 | AY282578 | clade_350 | N | N |
| Actinobaculum sp. P2P_19 P1 | 52 | AY207066 | clade_350 | N | N |
| Actinomyces sp. oral clone IO076 | 84 | AY349363 | clade_350 | N | N |
| Actinomyces sp. oral taxon 848 | 93 | ACUY01000072 | clade_350 | N | N |
| Actinomyces neuii | 65 | X71862 | clade_352 | N | N |
| Mobiluncus mulieris | 1252 | ACKW01000035 | clade_352 | N | N |
| Blastomonas natatoria | 372 | NR_040824 | clade_356 | N | N |
| Novosphingobium aromaticivorans | 1357 | AAAV03000008 | clade_356 | N | N |
| Sphingomonas sp. oral clone FI012 | 1745 | AY349411 | clade_356 | N | N |
| Sphingopyxis alaskensis | 1749 | CP000356 | clade_356 | N | N |
| Oxalobacter formigenes | 1389 | ACDQ01000020 | clade_357 | N | N |
| Veillonella atypica | 1974 | AEDS01000059 | clade_358 | N | N |
| Veillonella dispar | 1975 | ACIK02000021 | clade_358 | N | N |
| Veillonella genomosp. P1 oral clone MB5_P17 | 1976 | DQ003631 | clade_358 | N | N |
| Veillonella parvula | 1978 | ADFU01000009 | clade_358 | N | N |
| Veillonella sp. 3_1_44 | 1979 | ADCV01000019 | clade_358 | N | N |
| Veillonella sp. 6_1_27 | 1980 | ADCW01000016 | clade_358 | N | N |
| Veillonella sp. ACP1 | 1981 | HQ616359 | clade_358 | N | N |
| Veillonella sp. AS16 | 1982 | HQ616365 | clade_358 | N | N |
| Veillonella sp. BS32b | 1983 | HQ616368 | clade_358 | N | N |
| Veillonella sp. ICM51a | 1984 | HQ616396 | clade_358 | N | N |
| Veillonella sp. MSA12 | 1985 | HQ616381 | clade_358 | N | N |
| Veillonella sp. NVG 100cf | 1986 | EF108443 | clade_358 | N | N |
| Veillonella sp. OK11 | 1987 | JN695650 | clade_358 | N | N |
| Veillonella sp. oral clone ASCG01 | 1990 | AY923144 | clade_358 | N | N |
| Veillonella sp. oral clone ASCG02 | 1991 | AY953257 | clade_358 | N | N |
| Veillonella sp. oral clone OH1A | 1992 | AY947495 | clade_358 | N | N |
| Veillonella sp. oral taxon 158 | 1993 | AENU01000007 | clade_358 | N | N |
| Kocuria marina | 1040 | GQ260086 | clade_365 | N | N |
| Kocuria rhizophila | 1042 | AY030315 | clade_365 | N | N |
| Kocuria rosea | 1043 | X87756 | clade_365 | N | N |
| Kocuria varians | 1044 | AF542074 | clade_365 | N | N |
| Clostridiaceae bacterium END_2 | 531 | EF451053 | clade_368 | N | N |
| Micrococcus antarcticus | 1242 | NR_025285 | clade_371 | N | N |
| Micrococcus luteus | 1243 | NR_075062 | clade_371 | N | N |
| Micrococcus lylae | 1244 | NR_026200 | clade_371 | N | N |
| Micrococcus sp. 185 | 1245 | EU714334 | clade_371 | N | N |
| Lactobacillus brevis | 1072 | EU194349 | clade_372 | N | N |
| Lactobacillus parabrevis | 1104 | NR_042456 | clade_372 | N | N |
| Pediococcus acidilactici | 1436 | ACXB01000026 | clade_372 | N | N |
| Pediococcus pentosaceus | 1437 | NR_075052 | clade_372 | N | N |
| Lactobacillus dextrinicus | 1081 | NR_036861 | clade_373 | N | N |
| Lactobacillus perolens | 1109 | NR_029360 | clade_373 | N | N |
| Lactobacillus rhamnosus | 1113 | ABWJ01000068 | clade_373 | N | N |
| Lactobacillus saniviri | 1118 | AB602569 | clade_373 | N | N |
| Lactobacillus sp. BT6 | 1121 | HQ616370 | clade_373 | N | N |
| Mycobacterium mageritense | 1282 | FR798914 | clade_374 | N | OP |
| Mycobacterium neoaurum | 1286 | AF268445 | clade_374 | N | OP |
| Mycobacterium smegmatis | 1291 | CP000480 | clade_374 | N | OP |
| Mycobacterium sp. HE5 | 1304 | AJ012738 | clade_374 | N | N |
| Dysgonomonas gadei | 775 | ADLV01000001 | clade_377 | N | N |
| Dysgonomonas mossii | 776 | ADLW01000023 | clade_377 | N | N |
| Porphyromonas levii | 1474 | NR_025907 | clade_377 | N | N |
| Porphyromonas somerae | 1476 | AB547667 | clade_377 | N | N |
| Bacteroides barnesiae | 267 | NR_041446 | clade_378 | N | N |
| Bacteroides coprocola | 272 | ABIY02000050 | clade_378 | N | N |
| Bacteroides coprophilus | 273 | ACBW01000012 | clade_378 | N | N |
| Bacteroides dorei | 274 | ABWZ01000093 | clade_378 | N | N |
| Bacteroides massiliensis | 284 | AB200226 | clade_378 | N | N |
| Bacteroides plebeius | 289 | AB200218 | clade_378 | N | N |
| Bacteroides sp. 3_1_33FAA | 309 | ACPS01000085 | clade_378 | N | N |
| Bacteroides sp. 3_1_40A | 310 | ACRT01000136 | clade_378 | N | N |
| Bacteroides sp. 4_3_47FAA | 313 | ACDR02000029 | clade_378 | N | N |
| Bacteroides sp. 9_1_42FAA | 314 | ACAA01000096 | clade_378 | N | N |
| Bacteroides sp. NB_8 | 323 | AB117565 | clade_378 | N | N |
| Bacteroides vulgatus | 331 | CP000139 | clade_378 | N | N |
| Bacteroides ovatus | 287 | ACWH01000036 | clade_38 | N | N |
| Bacteroides sp. 1_1_30 | 294 | ADCL01000128 | clade_38 | N | N |
| Bacteroides sp. 2_1_22 | 297 | ACPQ01000117 | clade_38 | N | N |
| Bacteroides sp. 2_2_4 | 299 | ABZZ01000168 | clade_38 | N | N |
| Bacteroides sp. 3_1_23 | 308 | ACRS01000081 | clade_38 | N | N |
| Bacteroides sp. D1 | 318 | ACAB02000030 | clade_38 | N | N |
| Bacteroides sp. D2 | 321 | ACGA01000077 | clade_38 | N | N |
| Bacteroides sp. D22 | 320 | ADCK01000151 | clade_38 | N | N |
| Bacteroides xylanisolvens | 332 | ADKP01000087 | clade_38 | N | N |
| Treponema lecithinolyticum | 1931 | NR_026247 | clade_380 | N | OP |
| Treponema parvum | 1933 | AF302937 | clade_380 | N | OP |
| Treponema sp. oral clone JU025 | 1940 | AY349417 | clade_380 | N | N |
| Treponema sp. oral taxon 270 | 1954 | GQ422733 | clade_380 | N | N |
| Parascardovia denticolens | 1428 | ADEB01000020 | clade_381 | N | N |
| Scardovia inopinata | 1688 | AB029087 | clade_381 | N | N |
| Scardovia wiggsiae | 1689 | AY278626 | clade_381 | N | N |
| Clostridiales bacterium 9400853 | 533 | HM587320 | clade_384 | N | N |
| Mogibacterium diversum | 1254 | NR_027191 | clade_384 | N | N |
| Mogibacterium neglectum | 1255 | NR_027203 | clade_384 | N | N |
| Mogibacterium pumilum | 1256 | NR_028608 | clade_384 | N | N |
| Mogibacterium timidum | 1257 | Z36296 | clade_384 | N | N |
| Borrelia burgdorferi | 389 | ABGI01000001 | clade_386 | N | OP |
| Borrelia garinii | 392 | ABJV01000001 | clade_386 | N | OP |
| Borrelia sp. NE49 | 397 | AJ224142 | clade_386 | N | OP |
| Caldimonas manganoxidans | 457 | NR_040787 | clade_387 | N | N |
| Comamonadaceae bacterium oral taxon F47 | 667 | HM099651 | clade_387 | N | N |
| Lautropia mirabilis | 1149 | AEQP01000026 | clade_387 | N | N |
| Lautropia sp. oral clone AP009 | 1150 | AY005030 | clade_387 | N | N |
| Peptoniphilus asaccharolyticus | 1441 | D14145 | clade_389 | N | N |
| Peptoniphilus duerdenii | 1442 | EU526290 | clade_389 | N | N |
| Peptoniphilus harei | 1443 | NR_026358 | clade_389 | N | N |
| Peptoniphilus indolicus | 1444 | AY153431 | clade_389 | N | N |
| Peptoniphilus lacrimalis | 1446 | ADDO01000050 | clade_389 | N | N |
| Peptoniphilus sp. gpac077 | 1450 | AM176527 | clade_389 | N | N |
| Peptoniphilus sp. JC140 | 1447 | JF824803 | clade_389 | N | N |
| Peptoniphilus sp. oral taxon 386 | 1452 | ADCS01000031 | clade_389 | N | N |
| Peptoniphilus sp. oral taxon 836 | 1453 | AEAA01000090 | clade_389 | N | N |
| Peptostreptococcaceae bacterium ph1 | 1454 | JN837495 | clade_389 | N | N |
| Dialister pneumosintes | 765 | HM596297 | clade_390 | N | N |
| Dialister sp. oral taxon 502 | 767 | GQ422739 | clade_390 | N | N |
| Cupriavidus metallidurans | 741 | GU230889 | clade_391 | N | N |
| Herbaspirillum seropedicae | 1001 | CP002039 | clade_391 | N | N |
| Herbaspirillum sp. JC206 | 1002 | JN657219 | clade_391 | N | N |
| Janthinobacterium sp. SY12 | 1015 | EF455530 | clade_391 | N | N |
| Massilia sp. CCUG 43427A | 1197 | FR773700 | clade_391 | N | N |
| Ralstonia pickettii | 1615 | NC_010682 | clade_391 | N | N |
| Ralstonia sp. 5_7_47FAA | 1616 | ACUF01000076 | clade_391 | N | N |
| Francisella novicida | 889 | ABSS01000002 | clade_392 | N | N |
| Francisella philomiragia | 890 | AY928394 | clade_392 | N | N |
| Francisella tularensis | 891 | ABAZ01000082 | clade_392 | N | Category-A |
| Ignatzschineria indica | 1009 | HQ823562 | clade_392 | N | N |
| Ignatzschineria sp. NML 95_0260 | 1010 | HQ823559 | clade_392 | N | N |
| Streptococcus mutans | 1814 | AP010655 | clade_394 | N | N |
| Lactobacillus gasseri | 1084 | ACOZ01000018 | clade_398 | N | N |
| Lactobacillus hominis | 1090 | FR681902 | clade_398 | N | N |
| Lactobacillus iners | 1091 | AEKJ01000002 | clade_398 | N | N |
| Lactobacillus johnsonii | 1093 | AE017198 | clade_398 | N | N |
| Lactobacillus senioris | 1119 | AB602570 | clade_398 | N | N |
| Lactobacillus sp. oral clone HT002 | 1135 | AY349382 | clade_398 | N | N |
| Weissella beninensis | 2006 | EU439435 | clade_398 | N | N |
| Sphingomonas echinoides | 1744 | NR_024700 | clade_399 | N | N |
| Sphingomonas sp. oral taxon A09 | 1747 | HM099639 | clade_399 | N | N |
| Sphingomonas sp. oral taxon F71 | 1748 | HM099645 | clade_399 | N | N |
| Zymomonas mobilis | 2032 | NR_074274 | clade_399 | N | N |
| Arcanobacterium haemolyticum | 174 | NR_025347 | clade_400 | N | N |
| Arcanobacterium pyogenes | 175 | GU585578 | clade_400 | N | N |
| Trueperella pyogenes | 1962 | NR_044858 | clade_400 | N | N |
| Lactococcus garvieae | 1144 | AF061005 | clade_401 | N | N |
| Lactococcus lactis | 1145 | CP002365 | clade_401 | N | N |
| Brevibacterium mcbrellneri | 424 | ADNU01000076 | clade_402 | N | N |
| Brevibacterium paucivorans | 425 | EU086796 | clade_402 | N | N |
| Brevibacterium sp. JC43 | 428 | JF824806 | clade_402 | N | N |
| Selenomonas artemidis | 1692 | HM596274 | clade_403 | N | N |
| Selenomonas sp. FOBRC9 | 1704 | HQ616378 | clade_403 | N | N |
| Selenomonas sp. oral taxon 137 | 1715 | AENV01000007 | clade_403 | N | N |
| Desmospora activa | 751 | AM940019 | clade_404 | N | N |
| Desmospora sp. 8437 | 752 | AFHT01000143 | clade_404 | N | N |
| Paenibacillus sp. oral taxon F45 | 1407 | HM099647 | clade_404 | N | N |
| Corynebacterium ammoniagenes | 682 | ADNS01000011 | clade_405 | N | N |
| Corynebacterium aurimucosum | 687 | ACLH01000041 | clade_405 | N | N |
| Corynebacterium bovis | 688 | AF537590 | clade_405 | N | N |
| Corynebacterium canis | 689 | GQ871934 | clade_405 | N | N |
| Corynebacterium casei | 690 | NR_025101 | clade_405 | N | N |
| Corynebacterium durum | 694 | Z97069 | clade_405 | N | N |
| Corynebacterium efficiens | 695 | ACLI01000121 | clade_405 | N | N |
| Corynebacterium falsenii | 696 | Y13024 | clade_405 | N | N |
| Corynebacterium flavescens | 697 | NR_037040 | clade_405 | N | N |
| Corynebacterium glutamicum | 701 | BA000036 | clade_405 | N | N |
| Corynebacterium jeikeium | 704 | ACYW01000001 | clade_405 | N | OP |
| Corynebacterium kroppenstedtii | 705 | NR_026380 | clade_405 | N | N |
| Corynebacterium lipophiloflavum | 706 | ACHJ01000075 | clade_405 | N | N |
| Corynebacterium matruchotii | 709 | ACSH02000003 | clade_405 | N | N |
| Corynebacterium minutissimum | 710 | X82064 | clade_405 | N | N |
| Corynebacterium resistens | 718 | ADGN01000058 | clade_405 | N | N |
| Corynebacterium simulans | 720 | AF537604 | clade_405 | N | N |
| Corynebacterium singulare | 721 | NR_026394 | clade_405 | N | N |
| Corynebacterium sp. 1 ex sheep | 722 | Y13427 | clade_405 | N | N |
| Corynebacterium sp. NML 99_0018 | 726 | GU238413 | clade_405 | N | N |
| Corynebacterium striatum | 727 | ACGE01000001 | clade_405 | N | OP |
| Corynebacterium urealyticum | 732 | X81913 | clade_405 | N | OP |
| Corynebacterium variabile | 734 | NR_025314 | clade_405 | N | N |
| Aerococcus sanguinicola | 98 | AY837833 | clade_407 | N | N |
| Aerococcus urinae | 99 | CP002512 | clade_407 | N | N |
| Aerococcus urinaeequi | 100 | NR_043443 | clade_407 | N | N |
| Aerococcus viridans | 101 | ADNT01000041 | clade_407 | N | N |
| Fusobacterium naviforme | 898 | HQ223106 | clade_408 | N | N |
| Moryella indoligenes | 1268 | AF527773 | clade_408 | N | N |
| Selenomonas genomosp. P5 | 1697 | AY341820 | clade_410 | N | N |
| Selenomonas sp. oral clone IQ048 | 1710 | AY349408 | clade_410 | N | N |
| Selenomonas sputigena | 1717 | ACKP02000033 | clade_410 | N | N |
| Hyphomicrobium sulfonivorans | 1007 | AY468372 | clade_411 | N | N |
| Methylocella silvestris | 1228 | NR_074237 | clade_411 | N | N |
| Legionella pneumophila | 1153 | NC_002942 | clade_412 | N | OP |
| Lactobacillus coryniformis | 1077 | NR_044705 | clade_413 | N | N |
| Arthrobacter agilis | 178 | NR_026198 | clade_414 | N | N |
| Arthrobacter arilaitensis | 179 | NR_074608 | clade_414 | N | N |
| Arthrobacter bergerei | 180 | NR_025612 | clade_414 | N | N |
| Arthrobacter globiformis | 181 | NR_026187 | clade_414 | N | N |
| Arthrobacter nicotianae | 182 | NR_026190 | clade_414 | N | N |
| Mycobacterium abscessus | 1269 | AGQU01000002 | clade_418 | N | OP |
| Mycobacterium chelonae | 1273 | AB548610 | clade_418 | N | OP |
| Bacteroides salanitronis | 291 | CP002530 | clade_419 | N | N |
| Paraprevotella xylaniphila | 1427 | AFBR01000011 | clade_419 | N | N |
| Barnesiella intestinihominis | 336 | AB370251 | clade_420 | N | N |
| Barnesiella viscericola | 337 | NR_041508 | clade_420 | N | N |
| Parabacteroides sp. NS31_3 | 1422 | JN029805 | clade_420 | N | N |
| Porphyromonadaceae bacterium NML 060648 | 1470 | EF184292 | clade_420 | N | N |
| Tannerella forsythia | 1913 | CP003191 | clade_420 | N | N |
| Tannerella sp. 6_1_58FAA_CT1 | 1914 | ACWX01000068 | clade_420 | N | N |
| Mycoplasma amphoriforme | 1311 | AY531656 | clade_421 | N | N |
| Mycoplasma genitalium | 1317 | L43967 | clade_421 | N | N |
| Mycoplasma pneumoniae | 1322 | NC_000912 | clade_421 | N | N |
| Mycoplasma penetrans | 1321 | NC_004432 | clade_422 | N | N |
| Ureaplasma parvum | 1966 | AE002127 | clade_422 | N | N |
| Ureaplasma urealyticum | 1967 | AAYN01000002 | clade_422 | N | N |
| Treponema genomosp. P1 | 1927 | AY341822 | clade_425 | N | N |
| Treponema sp. oral taxon 228 | 1943 | GU408580 | clade_425 | N | N |
| Treponema sp. oral taxon 230 | 1944 | GU408603 | clade_425 | N | N |
| Treponema sp. oral taxon 231 | 1945 | GU408631 | clade_425 | N | N |
| Treponema sp. oral taxon 232 | 1946 | GU408646 | clade_425 | N | N |
| Treponema sp. oral taxon 235 | 1947 | GU408673 | clade_425 | N | N |
| Treponema sp. ovine footrot | 1959 | AJ010951 | clade_425 | N | N |
| Treponema vincentii | 1960 | ACYH01000036 | clade_425 | N | OP |
| Burkholderiales bacterium 1_1_47 | 452 | ADCQ01000066 | clade_432 | N | OP |
| Parasutterella excrementihominis | 1429 | AFBP01000029 | clade_432 | N | N |
| Parasutterella secunda | 1430 | AB491209 | clade_432 | N | N |
| Sutterella morbirenis | 1898 | AJ832129 | clade_432 | N | N |
| Sutterella sanguinus | 1900 | AJ748647 | clade_432 | N | N |
| Sutterella sp. YIT 12072 | 1901 | AB491210 | clade_432 | N | N |
| Sutterella stercoricanis | 1902 | NR_025600 | clade_432 | N | N |
| Sutterella wadsworthensis | 1903 | ADMF01000048 | clade_432 | N | N |
| Propionibacterium freudenreichii | 1572 | NR_036972 | clade_433 | N | N |
| Propionibacterium sp. oral taxon 192 | 1580 | GQ422728 | clade_433 | N | N |
| Tessaracoccus sp. oral taxon F04 | 1917 | HM099640 | clade_433 | N | N |
| Peptoniphilus ivorii | 1445 | Y07840 | clade_434 | N | N |
| Peptoniphilus sp. gpac007 | 1448 | AM176517 | clade_434 | N | N |
| Peptoniphilus sp. gpac018A | 1449 | AM176519 | clade_434 | N | N |
| Peptoniphilus sp. gpac148 | 1451 | AM176535 | clade_434 | N | N |
| Flexispira rappini | 887 | AY126479 | clade_436 | N | N |
| Helicobacter bilis | 993 | ACDN01000023 | clade_436 | N | N |
| Helicobacter cinaedi | 995 | ABQT01000054 | clade_436 | N | N |
| Helicobacter sp. None | 998 | U44756 | clade_436 | N | N |
| Brevundimonas subvibrioides | 429 | CP002102 | clade_438 | N | N |
| Hyphomonas neptunium | 1008 | NR_074092 | clade_438 | N | N |
| Phenylobacterium zucineum | 1465 | AY628697 | clade_438 | N | N |
| Streptococcus downei | 1793 | AEKN01000002 | clade_441 | N | N |
| Streptococcus sp. SHV515 | 1848 | Y07601 | clade_441 | N | N |
| Acinetobacter sp. CIP 53.82 | 40 | JQ638584 | clade_443 | N | N |
| Halomonas elongata | 990 | NR_074782 | clade_443 | N | N |
| Halomonas johnsoniae | 991 | FR775979 | clade_443 | N | N |
| Butyrivibrio fibrisolvens | 456 | U41172 | clade_444 | N | N |
| Roseburia sp. 11SE37 | 1640 | FM954975 | clade_444 | N | N |
| Roseburia sp. 11SE38 | 1641 | FM954976 | clade_444 | N | N |
| Shuttleworthia satelles | 1728 | ACIP02000004 | clade_444 | N | N |
| Shuttleworthia sp. MSX8B | 1729 | HQ616383 | clade_444 | N | N |
| Shuttleworthia sp. oral taxon G69 | 1730 | GU432167 | clade_444 | N | N |
| Bdellovibrio sp. MPA | 344 | AY294215 | clade_445 | N | N |
| Desulfobulbus sp. oral clone CH031 | 755 | AY005036 | clade_445 | N | N |
| Desulfovibrio desulfuricans | 757 | DQ092636 | clade_445 | N | N |
| Desulfovibrio fairfieldensis | 758 | U42221 | clade_445 | N | N |
| Desulfovibrio piger | 759 | AF192152 | clade_445 | N | N |
| Desulfovibrio sp. 3_1_syn3 | 760 | ADDR01000239 | clade_445 | N | N |
| Geobacter bemidjiensis | 941 | CP001124 | clade_445 | N | N |
| Brachybacterium alimentarium | 401 | NR_026269 | clade_446 | N | N |
| Brachybacterium conglomeratum | 402 | AB537169 | clade_446 | N | N |
| Brachybacterium tyrofermentans | 403 | NR_026272 | clade_446 | N | N |
| Dermabacter hominis | 749 | FJ263375 | clade_446 | N | N |
| Aneurinibacillus thermoaerophilus | 171 | NR_029303 | clade_448 | N | N |
| Brevibacillus agri | 409 | NR_040983 | clade_448 | N | N |
| Brevibacillus centrosporus | 411 | NR_043414 | clade_448 | N | N |
| Brevibacillus choshinensis | 412 | NR_040980 | clade_448 | N | N |
| Brevibacillus invocatus | 413 | NR_041836 | clade_448 | N | N |
| Brevibacillus parabrevis | 415 | NR_040981 | clade_448 | N | N |
| Brevibacillus reuszeri | 416 | NR_040982 | clade_448 | N | N |
| Brevibacillus sp. phR | 417 | JN837488 | clade_448 | N | N |
| Brevibacillus thermoruber | 418 | NR_026514 | clade_448 | N | N |
| Lactobacillus murinus | 1100 | NR_042231 | clade_449 | N | N |
| Lactobacillus oeni | 1102 | NR_043095 | clade_449 | N | N |
| Lactobacillus ruminis | 1115 | ACGS02000043 | clade_449 | N | N |
| Lactobacillus vini | 1141 | NR_042196 | clade_449 | N | N |
| Gemella haemolysans | 924 | ACDZ02000012 | clade_450 | N | N |
| Gemella morbillorum | 925 | NR_025904 | clade_450 | N | N |
| Gemella morbillorum | 926 | ACRX01000010 | clade_450 | N | N |
| Gemella sanguinis | 927 | ACRY01000057 | clade_450 | N | N |
| Gemella sp. oral clone ASCE02 | 929 | AY923133 | clade_450 | N | N |
| Gemella sp. oral clone ASCF04 | 930 | AY923139 | clade_450 | N | N |
| Gemella sp. oral clone ASCF12 | 931 | AY923143 | clade_450 | N | N |
| Gemella sp. WAL 1945J | 928 | EU427463 | clade_450 | N | N |
| Sporolactobacillus nakayamae | 1753 | NR_042247 | clade_451 | N | N |
| Gluconacetobacter entanii | 945 | NR_028909 | clade_452 | N | N |
| Gluconacetobacter europaeus | 946 | NR_026513 | clade_452 | N | N |
| Gluconacetobacter hansenii | 947 | NR_026133 | clade_452 | N | N |
| Gluconacetobacter oboediens | 949 | NR_041295 | clade_452 | N | N |
| Gluconacetobacter xylinus | 950 | NR_074338 | clade_452 | N | N |
| Auritibacter ignavus | 193 | FN554542 | clade_453 | N | N |
| Dermacoccus sp. Ellin185 | 750 | AEIQ01000090 | clade_453 | N | N |
| Janibacter limosus | 1013 | NR_026362 | clade_453 | N | N |
| Janibacter melonis | 1014 | EF063716 | clade_453 | N | N |
| Acetobacter aceti | 7 | NR_026121 | clade_454 | N | N |
| Acetobacter fabarum | 8 | NR_042678 | clade_454 | N | N |
| Acetobacter lovaniensis | 9 | NR_040832 | clade_454 | N | N |
| Acetobacter malorum | 10 | NR_025513 | clade_454 | N | N |
| Acetobacter orientalis | 11 | NR_028625 | clade_454 | N | N |
| Acetobacter pasteurianus | 12 | NR_026107 | clade_454 | N | N |
| Acetobacter pomorum | 13 | NR_042112 | clade_454 | N | N |
| Acetobacter syzygii | 14 | NR_040868 | clade_454 | N | N |
| Acetobacter tropicalis | 15 | NR_036881 | clade_454 | N | N |
| Gluconacetobacter azotocaptans | 943 | NR_028767 | clade_454 | N | N |
| Gluconacetobacter diazotrophicus | 944 | NR_074292 | clade_454 | N | N |
| Gluconacetobacter johannae | 948 | NR_024959 | clade_454 | N | N |
| Nocardia brasiliensis | 1351 | AIHV01000038 | clade_455 | N | N |
| Nocardia cyriacigeorgica | 1352 | HQ009486 | clade_455 | N | N |
| Nocardia puris | 1354 | NR_028994 | clade_455 | N | N |
| Nocardia sp. 01_Je_025 | 1355 | GU574059 | clade_455 | N | N |
| Rhodococcus equi | 1623 | ADNW01000058 | clade_455 | N | N |
| Oceanobacillus caeni | 1358 | NR_041533 | clade_456 | N | N |
| Oceanobacillus sp. Ndiop | 1359 | CAER01000083 | clade_456 | N | N |
| Ornithinibacillus bavariensis | 1384 | NR_044923 | clade_456 | N | N |
| Ornithinibacillus sp. 7_10AIA | 1385 | FN397526 | clade_456 | N | N |
| Virgibacillus proomii | 2005 | NR_025308 | clade_456 | N | N |
| Corynebacterium amycolatum | 683 | ABZU01000033 | clade_457 | N | OP |
| Corynebacterium hansenii | 702 | AM946639 | clade_457 | N | N |
| Corynebacterium xerosis | 735 | FN179330 | clade_457 | N | OP |
| Staphylococcaceae bacterium NML 92_0017 | 1756 | AY841362 | clade_458 | N | N |
| Staphylococcus fleurettii | 1766 | NR_041326 | clade_458 | N | N |
| Staphylococcus sciuri | 1774 | NR_025520 | clade_458 | N | N |
| Staphylococcus vitulinus | 1779 | NR_024670 | clade_458 | N | N |
| Stenotrophomonas maltophilia | 1782 | AAVZ01000005 | clade_459 | N | N |
| Stenotrophomonas sp. FG_6 | 1783 | EF017810 | clade_459 | N | N |
| Mycobacterium africanum | 1270 | AF480605 | clade_46 | N | OP |
| Mycobacterium alsiensis | 1271 | AJ938169 | clade_46 | N | OP |
| Mycobacterium avium | 1272 | CP000479 | clade_46 | N | OP |
| Mycobacterium colombiense | 1274 | AM062764 | clade_46 | N | OP |
| Mycobacterium gordonae | 1276 | GU142930 | clade_46 | N | OP |
| Mycobacterium intracellulare | 1277 | GQ153276 | clade_46 | N | OP |
| Mycobacterium kansasii | 1278 | AF480601 | clade_46 | N | OP |
| Mycobacterium lacus | 1279 | NR_025175 | clade_46 | N | OP |
| Mycobacterium leprae | 1280 | FM211192 | clade_46 | N | OP |
| Mycobacterium lepromatosis | 1281 | EU203590 | clade_46 | N | OP |
| Mycobacterium mantenii | 1283 | FJ042897 | clade_46 | N | OP |
| Mycobacterium marinum | 1284 | NC_010612 | clade_46 | N | OP |
| Mycobacterium microti | 1285 | NR_025234 | clade_46 | N | OP |
| Mycobacterium parascrofulaceum | 1287 | ADNV01000350 | clade_46 | N | OP |
| Mycobacterium seoulense | 1290 | DQ536403 | clade_46 | N | OP |
| Mycobacterium sp. 1761 | 1292 | EU703150 | clade_46 | N | N |
| Mycobacterium sp. 1791 | 1295 | EU703148 | clade_46 | N | N |
| Mycobacterium sp. 1797 | 1296 | EU703149 | clade_46 | N | N |
| Mycobacterium sp. B10_07.09.0206 | 1298 | HQ174245 | clade_46 | N | N |
| Mycobacterium sp. NLA001000736 | 1305 | HM627011 | clade_46 | N | N |
| Mycobacterium sp. W | 1306 | DQ437715 | clade_46 | N | N |
| Mycobacterium tuberculosis | 1307 | CP001658 | clade_46 | N | Category-C |
| Mycobacterium ulcerans | 1308 | AB548725 | clade_46 | N | OP |
| Mycobacterium vulneris | 1309 | EU834055 | clade_46 | N | OP |
| Xanthomonas campestris | 2016 | EF101975 | clade_461 | N | N |
| Xanthomonas sp. kmd_489 | 2017 | EU723184 | clade_461 | N | N |
| Dietzia natronolimnaea | 769 | GQ870426 | clade_462 | N | N |
| Dietzia sp. BBDP51 | 770 | DQ337512 | clade_462 | N | N |
| Dietzia sp. CA149 | 771 | GQ870422 | clade_462 | N | N |
| Dietzia timorensis | 772 | GQ870424 | clade_462 | N | N |
| Gordonia bronchialis | 951 | NR_027594 | clade_463 | N | N |
| Gordonia polyisoprenivorans | 952 | DQ385609 | clade_463 | N | N |
| Gordonia sp. KTR9 | 953 | DQ068383 | clade_463 | N | N |
| Gordonia sputi | 954 | FJ536304 | clade_463 | N | N |
| Gordonia terrae | 955 | GQ848239 | clade_463 | N | N |
| Leptotrichia goodfellowii | 1167 | ADAD01000110 | clade_465 | N | N |
| Leptotrichia sp. oral clone IK040 | 1174 | AY349387 | clade_465 | N | N |
| Leptotrichia sp. oral clone P2PB_51 P1 | 1175 | AY207053 | clade_465 | N | N |
| Bacteroidales genomosp. P7 oral clone MB3_P19 | 264 | DQ003623 | clade_466 | N | N |
| Butyricimonas virosa | 454 | AB443949 | clade_466 | N | N |
| Odoribacter laneus | 1363 | AB490805 | clade_466 | N | N |
| Odoribacter splanchnicus | 1364 | CP002544 | clade_466 | N | N |
| Capnocytophaga gingivalis | 478 | ACLQ01000011 | clade_467 | N | N |
| Capnocytophaga granulosa | 479 | X97248 | clade_467 | N | N |
| Capnocytophaga sp. oral clone AH015 | 483 | AY005074 | clade_467 | N | N |
| Capnocytophaga sp. oral strain S3 | 487 | AY005073 | clade_467 | N | N |
| Capnocytophaga sp. oral taxon 338 | 488 | AEXX01000050 | clade_467 | N | N |
| Capnocytophaga canimorsus | 476 | CP002113 | clade_468 | N | N |
| Capnocytophaga sp. oral clone ID062 | 485 | AY349368 | clade_468 | N | N |
| Lactobacillus catenaformis | 1075 | M23729 | clade_469 | N | N |
| Lactobacillus vitulinus | 1142 | NR_041305 | clade_469 | N | N |
| Cetobacterium somerae | 501 | AJ438155 | clade_470 | N | N |
| Fusobacterium gonidiaformans | 896 | ACET01000043 | clade_470 | N | N |
| Fusobacterium mortiferum | 897 | ACDB02000034 | clade_470 | N | N |
| Fusobacterium necrogenes | 899 | X55408 | clade_470 | N | N |
| Fusobacterium necrophorum | 900 | AM905356 | clade_470 | N | N |
| Fusobacterium sp. 12_1B | 905 | AGWJ01000070 | clade_470 | N | N |
| Fusobacterium sp. 3_1_5R | 911 | ACDD01000078 | clade_470 | N | N |
| Fusobacterium sp. D12 | 918 | ACDG02000036 | clade_470 | N | N |
| Fusobacterium ulcerans | 921 | ACDH01000090 | clade_470 | N | N |
| Fusobacterium varium | 922 | ACIE01000009 | clade_470 | N | N |
| Mycoplasma arthritidis | 1312 | NC_011025 | clade_473 | N | N |
| Mycoplasma faucium | 1314 | NR_024983 | clade_473 | N | N |
| Mycoplasma hominis | 1318 | AF443616 | clade_473 | N | N |
| Mycoplasma orale | 1319 | AY796060 | clade_473 | N | N |
| Mycoplasma salivarium | 1324 | M24661 | clade_473 | N | N |
| Mitsuokella jalaludinii | 1247 | NR_028840 | clade_474 | N | N |
| Mitsuokella multacida | 1248 | ABWK02000005 | clade_474 | N | N |
| Mitsuokella sp. oral taxon 521 | 1249 | GU413658 | clade_474 | N | N |
| Mitsuokella sp. oral taxon G68 | 1250 | GU432166 | clade_474 | N | N |
| Selenomonas genomosp. C1 | 1695 | AY278627 | clade_474 | N | N |
| Selenomonas genomosp. P8 oral clone MB5_P06 | 1700 | DQ003628 | clade_474 | N | N |
| Selenomonas ruminantium | 1703 | NR_075026 | clade_474 | N | N |
| Veillonellaceae bacterium oral taxon 131 | 1994 | GU402916 | clade_474 | N | N |
| Alloscardovia omnicolens | 139 | NR_042583 | clade_475 | N | N |
| Alloscardovia sp. OB7196 | 140 | AB425070 | clade_475 | N | N |
| Bifidobacterium urinalis | 366 | AJ278695 | clade_475 | N | N |
| Prevotella loescheii | 1503 | JN867231 | clade_48 | N | N |
| Prevotella sp. oral clone ASCG12 | 1530 | DQ272511 | clade_48 | N | N |
| Prevotella sp. oral clone GU027 | 1540 | AY349398 | clade_48 | N | N |
| Prevotella sp. oral taxon 472 | 1553 | ACZS01000106 | clade_48 | N | N |
| Selenomonas dianae | 1693 | GQ422719 | clade_480 | N | N |
| Selenomonas flueggei | 1694 | AF287803 | clade_480 | N | N |
| Selenomonas genomosp. C2 | 1696 | AY278628 | clade_480 | N | N |
| Selenomonas genomosp. P6 oral clone MB3_C41 | 1698 | DQ003636 | clade_480 | N | N |
| Selenomonas genomosp. P7 oral clone MB5_C08 | 1699 | DQ003627 | clade_480 | N | N |
| Selenomonas infelix | 1701 | AF287802 | clade_480 | N | N |
| Selenomonas noxia | 1702 | GU470909 | clade_480 | N | N |
| Selenomonas sp. oral clone FT050 | 1705 | AY349403 | clade_480 | N | N |
| Selenomonas sp. oral clone GI064 | 1706 | AY349404 | clade_480 | N | N |
| Selenomonas sp. oral clone GT010 | 1707 | AY349405 | clade_480 | N | N |
| Selenomonas sp. oral clone HU051 | 1708 | AY349406 | clade_480 | N | N |
| Selenomonas sp. oral clone IK004 | 1709 | AY349407 | clade_480 | N | N |
| Selenomonas sp. oral clone JI021 | 1711 | AY349409 | clade_480 | N | N |
| Selenomonas sp. oral clone JS031 | 1712 | AY349410 | clade_480 | N | N |
| Selenomonas sp. oral clone OH4A | 1713 | AY947498 | clade_480 | N | N |
| Selenomonas sp. oral clone P2PA_80 P4 | 1714 | AY207052 | clade_480 | N | N |
| Selenomonas sp. oral taxon 149 | 1716 | AEEJ01000007 | clade_480 | N | N |
| Veillonellaceae bacterium oral taxon 155 | 1995 | GU470897 | clade_480 | N | N |
| Agrococcus jenensis | 117 | NR_026275 | clade_484 | N | N |
| Microbacterium gubbeenense | 1232 | NR_025098 | clade_484 | N | N |
| Pseudoclavibacter sp. Timone | 1590 | FJ375951 | clade_484 | N | N |
| Tropheryma whipplei | 1961 | BX251412 | clade_484 | N | N |
| Zimmermannella bifida | 2031 | AB012592 | clade_484 | N | N |
| Legionella hackeliae | 1151 | M36028 | clade_486 | N | OP |
| Legionella longbeachae | 1152 | M36029 | clade_486 | N | OP |
| Legionella sp. D3923 | 1154 | JN380999 | clade_486 | N | OP |
| Legionella sp. D4088 | 1155 | JN381012 | clade_486 | N | OP |
| Legionella sp. H63 | 1156 | JF831047 | clade_486 | N | OP |
| Legionella sp. NML 93L054 | 1157 | GU062706 | clade_486 | N | OP |
| Legionella steelei | 1158 | HQ398202 | clade_486 | N | OP |
| Tatlockia micdadei | 1915 | M36032 | clade_486 | N | N |
| Helicobacter pullorum | 996 | ABQU01000097 | clade_489 | N | N |
| Acetobacteraceae bacterium AT 5844 | 16 | AGEZ01000040 | clade_490 | N | N |
| Roseomonas cervicalis | 1643 | ADVL01000363 | clade_490 | N | N |
| Roseomonas mucosa | 1644 | NR_028857 | clade_490 | N | N |
| Roseomonas sp. NML94_0193 | 1645 | AF533357 | clade_490 | N | N |
| Roseomonas sp. NML97_0121 | 1646 | AF533359 | clade_490 | N | N |
| Roseomonas sp. NML98_0009 | 1647 | AF533358 | clade_490 | N | N |
| Roseomonas sp. NML98_0157 | 1648 | AF533360 | clade_490 | N | N |
| Rickettsia akari | 1627 | CP000847 | clade_492 | N | OP |
| Rickettsia conorii | 1628 | AE008647 | clade_492 | N | OP |
| Rickettsia prowazekii | 1629 | M21789 | clade_492 | N | Category-B |
| Rickettsia rickettsii | 1630 | NC_010263 | clade_492 | N | OP |
| Rickettsia slovaca | 1631 | L36224 | clade_492 | N | OP |
| Rickettsia typhi | 1632 | AE017197 | clade_492 | N | OP |
| Anaeroglobus geminatus | 160 | AGCJ01000054 | clade_493 | N | N |
| Megasphaera genomosp. C1 | 1201 | AY278622 | clade_493 | N | N |
| Megasphaera micronuciformis | 1203 | AECS01000020 | clade_493 | N | N |
| Clostridiales genomosp. BVAB3 | 540 | CP001850 | clade_495 | N | N |
| Tsukamurella paurometabola | 1963 | X80628 | clade_496 | N | N |
| Tsukamurella tyrosinosolvens | 1964 | AB478958 | clade_496 | N | N |
| Abiotrophia para_adiacens | 2 | AB022027 | clade_497 | N | N |
| Carnobacterium divergens | 492 | NR_044706 | clade_497 | N | N |
| Carnobacterium maltaromaticum | 493 | NC_019425 | clade_497 | N | N |
| Enterococcus avium | 800 | AF133535 | clade_497 | N | N |
| Enterococcus caccae | 801 | AY943820 | clade_497 | N | N |
| Enterococcus casseliflavus | 802 | AEWT01000047 | clade_497 | N | N |
| Enterococcus durans | 803 | AJ276354 | clade_497 | N | N |
| Enterococcus faecalis | 804 | AE016830 | clade_497 | N | N |
| Enterococcus faecium | 805 | AM157434 | clade_497 | N | N |
| Enterococcus gallinarum | 806 | AB269767 | clade_497 | N | N |
| Enterococcus gilvus | 807 | AY033814 | clade_497 | N | N |
| Enterococcus hawaiiensis | 808 | AY321377 | clade_497 | N | N |
| Enterococcus hirae | 809 | AF061011 | clade_497 | N | N |
| Enterococcus italicus | 810 | AEPV01000109 | clade_497 | N | N |
| Enterococcus mundtii | 811 | NR_024906 | clade_497 | N | N |
| Enterococcus raffinosus | 812 | FN600541 | clade_497 | N | N |
| Enterococcus sp. BV2CASA2 | 813 | JN809766 | clade_497 | N | N |
| Enterococcus sp. CCRI_16620 | 814 | GU457263 | clade_497 | N | N |
| Enterococcus sp. F95 | 815 | FJ463817 | clade_497 | N | N |
| Enterococcus sp. RfL6 | 816 | AJ133478 | clade_497 | N | N |
| Enterococcus thailandicus | 817 | AY321376 | clade_497 | N | N |
| Fusobacterium canifelinum | 893 | AY162222 | clade_497 | N | N |
| Fusobacterium genomosp. C1 | 894 | AY278616 | clade_497 | N | N |
| Fusobacterium genomosp. C2 | 895 | AY278617 | clade_497 | N | N |
| Fusobacterium periodonticum | 902 | ACJY01000002 | clade_497 | N | N |
| Fusobacterium sp. 1_1_41FAA | 906 | ADGG01000053 | clade_497 | N | N |
| Fusobacterium sp. 11_3_2 | 904 | ACUO01000052 | clade_497 | N | N |
| Fusobacterium sp. 2_1_31 | 907 | ACDC02000018 | clade_497 | N | N |
| Fusobacterium sp. 3_1_27 | 908 | ADGF01000045 | clade_497 | N | N |
| Fusobacterium sp. 3_1_33 | 909 | ACQE01000178 | clade_497 | N | N |
| Fusobacterium sp. 3_1_36A2 | 910 | ACPU01000044 | clade_497 | N | N |
| Fusobacterium sp. AC18 | 912 | HQ616357 | clade_497 | N | N |
| Fusobacterium sp. ACB2 | 913 | HQ616358 | clade_497 | N | N |
| Fusobacterium sp. AS2 | 914 | HQ616361 | clade_497 | N | N |
| Fusobacterium sp. CM1 | 915 | HQ616371 | clade_497 | N | N |
| Fusobacterium sp. CM21 | 916 | HQ616375 | clade_497 | N | N |
| Fusobacterium sp. CM22 | 917 | HQ616376 | clade_497 | N | N |
| Fusobacterium sp. oral clone ASCF06 | 919 | AY923141 | clade_497 | N | N |
| Fusobacterium sp. oral clone ASCF11 | 920 | AY953256 | clade_497 | N | N |
| Granulicatella adiacens | 959 | ACKZ01000002 | clade_497 | N | N |
| Granulicatella elegans | 960 | AB252689 | clade_497 | N | N |
| Granulicatella paradiacens | 961 | AY879298 | clade_497 | N | N |
| Granulicatella sp. oral clone ASC02 | 963 | AY923126 | clade_497 | N | N |
| Granulicatella sp. oral clone ASCA05 | 964 | DQ341469 | clade_497 | N | N |
| Granulicatella sp. oral clone ASCB09 | 965 | AY953251 | clade_497 | N | N |
| Granulicatella sp. oral clone ASCG05 | 966 | AY923146 | clade_497 | N | N |
| Tetragenococcus halophilus | 1918 | NR_075020 | clade_497 | N | N |
| Tetragenococcus koreensis | 1919 | NR_043113 | clade_497 | N | N |
| Vagococcus fluvialis | 1973 | NR_026489 | clade_497 | N | N |
| Chryseobacterium anthropi | 514 | AM982793 | clade_498 | N | N |
| Chryseobacterium gleum | 515 | ACKQ02000003 | clade_498 | N | N |
| Chryseobacterium hominis | 516 | NR_042517 | clade_498 | N | N |
| Treponema refringens | 1936 | AF426101 | clade_499 | N | OP |
| Treponema sp. oral clone JU031 | 1941 | AY349416 | clade_499 | N | N |
| Treponema sp. oral taxon 239 | 1948 | GU408738 | clade_499 | N | N |
| Treponema sp. oral taxon 271 | 1955 | GU408871 | clade_499 | N | N |
| Alistipes finegoldii | 129 | NR_043064 | clade_500 | N | N |
| Alistipes onderdonkii | 131 | NR_043318 | clade_500 | N | N |
| Alistipes putredinis | 132 | ABFK02000017 | clade_500 | N | N |
| Alistipes shahii | 133 | FP929032 | clade_500 | N | N |
| Alistipes sp. HGB5 | 134 | AENZ01000082 | clade_500 | N | N |
| Alistipes sp. JC50 | 135 | JF824804 | clade_500 | N | N |
| Alistipes sp. RMA 9912 | 136 | GQ140629 | clade_500 | N | N |
| Mycoplasma agalactiae | 1310 | AF010477 | clade_501 | N | N |
| Mycoplasma bovoculi | 1313 | NR_025987 | clade_501 | N | N |
| Mycoplasma fermentans | 1315 | CP002458 | clade_501 | N | N |
| Mycoplasma flocculare | 1316 | X62699 | clade_501 | N | N |
| Mycoplasma ovipneumoniae | 1320 | NR_025989 | clade_501 | N | N |
| Arcobacter butzleri | 176 | AEPT01000071 | clade_502 | N | N |
| Arcobacter cryaerophilus | 177 | NR_025905 | clade_502 | N | N |
| Campylobacter curvus | 461 | NC_009715 | clade_502 | N | OP |
| Campylobacter rectus | 467 | ACFU01000050 | clade_502 | N | OP |
| Campylobacter showae | 468 | ACVQ01000030 | clade_502 | N | OP |
| Campylobacter sp. FOBRC14 | 469 | HQ616379 | clade_502 | N | OP |
| Campylobacter sp. FOBRC15 | 470 | HQ616380 | clade_502 | N | OP |
| Campylobacter sp. oral clone BB120 | 471 | AY005038 | clade_502 | N | OP |
| Campylobacter sputorum | 472 | NR_044839 | clade_502 | N | OP |
| Bacteroides ureolyticus | 330 | GQ167666 | clade_504 | N | N |
| Campylobacter gracilis | 463 | ACYG01000026 | clade_504 | N | OP |
| Campylobacter hominis | 464 | NC_009714 | clade_504 | N | OP |
| Dialister invisus | 762 | ACIM02000001 | clade_506 | N | N |
| Dialister micraerophilus | 763 | AFBB01000028 | clade_506 | N | N |
| Dialister microaerophilus | 764 | AENT01000008 | clade_506 | N | N |
| Dialister propionicifaciens | 766 | NR_043231 | clade_506 | N | N |
| Dialister succinatiphilus | 768 | AB370249 | clade_506 | N | N |
| Megasphaera elsdenii | 1200 | AY038996 | clade_506 | N | N |
| Megasphaera genomosp. type_1 | 1202 | ADGP01000010 | clade_506 | N | N |
| Megasphaera sp. BLPYG_07 | 1204 | HM990964 | clade_506 | N | N |
| Megasphaera sp. UPII 199_6 | 1205 | AFIJ01000040 | clade_506 | N | N |
| Chromobacterium violaceum | 513 | NC_005085 | clade_507 | N | N |
| Laribacter hongkongensis | 1148 | CP001154 | clade_507 | N | N |
| Methylophilus sp. ECd5 | 1229 | AY436794 | clade_507 | N | N |
| Finegoldia magna | 883 | ACHM02000001 | clade_509 | N | N |
| Parvimonas micra | 1431 | AB729072 | clade_509 | N | N |
| Parvimonas sp. oral taxon 110 | 1432 | AFII01000002 | clade_509 | N | N |
| Peptostreptococcus micros | 1456 | AM176538 | clade_509 | N | N |
| Peptostreptococcus sp. oral clone FJ023 | 1460 | AY349390 | clade_509 | N | N |
| Peptostreptococcus sp. P4P_31 P3 | 1458 | AY207059 | clade_509 | N | N |
| Helicobacter pylori | 997 | CP000012 | clade_510 | N | OP |
| Anaplasma marginale | 165 | ABOR01000019 | clade_511 | N | N |
| Anaplasma phagocytophilum | 166 | NC_007797 | clade_511 | N | N |
| Ehrlichia chaffeensis | 783 | AAIF01000035 | clade_511 | N | OP |
| Neorickettsia risticii | 1349 | CP001431 | clade_511 | N | N |
| Neorickettsia sennetsu | 1350 | NC_007798 | clade_511 | N | N |
| Pseudoramibacter alactolyticus | 1606 | AB036759 | clade_512 | N | N |
| Veillonella montpellierensis | 1977 | AF473836 | clade_513 | N | N |
| Veillonella sp. oral clone ASCA08 | 1988 | AY923118 | clade_513 | N | N |
| Veillonella sp. oral clone ASCB03 | 1989 | AY923122 | clade_513 | N | N |
| Inquilinus limosus | 1012 | NR_029046 | clade_514 | N | N |
| Sphingomonas sp. oral clone FZ016 | 1746 | AY349412 | clade_514 | N | N |
| Anaerococcus lactolyticus | 145 | ABYO01000217 | clade_515 | N | N |
| Anaerococcus prevotii | 147 | CP001708 | clade_515 | N | N |
| Anaerococcus sp. gpac104 | 152 | AM176528 | clade_515 | N | N |
| Anaerococcus sp. gpac126 | 153 | AM176530 | clade_515 | N | N |
| Anaerococcus sp. gpac155 | 154 | AM176536 | clade_515 | N | N |
| Anaerococcus sp. gpac199 | 155 | AM176539 | clade_515 | N | N |
| Anaerococcus tetradius | 157 | ACGC01000107 | clade_515 | N | N |
| Bacteroides coagulans | 271 | AB547639 | clade_515 | N | N |
| Clostridiales bacterium 9403326 | 534 | HM587324 | clade_515 | N | N |
| Clostridiales bacterium ph2 | 539 | JN837487 | clade_515 | N | N |
| Peptostreptococcus sp. 9succ1 | 1457 | X90471 | clade_515 | N | N |
| Peptostreptococcus sp. oral clone AP24 | 1459 | AB175072 | clade_515 | N | N |
| Tissierella praeacuta | 1924 | NR_044860 | clade_515 | N | N |
| Helicobacter canadensis | 994 | ABQS01000108 | clade_518 | N | N |
| Peptostreptococcus anaerobius | 1455 | AY326462 | clade_520 | N | N |
| Peptostreptococcus stomatis | 1461 | ADGQ01000048 | clade_520 | N | N |
| Bilophila wadsworthia | 367 | ADCP01000166 | clade_521 | N | N |
| Desulfovibrio vulgaris | 761 | NR_074897 | clade_521 | N | N |
| Actinomyces nasicola | 64 | AJ508455 | clade_523 | N | N |
| Cellulosimicrobium funkei | 500 | AY501364 | clade_523 | N | N |
| Lactococcus raffinolactis | 1146 | NR_044359 | clade_524 | N | N |
| Bacteroidales genomosp. P1 | 258 | AY341819 | clade_529 | N | N |
| Bacteroidales genomosp. P2 oral clone MB1_G13 | 259 | DQ003613 | clade_529 | N | N |
| Bacteroidales genomosp. P3 oral clone MB1_G34 | 260 | DQ003615 | clade_529 | N | N |
| Bacteroidales genomosp. P4 oral clone MB2_G17 | 261 | DQ003617 | clade_529 | N | N |
| Bacteroidales genomosp. P5 oral clone MB2_P04 | 262 | DQ003619 | clade_529 | N | N |
| Bacteroidales genomosp. P6 oral clone MB3_C19 | 263 | DQ003634 | clade_529 | N | N |
| Bacteroidales genomosp. P8 oral clone MB4_G15 | 265 | DQ003626 | clade_529 | N | N |
| Bacteroidetes bacterium oral taxon D27 | 333 | HM099638 | clade_530 | N | N |
| Bacteroidetes bacterium oral taxon F31 | 334 | HM099643 | clade_530 | N | N |
| Bacteroidetes bacterium oral taxon F44 | 335 | HM099649 | clade_530 | N | N |
| Flavobacterium sp. NF2_1 | 885 | FJ195988 | clade_530 | N | N |
| Myroides odoratimimus | 1326 | NR_042354 | clade_530 | N | N |
| Myroides sp. MY15 | 1327 | GU253339 | clade_530 | N | N |
| Chlamydiales bacterium NS16 | 507 | JN606076 | clade_531 | N | N |
| Chlamydophila pecorum | 508 | D88317 | clade_531 | N | OP |
| Parachlamydia sp. UWE25 | 1423 | BX908798 | clade_531 | N | N |
| Fusobacterium russii | 903 | NR_044687 | clade_532 | N | N |
| Streptobacillus moniliformis | 1784 | NR_027615 | clade_532 | N | N |
| Eubacteriaceae bacterium P4P_50 P4 | 833 | AY207060 | clade_533 | N | N |
| Abiotrophia defectiva | 1 | ACIN02000016 | clade_534 | N | N |
| Abiotrophia sp. oral clone P4PA_155 P1 | 3 | AY207063 | clade_534 | N | N |
| Catonella genomosp. P1 oral clone MB5_P12 | 496 | DQ003629 | clade_534 | N | N |
| Catonella morbi | 497 | ACIL02000016 | clade_534 | N | N |
| Catonella sp. oral clone FL037 | 498 | AY349369 | clade_534 | N | N |
| Eremococcus coleocola | 818 | AENN01000008 | clade_534 | N | N |
| Facklamia hominis | 879 | Y10772 | clade_534 | N | N |
| Granulicatella sp. M658_99_3 | 962 | AJ271861 | clade_534 | N | N |
| Campylobacter coli | 459 | AAFL01000004 | clade_535 | N | OP |
| Campylobacter concisus | 460 | CP000792 | clade_535 | N | OP |
| Campylobacter fetus | 462 | ACLG01001177 | clade_535 | N | OP |
| Campylobacter jejuni | 465 | AL139074 | clade_535 | N | Category-B |
| Campylobacter upsaliensis | 473 | AEPU01000040 | clade_535 | N | OP |
| Atopobium minutum | 183 | HM007583 | clade_539 | N | N |
| Atopobium parvulum | 184 | CP001721 | clade_539 | N | N |
| Atopobium rimae | 185 | ACFE01000007 | clade_539 | N | N |
| Atopobium sp. BS2 | 186 | HQ616367 | clade_539 | N | N |
| Atopobium sp. F0209 | 187 | EU592966 | clade_539 | N | N |
| Atopobium sp. ICM42b10 | 188 | HQ616393 | clade_539 | N | N |
| Atopobium sp. ICM57 | 189 | HQ616400 | clade_539 | N | N |
| Atopobium vaginae | 190 | AEDQ01000024 | clade_539 | N | N |
| Coriobacteriaceae bacterium BV3Ac1 | 677 | JN809768 | clade_539 | N | N |
| Actinomyces naeslundii | 63 | X81062 | clade_54 | N | N |
| Actinomyces oricola | 67 | NR_025559 | clade_54 | N | N |
| Actinomyces oris | 69 | BABV01000070 | clade_54 | N | N |
| Actinomyces sp. 7400942 | 70 | EU484334 | clade_54 | N | N |
| Actinomyces sp. ChDC B197 | 72 | AF543275 | clade_54 | N | N |
| Actinomyces sp. GEJ15 | 73 | GU561313 | clade_54 | N | N |
| Actinomyces sp. M2231_94_1 | 79 | AJ234063 | clade_54 | N | N |
| Actinomyces sp. oral clone GU067 | 83 | AY349362 | clade_54 | N | N |
| Actinomyces sp. oral clone IO077 | 85 | AY349364 | clade_54 | N | N |
| Actinomyces sp. oral clone IP073 | 86 | AY349365 | clade_54 | N | N |
| Actinomyces sp. oral clone JA063 | 88 | AY349367 | clade_54 | N | N |
| Actinomyces sp. oral taxon 170 | 89 | AFBL01000010 | clade_54 | N | N |
| Actinomyces sp. oral taxon 171 | 90 | AECW01000034 | clade_54 | N | N |
| Actinomyces urogenitalis | 95 | ACFH01000038 | clade_54 | N | N |
| Actinomyces viscosus | 96 | ACRE01000096 | clade_54 | N | N |
| Orientia tsutsugamushi | 1383 | AP008981 | clade_541 | N | OP |
| Megamonas funiformis | 1198 | AB300988 | clade_542 | N | N |
| Megamonas hypermegale | 1199 | AJ420107 | clade_542 | N | N |
| Aeromicrobium marinum | 102 | NR_025681 | clade_544 | N | N |
| Aeromicrobium sp. JC14 | 103 | JF824798 | clade_544 | N | N |
| Luteococcus sanguinis | 1190 | NR_025507 | clade_544 | N | N |
| Propionibacteriaceae bacterium NML 02_0265 | 1568 | EF599122 | clade_544 | N | N |
| Rhodococcus corynebacterioides | 1622 | X80615 | clade_546 | N | N |
| Rhodococcus erythropolis | 1624 | ACNO01000030 | clade_546 | N | N |
| Rhodococcus fascians | 1625 | NR_037021 | clade_546 | N | N |
| Segniliparus rotundus | 1690 | CP001958 | clade_546 | N | N |
| Segniliparus rugosus | 1691 | ACZI01000025 | clade_546 | N | N |
| Exiguobacterium acetylicum | 878 | FJ970034 | clade_547 | N | N |
| Macrococcus caseolyticus | 1194 | NR_074941 | clade_547 | N | N |
| Streptomyces sp. 1 AIP_2009 | 1890 | FJ176782 | clade_548 | N | N |
| Streptomyces sp. SD 524 | 1892 | EU544234 | clade_548 | N | N |
| Streptomyces sp. SD 528 | 1893 | EU544233 | clade_548 | N | N |
| Streptomyces thermoviolaceus | 1895 | NR_027616 | clade_548 | N | N |
| Borrelia afzelii | 388 | ABCU01000001 | clade_549 | N | OP |
| Borrelia crocidurae | 390 | DQ057990 | clade_549 | N | OP |
| Borrelia duttonii | 391 | NC_011229 | clade_549 | N | OP |
| Borrelia hermsii | 393 | AY597657 | clade_549 | N | OP |
| Borrelia hispanica | 394 | DQ057988 | clade_549 | N | OP |
| Borrelia persica | 395 | HM161645 | clade_549 | N | OP |
| Borrelia recurrentis | 396 | AF107367 | clade_549 | N | OP |
| Borrelia spielmanii | 398 | ABKB01000002 | clade_549 | N | OP |
| Borrelia turicatae | 399 | NC_008710 | clade_549 | N | OP |
| Borrelia valaisiana | 400 | ABCY01000002 | clade_549 | N | OP |
| Providencia alcalifaciens | 1586 | ABXW01000071 | clade_55 | N | N |
| Providencia rettgeri | 1587 | AM040492 | clade_55 | N | N |
| Providencia rustigianii | 1588 | AM040489 | clade_55 | N | N |
| Providencia stuartii | 1589 | AF008581 | clade_55 | N | N |
| Treponema pallidum | 1932 | CP001752 | clade_550 | N | OP |
| Treponema phagedenis | 1934 | AEFH01000172 | clade_550 | N | N |
| Treponema sp. clone DDKL_4 | 1939 | Y08894 | clade_550 | N | N |
| Acholeplasma laidlawii | 17 | NR_074448 | clade_551 | N | N |
| Mycoplasma putrefaciens | 1323 | U26055 | clade_551 | N | N |
| Mycoplasmataceae genomosp. P1 oral clone MB1_G23 | 1325 | DQ003614 | clade_551 | N | N |
| Spiroplasma insolitum | 1750 | NR_025705 | clade_551 | N | N |
| Collinsella intestinalis | 660 | ABXH02000037 | clade_553 | N | N |
| Collinsella stercoris | 661 | ABXJ01000150 | clade_553 | N | N |
| Collinsella tanakaei | 662 | AB490807 | clade_553 | N | N |
| Caminicella sporogenes | 458 | NR_025485 | clade_554 | N | N |
| Acidaminococcus fermentans | 21 | CP001859 | clade_556 | N | N |
| Acidaminococcus intestini | 22 | CP003058 | clade_556 | N | N |
| Acidaminococcus sp. D21 | 23 | ACGB01000071 | clade_556 | N | N |
| Phascolarctobacterium faecium | 1462 | NR_026111 | clade_556 | N | N |
| Phascolarctobacterium sp. YIT 12068 | 1463 | AB490812 | clade_556 | N | N |
| Phascolarctobacterium succinatutens | 1464 | AB490811 | clade_556 | N | N |
| Acidithiobacillus ferrivorans | 25 | NR_074660 | clade_557 | N | N |
| Xanthomonadaceae bacterium NML 03_0222 | 2015 | EU313791 | clade_557 | N | N |
| Catabacter hongkongensis | 494 | AB671763 | clade_558 | N | N |
| Christensenella minuta | 512 | AB490809 | clade_558 | N | N |
| Clostridiales bacterium oral clone P4PA_66 P1 | 536 | AY207065 | clade_558 | N | N |
| Clostridiales bacterium oral taxon 093 | 537 | GQ422712 | clade_558 | N | N |
| Heliobacterium modesticaldum | 1000 | NR_074517 | clade_560 | N | N |
| Alistipes indistinctus | 130 | AB490804 | clade_561 | N | N |
| Bacteroidales bacterium ph 8 | 257 | JN837494 | clade_561 | N | N |
| Candidates Sulcia muelleri | 475 | CP002163 | clade_561 | N | N |
| Cytophaga xylanolytica | 742 | FR733683 | clade_561 | N | N |
| Flavobacteriaceae genomosp. C1 | 884 | AY278614 | clade_561 | N | N |
| Gramella forsetii | 958 | NR_074707 | clade_561 | N | N |
| Sphingobacterium faecium | 1740 | NR_025537 | clade_562 | N | N |
| Sphingobacterium mizutaii | 1741 | JF708889 | clade_562 | N | N |
| Sphingobacterium multivorum | 1742 | NR_040953 | clade_562 | N | N |
| Sphingobacterium spiritivorum | 1743 | ACHA02000013 | clade_562 | N | N |
| Jonquetella anthropi | 1017 | ACOO02000004 | clade_563 | N | N |
| Pyramidobacter piscolens | 1614 | AY207056 | clade_563 | N | N |
| Synergistes genomosp. C1 | 1904 | AY278615 | clade_563 | N | N |
| Synergistes sp. RMA 14551 | 1905 | DQ412722 | clade_563 | N | N |
| Synergistetes bacterium ADV897 | 1906 | GQ258968 | clade_563 | N | N |
| Candidates Arthromitus sp. | 474 | NR_074460 | clade_564 | N | N |
| SFB_mouse_Yit | | | | | |
| Gracilibacter thermotolerans | 957 | NR_043559 | clade_564 | N | N |
| Brachyspira aalborgi | 404 | FM178386 | clade_565 | N | N |
| Brachyspira sp. HIS3 | 406 | FM178387 | clade_565 | N | N |
| Brachyspira sp. HIS4 | 407 | FM178388 | clade_565 | N | N |
| Brachyspira sp. HIS5 | 408 | FM178389 | clade_565 | N | N |
| Adlercreutzia equolifaciens | 97 | AB306661 | clade_566 | N | N |
| Coriobacteriaceae bacterium JC110 | 678 | CAEM01000062 | clade_566 | N | N |
| Coriobacteriaceae bacterium phI | 679 | JN837493 | clade_566 | N | N |
| Cryptobacterium curtum | 740 | GQ422741 | clade_566 | N | N |
| Eggerthella sinensis | 779 | AY321958 | clade_566 | N | N |
| Eggerthella sp. 1_3_56FAA | 780 | ACWN01000099 | clade_566 | N | N |
| Eggerthella sp. HGA1 | 781 | AEXR01000021 | clade_566 | N | N |
| Eggerthella sp. YY7918 | 782 | AP012211 | clade_566 | N | N |
| Gordonibacter pamelaeae | 680 | AM886059 | clade_566 | N | N |
| Gordonibacter pamelaeae | 956 | FP929047 | clade_566 | N | N |
| Slackia equolifaciens | 1732 | EU377663 | clade_566 | N | N |
| Slackia exigua | 1733 | ACUX01000029 | clade_566 | N | N |
| Slackia faecicanis | 1734 | NR_042220 | clade_566 | N | N |
| Slackia heliotrinireducens | 1735 | NR_074439 | clade_566 | N | N |
| Slackia isoflavoniconvertens | 1736 | AB566418 | clade_566 | N | N |
| Slackia piriformis | 1737 | AB490806 | clade_566 | N | N |
| Slackia sp. NATTS | 1738 | AB505075 | clade_566 | N | N |
| Chlamydiales bacterium NS13 | 506 | JN606075 | clade_567 | N | N |
| Victivallaceae bacterium NML 080035 | 2003 | FJ394915 | clade_567 | N | N |
| Victivallis vadensis | 2004 | ABDE02000010 | clade_567 | N | N |
| Streptomyces griseus | 1889 | NR_074787 | clade_573 | N | N |
| Streptomyces sp. SD 511 | 1891 | EU544231 | clade_573 | N | N |
| Streptomyces sp. SD 534 | 1894 | EU544232 | clade_573 | N | N |
| Cloacibacillus evryensis | 530 | GQ258966 | clade_575 | N | N |
| Deferribacteres sp. oral clone JV001 | 743 | AY349370 | clade_575 | N | N |
| Deferribacteres sp. oral clone JV023 | 745 | AY349372 | clade_575 | N | N |
| Synergistetes bacterium LBVCM1157 | 1907 | GQ258969 | clade_575 | N | N |
| Synergistetes bacterium oral taxon 362 | 1909 | GU410752 | clade_575 | N | N |
| Synergistetes bacterium oral taxon D48 | 1910 | GU430992 | clade_575 | N | N |
| Peptococcus sp. oral clone JM048 | 1439 | AY349389 | clade_576 | N | N |
| Helicobacter winghamensis | 999 | ACDO01000013 | clade_577 | N | N |
| Wolinella succinogenes | 2014 | BX571657 | clade_577 | N | N |
| Olsenella genomosp. C1 | 1368 | AY278623 | clade_578 | N | N |
| Olsenella profusa | 1369 | FN178466 | clade_578 | N | N |
| Olsenella sp. F0004 | 1370 | EU592964 | clade_578 | N | N |
| Olsenella sp. oral taxon 809 | 1371 | ACVE01000002 | clade_578 | N | N |
| Olsenella uli | 1372 | CP002106 | clade_578 | N | N |
| Nocardiopsis dassonvillei | 1356 | CP002041 | clade_579 | N | N |
| Peptococcus niger | 1438 | NR_029221 | clade_580 | N | N |
| Peptococcus sp. oral taxon 167 | 1440 | GQ422727 | clade_580 | N | N |
| Akkermansia muciniphila | 118 | CP001071 | clade_583 | N | N |
| Opitutus terrae | 1373 | NR_074978 | clade_583 | N | N |
| Clostridiales bacterium oral taxon F32 | 538 | HM099644 | clade_584 | N | N |
| Leptospira borgpetersenii | 1161 | NC_008508 | clade_585 | N | OP |
| Leptospira broomii | 1162 | NR_043200 | clade_585 | N | OP |
| Leptospira interrogans | 1163 | NC_005823 | clade_585 | N | OP |
| Methanobrevibacter gottschalkii | 1213 | NR_044789 | clade_587 | N | N |
| Methanobrevibacter millerae | 1214 | NR_042785 | clade_587 | N | N |
| Methanobrevibacter oralis | 1216 | HE654003 | clade_587 | N | N |
| Methanobrevibacter thaueri | 1219 | NR_044787 | clade_587 | N | N |
| Methanobrevibacter smithii | 1218 | ABYV02000002 | clade_588 | N | N |
| Deinococcus radiodurans | 746 | AE000513 | clade_589 | N | N |
| Deinococcus sp. R_43890 | 747 | FR682752 | clade_589 | N | N |
| Thermus aquaticus | 1923 | NR_025900 | clade_589 | N | N |
| Actinomyces sp. c109 | 81 | AB167239 | clade_590 | N | N |
| Syntrophomonadaceae genomosp. P1 | 1912 | AY341821 | clade_590 | N | N |
| Anaerobaculum hydrogeniformans | 141 | ACJX02000009 | clade_591 | N | N |
| Microcystis aeruginosa | 1246 | NC_010296 | clade_592 | N | N |
| Prochlorococcus marinus | 1567 | CP000551 | clade_592 | N | N |
| Methanobrevibacter acididurans | 1208 | NR_028779 | clade_593 | N | N |
| Methanobrevibacter arboriphilus | 1209 | NR_042783 | clade_593 | N | N |
| Methanobrevibacter curvatus | 1210 | NR_044796 | clade_593 | N | N |
| Methanobrevibacter cuticularis | 1211 | NR_044776 | clade_593 | N | N |
| Methanobrevibacter filiformis | 1212 | NR_044801 | clade_593 | N | N |
| Methanobrevibacter woesei | 1220 | NR_044788 | clade_593 | N | N |
| Roseiflexus castenholzii | 1642 | CP000804 | clade_594 | N | N |
| Methanobrevibacter olleyae | 1215 | NR_043024 | clade_595 | N | N |
| Methanobrevibacter ruminantium | 1217 | NR_042784 | clade_595 | N | N |
| Methanobrevibacter wolinii | 1221 | NR_044790 | clade_595 | N | N |
| Methanosphaera stadtmanae | 1222 | AY196684 | clade_595 | N | N |
| Chloroflexi genomosp. P1 | 511 | AY331414 | clade_596 | N | N |
| Halorubrum lipolyticum | 992 | AB477978 | clade_597 | N | N |
| Methanobacterium formicicum | 1207 | NR_025028 | clade_597 | N | N |
| Acidilobus saccharovorans | 24 | AY350586 | clade_598 | N | N |
| Hyperthermus butylicus | 1006 | CP000493 | clade_598 | N | N |
| Ignicoccus islandicus | 1011 | X99562 | clade_598 | N | N |
| Metallosphaera sedula | 1206 | D26491 | clade_598 | N | N |
| Thermofilum pendens | 1922 | X14835 | clade_598 | N | N |
| Prevotella melaninogenica | 1506 | CP002122 | clade_6 | N | N |
| Prevotella sp. ICM1 | 1520 | HQ616385 | clade_6 | N | N |
| Prevotella sp. oral clone FU048 | 1535 | AY349393 | clade_6 | N | N |
| Prevotella sp. oral clone GI030 | 1537 | AY349395 | clade_6 | N | N |
| Prevotella sp. SEQ116 | 1526 | JN867246 | clade_6 | N | N |
| Streptococcus anginosus | 1787 | AECT01000011 | clade_60 | N | N |
| Streptococcus milleri | 1812 | X81023 | clade_60 | N | N |
| Streptococcus sp. 16362 | 1829 | JN590019 | clade_60 | N | N |
| Streptococcus sp. 69130 | 1832 | X78825 | clade_60 | N | N |
| Streptococcus sp. AC15 | 1833 | HQ616356 | clade_60 | N | N |
| Streptococcus sp. CM7 | 1839 | HQ616373 | clade_60 | N | N |
| Streptococcus sp. OBRC6 | 1847 | HQ616352 | clade_60 | N | N |
| Burkholderia ambifaria | 442 | AAUZ01000009 | clade_61 | N | OP |
| Burkholderia cenocepacia | 443 | AAHI01000060 | clade_61 | N | OP |
| Burkholderia cepacia | 444 | NR_041719 | clade_61 | N | OP |
| Burkholderia mallei | 445 | CP000547 | clade_61 | N | Category-B |
| Burkholderia multivorans | 446 | NC_010086 | clade_61 | N | OP |
| Burkholderia oklahomensis | 447 | DQ108388 | clade_61 | N | OP |
| Burkholderia pseudomallei | 448 | CP001408 | clade_61 | N | Category-B |
| Burkholderia rhizoxinica | 449 | HQ005410 | clade_61 | N | OP |
| Burkholderia sp. 383 | 450 | CP000151 | clade_61 | N | OP |
| Burkholderia xenovorans | 451 | U86373 | clade_61 | N | OP |
| Prevotella buccae | 1488 | ACRB01000001 | clade_62 | N | N |
| Prevotella genomosp. P8 oral clone MB3_P13 | 1498 | DQ003622 | clade_62 | N | N |
| Prevotella sp. oral clone FW035 | 1536 | AY349394 | clade_62 | N | N |
| Prevotella bivia | 1486 | ADFO01000096 | clade_63 | N | N |
| Prevotella disiens | 1494 | AEDO01000026 | clade_64 | N | N |
| Bacteroides faecis | 276 | GQ496624 | clade_65 | N | N |
| Bacteroides fragilis | 279 | AP006841 | clade_65 | N | N |
| Bacteroides nordii | 285 | NR_043017 | clade_65 | N | N |
| Bacteroides salyersiae | 292 | EU136690 | clade_65 | N | N |
| Bacteroides sp. 1_1_14 | 293 | ACRP01000155 | clade_65 | N | N |
| Bacteroides sp. 1_1_6 | 295 | ACIC01000215 | clade_65 | N | N |
| Bacteroides sp. 2_1_56FAA | 298 | ACWI01000065 | clade_65 | N | N |
| Bacteroides sp. AR29 | 316 | AF139525 | clade_65 | N | N |
| Bacteroides sp. B2 | 317 | EU722733 | clade_65 | N | N |
| Bacteroides thetaiotaomicron | 328 | NR_074277 | clade_65 | N | N |
| Actinobacillus minor | 45 | ACFT01000025 | clade_69 | N | N |
| Haemophilias parasuis | 978 | GU226366 | clade_69 | N | N |
| Vibrio cholerae | 1996 | AAUR01000095 | clade_71 | N | Category-B |
| Vibrio fluvialis | 1997 | X76335 | clade_71 | N | Category-B |
| Vibrio furnissii | 1998 | CP002377 | clade_71 | N | Category-B |
| Vibrio mimicus | 1999 | ADAF01000001 | clade_71 | N | Category-B |
| Vibrio parahaemolyticus | 2000 | AAWQ01000116 | clade_71 | N | Category-B |
| Vibrio sp. RC341 | 2001 | ACZT01000024 | clade_71 | N | Category-B |
| Vibrio vulnificus | 2002 | AE016796 | clade_71 | N | Category-B |
| Lactobacillus acidophilus | 1067 | CP000033 | clade_72 | N | N |
| Lactobacillus amylolyticus | 1069 | ADNY01000006 | clade_72 | N | N |
| Lactobacillus amylovorus | 1070 | CP002338 | clade_72 | N | N |
| Lactobacillus crispatus | 1078 | ACOG01000151 | clade_72 | N | N |
| Lactobacillus delbrueckii | 1080 | CP002341 | clade_72 | N | N |
| Lactobacillus helveticus | 1088 | ACLM01000202 | clade_72 | N | N |
| Lactobacillus kalixensis | 1094 | NR_029083 | clade_72 | N | N |
| Lactobacillus kefiranofaciens | 1095 | NR_042440 | clade_72 | N | N |
| Lactobacillus leichmannii | 1098 | JX986966 | clade_72 | N | N |
| Lactobacillus sp. 66c | 1120 | FR681900 | clade_72 | N | N |
| Lactobacillus sp. KLDS 1.0701 | 1122 | EU600905 | clade_72 | N | N |
| Lactobacillus sp. KLDS 1.0712 | 1130 | EU600916 | clade_72 | N | N |
| Lactobacillus sp. oral clone HT070 | 1136 | AY349383 | clade_72 | N | N |
| Lactobacillus ultunensis | 1139 | ACGU01000081 | clade_72 | N | N |
| Prevotella intermedia | 1502 | AF414829 | clade_81 | N | N |
| Prevotella nigrescens | 1511 | AFPX01000069 | clade_81 | N | N |
| Prevotella pallens | 1515 | AFPY01000135 | clade_81 | N | N |
| Prevotella sp. oral taxon 310 | 1551 | GQ422737 | clade_81 | N | N |
| Prevotella genomosp. C1 | 1495 | AY278624 | clade_82 | N | N |
| Prevotella sp. CM38 | 1519 | HQ610181 | clade_82 | N | N |
| Prevotella sp. oral taxon 317 | 1552 | ACQH01000158 | clade_82 | N | N |
| Prevotella sp. SG12 | 1527 | GU561343 | clade_82 | N | N |
| Prevotella denticola | 1493 | CP002589 | clade_83 | N | N |
| Prevotella genomosp. P7 oral clone MB2_P31 | 1497 | DQ003620 | clade_83 | N | N |
| Prevotella histicola | 1501 | JN867315 | clade_83 | N | N |
| Prevotella multiformis | 1508 | AEWX01000054 | clade_83 | N | N |
| Prevotella sp. JCM 6330 | 1522 | AB547699 | clade_83 | N | N |
| Prevotella sp. oral clone GI059 | 1539 | AY349397 | clade_83 | N | N |
| Prevotella sp. oral taxon 782 | 1555 | GQ422745 | clade_83 | N | N |
| Prevotella sp. oral taxon G71 | 1559 | GU432180 | clade_83 | N | N |
| Prevotella sp. SEQ065 | 1524 | JN867234 | clade_83 | N | N |
| Prevotella veroralis | 1565 | ACVA01000027 | clade_83 | N | N |
| Bacteroides acidifaciens | 266 | NR_028607 | clade_85 | N | N |
| Bacteroides cellulosilyticus | 269 | ACCH01000108 | clade_85 | N | N |
| Bacteroides clarus | 270 | AFBM01000011 | clade_85 | N | N |
| Bacteroides eggerthii | 275 | ACWG01000065 | clade_85 | N | N |
| Bacteroides oleiciplenus | 286 | AB547644 | clade_85 | N | N |
| Bacteroides pyogenes | 290 | NR_041280 | clade_85 | N | N |
| Bacteroides sp. 315_5 | 300 | FJ848547 | clade_85 | N | N |
| Bacteroides sp. 31SF15 | 301 | AJ583248 | clade_85 | N | N |
| Bacteroides sp. 31SF18 | 302 | AJ583249 | clade_85 | N | N |
| Bacteroides sp. 35AE31 | 303 | AJ583244 | clade_85 | N | N |
| Bacteroides sp. 35AE37 | 304 | AJ583245 | clade_85 | N | N |
| Bacteroides sp. 35BE34 | 305 | AJ583246 | clade_85 | N | N |
| Bacteroides sp. 35BE35 | 306 | AJ583247 | clade_85 | N | N |
| Bacteroides sp. WH2 | 324 | AY895180 | clade_85 | N | N |
| Bacteroides sp. XB12B | 325 | AM230648 | clade_85 | N | N |
| Bacteroides stercoris | 327 | ABFZ02000022 | clade_85 | N | N |
| Actinobacillus pleuropneumoniae | 46 | NR_074857 | clade_88 | N | N |
| Actinobacillus ureae | 48 | AEVG01000167 | clade_88 | N | N |
| Haemophilus aegyptius | 969 | AFBC01000053 | clade_88 | N | N |
| Haemophilus ducreyi | 970 | AE017143 | clade_88 | N | OP |
| Haemophilus haemolyticus | 973 | JN175335 | clade_88 | N | N |
| Haemophilus influenzae | 974 | AADP01000001 | clade_88 | N | OP |
| Haemophilus parahaemolyticus | 975 | GU561425 | clade_88 | N | N |
| Haemophilus parainfluenzae | 976 | AEWU01000024 | clade_88 | N | N |
| Haemophilus paraphrophaemolyticus | 977 | M75076 | clade_88 | N | N |
| Haemophilus somnus | 979 | NC_008309 | clade_88 | N | N |
| Haemophilus sp. 70334 | 980 | HQ680854 | clade_88 | N | N |
| Haemophilus sp. HK445 | 981 | FJ685624 | clade_88 | N | N |
| Haemophilus sp. oral clone ASCA07 | 982 | AY923117 | clade_88 | N | N |
| Haemophilus sp. oral clone ASCG06 | 983 | AY923147 | clade_88 | N | N |
| Haemophilus sp. oral clone BJ021 | 984 | AY005034 | clade_88 | N | N |
| Haemophilus sp. oral clone BJ095 | 985 | AY005033 | clade_88 | N | N |
| Haemophilus sp. oral taxon 851 | 987 | AGRK01000004 | clade_88 | N | N |
| Haemophilus sputorum | 988 | AFNK01000005 | clade_88 | N | N |
| Histophilus somni | 1003 | AF549387 | clade_88 | N | N |
| Mannheimia haemolytica | 1195 | ACZX01000102 | clade_88 | N | N |
| Pasteurella bettyae | 1433 | L06088 | clade_88 | N | N |
| Moellerella wisconsensis | 1253 | JN175344 | clade_89 | N | N |
| Morganella morganii | 1265 | AJ301681 | clade_89 | N | N |
| Morganella sp. JB_T16 | 1266 | AJ781005 | clade_89 | N | N |
| Proteus mirabilis | 1582 | ACLE01000013 | clade_89 | N | N |
| Proteus penneri | 1583 | ABVP01000020 | clade_89 | N | N |
| Proteus sp. HS7514 | 1584 | DQ512963 | clade_89 | N | N |
| Proteus vulgaris | 1585 | AJ233425 | clade_89 | N | N |
| Oribacterium sinus | 1374 | ACKX1000142 | clade_90 | N | N |
| Oribacterium sp. ACB1 | 1375 | HM120210 | clade_90 | N | N |
| Oribacterium sp. ACB7 | 1376 | HM120211 | clade_90 | N | N |
| Oribacterium sp. CM12 | 1377 | HQ616374 | clade_90 | N | N |
| Oribacterium sp. ICM51 | 1378 | HQ616397 | clade_90 | N | N |
| Oribacterium sp. OBRC12 | 1379 | HQ616355 | clade_90 | N | N |
| Oribacterium sp. oral taxon 108 | 1382 | AFIH01000001 | clade_90 | N | N |
| Actinobacillus actinomycetemcomitans | 44 | AY362885 | clade_92 | N | N |
| Actinobacillus succinogenes | 47 | CP000746 | clade_92 | N | N |
| Aggregatibacter actinomycetemcomitans | 112 | CP001733 | clade_92 | N | N |
| Aggregatibacter aphrophilus | 113 | CP001607 | clade_92 | N | N |
| Aggregatibacter segnis | 114 | AEPS01000017 | clade_92 | N | N |
| Averyella dalhousiensis | 194 | DQ481464 | clade_92 | N | N |
| Bisgaard Taxon | 368 | AY683487 | clade_92 | N | N |
| Bisgaard Taxon | 369 | AY683489 | clade_92 | N | N |
| Bisgaard Taxon | 370 | AY683491 | clade_92 | N | N |
| Bisgaard Taxon | 371 | AY683492 | clade_92 | N | N |
| Buchnera aphidicola | 440 | NR_074609 | clade_92 | N | N |
| Cedecea davisae | 499 | AF493976 | clade_92 | N | N |
| Citrobacter amalonaticus | 517 | FR870441 | clade_92 | N | N |
| Citrobacter braakii | 518 | NR_028687 | clade_92 | N | N |
| Citrobacter farmeri | 519 | AF025371 | clade_92 | N | N |
| Citrobacter freundii | 520 | NR_028894 | clade_92 | N | N |
| Citrobacter gillenii | 521 | AF025367 | clade_92 | N | N |
| Citrobacter koseri | 522 | NC_009792 | clade_92 | N | N |
| Citrobacter murliniae | 523 | AF025369 | clade_92 | N | N |
| Citrobacter rodentium | 524 | NR_074903 | clade_92 | N | N |
| Citrobacter sedlakii | 525 | AF025364 | clade_92 | N | N |
| Citrobacter sp. 30_2 | 526 | ACDJ01000053 | clade_92 | N | N |
| Citrobacter sp. KMSI_3 | 527 | GQ468398 | clade_92 | N | N |
| Citrobacter werkmanii | 528 | AF025373 | clade_92 | N | N |
| Citrobacter youngae | 529 | ABWL02000011 | clade_92 | N | N |
| Cronobacter malonaticus | 737 | GU122174 | clade_92 | N | N |
| Cronobacter sakazakii | 738 | NC_009778 | clade_92 | N | N |
| Cronobacter turicensis | 739 | FN543093 | clade_92 | N | N |
| Enterobacter aerogenes | 786 | AJ251468 | clade_92 | N | N |
| Enterobacter asburiae | 787 | NR_024640 | clade_92 | N | N |
| Enterobacter cancerogenus | 788 | Z96078 | clade_92 | N | N |
| Enterobacter cloacae | 789 | FP929040 | clade_92 | N | N |
| Enterobacter cowanii | 790 | NR_025566 | clade_92 | N | N |
| Enterobacter hormaechei | 791 | AFHR01000079 | clade_92 | N | N |
| Enterobacter sp. 247BMC | 792 | HQ122932 | clade_92 | N | N |
| Enterobacter sp. 638 | 793 | NR_074777 | clade_92 | N | N |
| Enterobacter sp. JC163 | 794 | JN657217 | clade_92 | N | N |
| Enterobacter sp. SCSS | 795 | HM007811 | clade_92 | N | N |
| Enterobacter sp. TSE38 | 796 | HM156134 | clade_92 | N | N |
| Enterobacteriaceae bacterium 9_2_54FAA | 797 | ADCU01000033 | clade_92 | N | N |
| Enterobacteriaceae bacterium CF01Ent_1 | 798 | AJ489826 | clade_92 | N | N |
| Enterobacteriaceae bacterium Smarlab 3302238 | 799 | AY538694 | clade_92 | N | N |
| Escherichia albertii | 824 | ABKX01000012 | clade_92 | N | N |
| Escherichia coli | 825 | NC_008563 | clade_92 | N | Category-B |
| Escherichia fergusonii | 826 | CU928158 | clade_92 | N | N |
| Escherichia hermannii | 827 | HQ407266 | clade_92 | N | N |
| Escherichia sp. 1_1_43 | 828 | ACID01000033 | clade_92 | N | N |
| Escherichia sp. 4_1_40B | 829 | ACDM02000056 | clade_92 | N | N |
| Escherichia sp. B4 | 830 | EU722735 | clade_92 | N | N |
| Escherichia vulneris | 831 | NR_041927 | clade_92 | N | N |
| Ewingella americana | 877 | JN175329 | clade_92 | N | N |
| Haemophilus genomosp. P2 oral clone MB3_C24 | 971 | DQ003621 | clade_92 | N | N |
| Haemophilus genomosp. P3 oral clone MB3_C38 | 972 | DQ003635 | clade_92 | N | N |
| Haemophilus sp. oral clone JM053 | 986 | AY349380 | clade_92 | N | N |
| Hafnia alvei | 989 | DQ412565 | clade_92 | N | N |
| Klebsiella oxytoca | 1024 | AY292871 | clade_92 | N | OP |
| Klebsiella pneumoniae | 1025 | CP000647 | clade_92 | N | OP |
| Klebsiella sp. AS10 | 1026 | HQ616362 | clade_92 | N | N |
| Klebsiella sp. Co9935 | 1027 | DQ068764 | clade_92 | N | N |
| Klebsiella sp. enrichment culture clone SRC_DSD25 | 1036 | HM195210 | clade_92 | N | N |
| Klebsiella sp. OBRC7 | 1028 | HQ616353 | clade_92 | N | N |
| Klebsiella sp. SP_BA | 1029 | FJ999767 | clade_92 | N | N |
| Klebsiella sp. SRC_DSD1 | 1033 | GU797254 | clade_92 | N | N |
| Klebsiella sp. SRC_DSD11 | 1030 | GU797263 | clade_92 | N | N |
| Klebsiella sp. SRC_DSD12 | 1031 | GU797264 | clade_92 | N | N |
| Klebsiella sp. SRC_DSD15 | 1032 | GU797267 | clade_92 | N | N |
| Klebsiella sp. SRC_DSD2 | 1034 | GU797253 | clade_92 | N | N |
| Klebsiella sp. SRC_DSD6 | 1035 | GU797258 | clade_92 | N | N |
| Klebsiella variicola | 1037 | CP001891 | clade_92 | N | N |
| Kluyvera ascorbata | 1038 | NR_028677 | clade_92 | N | N |
| Kluyvera cryocrescens | 1039 | NR_028803 | clade_92 | N | N |
| Leminorella grimontii | 1159 | AJ233421 | clade_92 | N | N |
| Leminorella richardii | 1160 | HF558368 | clade_92 | N | N |
| Pantoea agglomerans | 1409 | AY335552 | clade_92 | N | N |
| Pantoea ananatis | 1410 | CP001875 | clade_92 | N | N |
| Pantoea brenneri | 1411 | EU216735 | clade_92 | N | N |
| Pantoea citrea | 1412 | EF688008 | clade_92 | N | N |
| Pantoea conspicua | 1413 | EU216737 | clade_92 | N | N |
| Pantoea septica | 1414 | EU216734 | clade_92 | N | N |
| Pasteurella dagmatis | 1434 | ACZR01000003 | clade_92 | N | N |
| Pasteurella multocida | 1435 | NC_002663 | clade_92 | N | N |
| Plesiomonas shigelloides | 1469 | X60418 | clade_92 | N | N |
| Raoultella ornithinolytica | 1617 | AB364958 | clade_92 | N | N |
| Raoultella planticola | 1618 | AF129443 | clade_92 | N | N |
| Raoultella terrigena | 1619 | NR_037085 | clade_92 | N | N |
| Salmonella bongori | 1683 | NR_041699 | clade_92 | N | Category-B |
| Salmonella enterica | 1672 | NC_011149 | clade_92 | N | Category-B |
| Salmonella enterica | 1673 | NC_011205 | clade_92 | N | Category-B |
| Salmonella enterica | 1674 | DQ344532 | clade_92 | N | Category-B |
| Salmonella enterica | 1675 | ABEH02000004 | clade_92 | N | Category-B |
| Salmonella enterica | 1676 | ABAK02000001 | clade_92 | N | Category-B |
| Salmonella enterica | 1677 | NC_011080 | clade_92 | N | Category-B |
| Salmonella enterica | 1678 | EU118094 | clade_92 | N | Category-B |
| Salmonella enterica | 1679 | NC_011094 | clade_92 | N | Category-B |
| Salmonella enterica | 1680 | AE014613 | clade_92 | N | Category-B |
| Salmonella enterica | 1682 | ABFH02000001 | clade_92 | N | Category-B |
| Salmonella enterica | 1684 | ABEM01000001 | clade_92 | N | Category-B |
| Salmonella enterica | 1685 | ABAM02000001 | clade_92 | N | Category-B |
| Salmonella typhimurium | 1681 | DQ344533 | clade_92 | N | Category-B |
| Salmonella typhimurium | 1686 | AF170176 | clade_92 | N | Category-B |
| Serratia fonticola | 1718 | NR_025339 | clade_92 | N | N |
| Serratia liquefaciens | 1719 | NR_042062 | clade_92 | N | N |
| Serratia marcescens | 1720 | GU826157 | clade_92 | N | N |
| Serratia odorifera | 1721 | ADBY01000001 | clade_92 | N | N |
| Serratia proteamaculans | 1722 | AAUN01000015 | clade_92 | N | N |
| Shigella boydii | 1724 | AAKA01000007 | clade_92 | N | Category-B |
| Shigella dysenteriae | 1725 | NC_007606 | clade_92 | N | Category-B |
| Shigella flexneri | 1726 | AE005674 | clade_92 | N | Category-B |
| Shigella sonnei | 1727 | NC_007384 | clade_92 | N | Category-B |
| Tatumella ptyseos | 1916 | NR_025342 | clade_92 | N | N |
| Trabulsiella guamensis | 1925 | AYS73830 | clade_92 | N | N |
| Yersinia aldovae | 2019 | AJ871363 | clade_92 | N | OP |
| Yersinia aleksiciae | 2020 | AJ627597 | clade_92 | N | OP |
| Yersinia bercovieri | 2021 | AF366377 | clade_92 | N | OP |
| Yersinia enterocolitica | 2022 | FR729477 | clade_92 | N | Category-B |
| Yersinia frederiksenii | 2023 | AF366379 | clade_92 | N | OP |
| Yersinia intermedia | 2024 | AF366380 | clade_92 | N | OP |
| Yersinia kristensenii | 2025 | ACCA01000078 | clade_92 | N | OP |
| Yersinia mollaretii | 2026 | NR_027546 | clade_92 | N | OP |
| Yersinia pestis | 2027 | AE013632 | clade_92 | N | Category-A |
| Yersinia pseudotuberculosis | 2028 | NC_009708 | clade_92 | N | OP |
| Yersinia rohdei | 2029 | ACCD01000071 | clade_92 | N | OP |
| Yokenella regensburgei | 2030 | AB273739 | clade_92 | N | N |
| Conchiformibius kuhniae | 669 | NR_041821 | clade_94 | N | N |
| Morococcus cerebrosus | 1267 | JN175352 | clade_94 | N | N |
| Neisseria bacilliformis | 1328 | AFAY01000058 | clade_94 | N | N |
| Neisseria cinerea | 1329 | ACDY01000037 | clade_94 | N | N |
| Neisseria flavescens | 1331 | ACQV01000025 | clade_94 | N | N |
| Neisseria gonorrhoeae | 1333 | CP002440 | clade_94 | N | OP |
| Neisseria lactamica | 1334 | ACEQ01000095 | clade_94 | N | N |
| Neisseria macacae | 1335 | AFQE01000146 | clade_94 | N | N |
| Neisseria meningitidis | 1336 | NC_003112 | clade_94 | N | OP |
| Neisseria mucosa | 1337 | ACDX01000110 | clade_94 | N | N |
| Neisseria pharyngis | 1338 | AJ239281 | clade_94 | N | N |
| Neisseria polysaccharea | 1339 | ADBE01000137 | clade_94 | N | N |
| Neisseria sicca | 1340 | ACKO02000016 | clade_94 | N | N |
| Neisseria sp. KEM232 | 1341 | GQ203291 | clade_94 | N | N |
| Neisseria sp. oral clone AP132 | 1344 | AY005027 | clade_94 | N | N |
| Neisseria sp. oral strain B33KA | 1346 | AY005028 | clade_94 | N | N |
| Neisseria sp. oral taxon 014 | 1347 | ADEA01000039 | clade_94 | N | N |
| Neisseria sp. TM10_1 | 1343 | DQ279352 | clade_94 | N | N |
| Neisseria subflava | 1348 | ACEO01000067 | clade_94 | N | N |
| Okadaella gastrococcus | 1365 | HQ699465 | clade_98 | N | N |
| Streptococcus agalactiae | 1785 | AAJO01000130 | clade_98 | N | N |
| Streptococcus alactolyticus | 1786 | NR_041781 | clade_98 | N | N |
| Streptococcus australis | 1788 | AEQR01000024 | clade_98 | N | N |
| Streptococcus bovis | 1789 | AEEL01000030 | clade_98 | N | N |
| Streptococcus canis | 1790 | AJ413203 | clade_98 | N | N |
| Streptococcus constellatus | 1791 | AY277942 | clade_98 | N | N |
| Streptococcus cristatus | 1792 | AEVC01000028 | clade_98 | N | N |
| Streptococcus dysgalactiae | 1794 | AP010935 | clade_98 | N | N |
| Streptococcus equi | 1795 | CP001129 | clade_98 | N | N |
| Streptococcus equinus | 1796 | AEVB01000043 | clade_98 | N | N |
| Streptococcus gallolyticus | 1797 | FR824043 | clade_98 | N | N |
| Streptococcus genomosp. C1 | 1798 | AY278629 | clade_98 | N | N |
| Streptococcus genomosp. C2 | 1799 | AY278630 | clade_98 | N | N |
| Streptococcus genomosp. C3 | 1800 | AY278631 | clade_98 | N | N |
| Streptococcus genomosp. C4 | 1801 | AY278632 | clade_98 | N | N |
| Streptococcus genomosp. C5 | 1802 | AY278633 | clade_98 | N | N |
| Streptococcus genomosp. C6 | 1803 | AY278634 | clade_98 | N | N |
| Streptococcus genomosp. C7 | 1804 | AY278635 | clade_98 | N | N |
| Streptococcus genomosp. C8 | 1805 | AY278609 | clade_98 | N | N |
| Streptococcus gordonii | 1806 | NC_009785 | clade_98 | N | N |
| Streptococcus infantarius | 1807 | ABJK02000017 | clade_98 | N | N |
| Streptococcus infantis | 1808 | AFNN01000024 | clade_98 | N | N |
| Streptococcus intermedius | 1809 | NR_028736 | clade_98 | N | N |
| Streptococcus lutetiensis | 1810 | NR_037096 | clade_98 | N | N |
| Streptococcus massiliensis | 1811 | AY769997 | clade_98 | N | N |
| Streptococcus mitis | 1813 | AM157420 | clade_98 | N | N |
| Streptococcus oligofermentans | 1815 | AY099095 | clade_98 | N | N |
| Streptococcus oralis | 1816 | ADMV01000001 | clade_98 | N | N |
| Streptococcus parasanguinis | 1817 | AEKM01000012 | clade_98 | N | N |
| Streptococcus pasteurianus | 1818 | AP012054 | clade_98 | N | N |
| Streptococcus peroris | 1819 | AEVF01000016 | clade_98 | N | N |
| Streptococcus pneumoniae | 1820 | AE008537 | clade_98 | N | N |
| Streptococcus porcinus | 1821 | EF121439 | clade_98 | N | N |
| Streptococcus pseudopneumoniae | 1822 | FJ827123 | clade_98 | N | N |
| Streptococcus pseudoporcinus | 1823 | AENS01000003 | clade_98 | N | N |
| Streptococcus pyogenes | 1824 | AE006496 | clade_98 | N | OP |
| Streptococcus ratti | 1825 | X58304 | clade_98 | N | N |
| Streptococcus sanguinis | 1827 | NR_074974 | clade_98 | N | N |
| Streptococcus sinensis | 1828 | AF432857 | clade_98 | N | N |
| Streptococcus sp. 2_1_36FAA | 1831 | ACOI01000028 | clade_98 | N | N |
| Streptococcus sp. 2285_97 | 1830 | AJ131965 | clade_98 | N | N |
| Streptococcus sp. ACS2 | 1834 | HQ616360 | clade_98 | N | N |
| Streptococcus sp. AS20 | 1835 | HQ616366 | clade_98 | N | N |
| Streptococcus sp. BS35a | 1836 | HQ616369 | clade_98 | N | N |
| Streptococcus sp. C150 | 1837 | ACRI01000045 | clade_98 | N | N |
| Streptococcus sp. CM6 | 1838 | HQ616372 | clade_98 | N | N |
| Streptococcus sp. ICM10 | 1840 | HQ616389 | clade_98 | N | N |
| Streptococcus sp. ICM12 | 1841 | HQ616390 | clade_98 | N | N |
| Streptococcus sp. ICM2 | 1842 | HQ616386 | clade_98 | N | N |
| Streptococcus sp. ICM4 | 1844 | HQ616387 | clade_98 | N | N |
| Streptococcus sp. ICM45 | 1843 | HQ616394 | clade_98 | N | N |
| Streptococcus sp. M143 | 1845 | ACRK01000025 | clade_98 | N | N |
| Streptococcus sp. M334 | 1846 | ACRL01000052 | clade_98 | N | N |
| Streptococcus sp. oral clone ASB02 | 1849 | AY923121 | clade_98 | N | N |
| Streptococcus sp. oral clone ASCA03 | 1850 | DQ272504 | clade_98 | N | N |
| Streptococcus sp. oral clone ASCA04 | 1851 | AY923116 | clade_98 | N | N |
| Streptococcus sp. oral clone ASCA09 | 1852 | AY923119 | clade_98 | N | N |
| Streptococcus sp. oral clone ASCB04 | 1853 | AY923123 | clade_98 | N | N |
| Streptococcus sp. oral clone ASCB06 | 1854 | AY923124 | clade_98 | N | N |
| Streptococcus sp. oral clone ASCC04 | 1855 | AY923127 | clade_98 | N | N |
| Streptococcus sp. oral clone ASCC05 | 1856 | AY923128 | clade_98 | N | N |
| Streptococcus sp. oral clone ASCC12 | 1857 | DQ272507 | clade_98 | N | N |
| Streptococcus sp. oral clone ASCD01 | 1858 | AY923129 | clade_98 | N | N |
| Streptococcus sp. oral clone ASCD09 | 1859 | AY923130 | clade_98 | N | N |
| Streptococcus sp. oral clone ASCD10 | 1860 | DQ272509 | clade_98 | N | N |
| Streptococcus sp. oral clone ASCE03 | 1861 | AY923134 | clade_98 | N | N |
| Streptococcus sp. oral clone ASCE04 | 1862 | AY953253 | clade_98 | N | N |
| Streptococcus sp. oral clone ASCE05 | 1863 | DQ272510 | clade_98 | N | N |
| Streptococcus sp. oral clone ASCE06 | 1864 | AY923135 | clade_98 | N | N |
| Streptococcus sp. oral clone ASCE09 | 1865 | AY923136 | clade_98 | N | N |
| Streptococcus sp. oral clone ASCE10 | 1866 | AY923137 | clade_98 | N | N |
| Streptococcus sp. oral clone ASCE12 | 1867 | AY923138 | clade_98 | N | N |
| Streptococcus sp. oral clone ASCF05 | 1868 | AY923140 | clade_98 | N | N |
| Streptococcus sp. oral clone ASCF07 | 1869 | AY953255 | clade_98 | N | N |
| Streptococcus sp. oral clone ASCF09 | 1870 | AY923142 | clade_98 | N | N |
| Streptococcus sp. oral clone ASCG04 | 1871 | AY923145 | clade_98 | N | N |
| Streptococcus sp. oral clone BW009 | 1872 | AY005042 | clade_98 | N | N |
| Streptococcus sp. oral clone CH016 | 1873 | AY005044 | clade_98 | N | N |
| Streptococcus sp. oral clone GK051 | 1874 | AY349413 | clade_98 | N | N |
| Streptococcus sp. oral clone GM006 | 1875 | AY349414 | clade_98 | N | N |
| Streptococcus sp. oral clone P2PA_41 P2 | 1876 | AY207051 | clade_98 | N | N |
| Streptococcus sp. oral clone P4PA_30 P4 | 1877 | AY207064 | clade_98 | N | N |
| Streptococcus sp. oral taxon 071 | 1878 | AEEP01000019 | clade_98 | N | N |
| Streptococcus sp. oral taxon G59 | 1879 | GU432132 | clade_98 | N | N |
| Streptococcus sp. oral taxon G62 | 1880 | GU432146 | clade_98 | N | N |
| Streptococcus sp. oral taxon G63 | 1881 | GU432150 | clade_98 | N | N |
| Streptococcus suis | 1882 | FM252032 | clade_98 | N | N |
| Streptococcus thermophilus | 1883 | CP000419 | clade_98 | N | N |
| Streptococcus salivarius | 1826 | AGBV01000001 | clade_98 | N | N |
| Streptococcus uberis | 1884 | HQ391900 | clade_98 | N | N |
| Streptococcus urinalis | 1885 | DQ303194 | clade_98 | N | N |
| Streptococcus vestibularis | 1886 | AEKO01000008 | clade_98 | N | N |
| Streptococcus viridans | 1887 | AF076036 | clade_98 | N | N |
| Synergistetes bacterium oral clone 03 5 D05 | 1908 | GU227192 | clade_98 | N | N |

[0395] List of Operational Taxonomic Units (OTU) with taxonomic assignments made to Genus, Species, and Phylogenetic Clade. Clade membership of bacterial OTUs is based on 16S sequence data. Clades are defined based on the topology of a phylogenetic tree that is constructed from full-length 16S sequences using maximum likelihood methods familiar to individuals with ordinary skill in the art of phylogenetics. Clades are constructed to ensure that all OTUs in a given clade are: (i) within a specified number of bootstrap supported nodes from one another, and (ii) within 5% genetic similarity. OTUs that are within the same clade can be distinguished as genetically and phylogenetically distinct from OTUs in a different clade based on 16S-V4 sequence data, while OTUs falling within the same clade are closely related. OTUs falling within the same clade are evolutionarily closely related and may or may not be distinguishable from one another using 16S-V4 sequence data. Members of the same clade, due to their evolutionary relatedness, play similar functional roles in a microbial ecology such as that found in the human gut. Compositions substituting one species with another from the same clade are likely to have conserved ecological function and therefore are useful in the present invention. All OTUs are denoted as to their putative capacity to form spores and whether they are a Pathogen or Pathobiont (see Definitions for description of “Pathobiont”). NIAID Priority Pathogens are denoted as ‘Category-A’, ‘Category-B’ or ‘Category-C’, and Opportunistic Pathogens are denoted as ‘OP’. OTUs that are not pathogenic or for which their ability to exist as a pathogen is unknown are denoted as ‘N’. The ‘SEQ ID Number’ denotes the identifier of the OTU in the Sequence Listing File and ‘Public DB Accession’ denotes the identifier of the OTU in a public sequence repository.

TABLE 2
Spore quantitation for ethanol treated spore preparations
using spore CFU (SCFU) assay and DPA assay

| | SCFU/30 | DPA SEq/30 | Ratio |
|---|---|---|---|
| Preparation | capsules | capsules | SCFU/DPA |
| Preparation 1 | 4.0 × 105 | 6.8 × 107 | 5.9 × 10−3 |
| Preparation 2 | 2.1 × 107 | 9.2 × 108 | 0.023 |
| Preparation 3 | 6.9 × 109 | 9.6 × 109 | 0.72 |

TABLE 3
DPA doses in Table 2 when normalized to 4 × 105 SCFU per dose

| | SCFU/30 | DPA SEq/30 | Fraction of |
|---|---|---|---|
| Preparation | capsules | capsules | Preparation 1 Dose |
| Preparation 1 | 4.0 × 105 | 6.8 × 107 | 1.0 |
| Preparation 2 | 4.0 × 105 | 1.8 × 107 | 0.26 |
| Preparation 3 | 4.0 × 105 | 5.6 × 105 | 0.0082 |

TABLE 4
Interpretation of Results from USP <62>
Table 2. Interpretation of Results

| Results for Each Quantity of Product | | | Probable Number |
|---|---|---|---|
| 0.1 g or | 0.01 g or | 0.001 g or | of Bacteria per g |
| 0.1 mL | 0.01 mL | 0.001 mL | or mL of Product |
| + | + | + | more than 10³ |
| + | + | − | less than 10³ and |
| | | | more than 10² |
| + | − | − | less than 10² and |
| | | | more than 10 |
| − | − | − | less than 10 |

TABLE 5

Clostridium_paraputrificum
Clostridium_disporicum
Clostridium_glycolicum
Clostridium_bartlettii
Clostridium_butyricum
Ruminococcus_bromii
Lachnospiraceae_bacterium_2_1_58FAA
Eubacterium_hadrum
Turicibacter_sanguinis
Lachnospiraceae_bacterium_oral_taxon_F15
Clostridium_perfringens
Clostridium_bifermentans
Roseburia_sp_11SE37
Clostridium_quinii
Ruminococcus_lactaris
Clostridium_botulinum
Clostridium_tyrobutyricum
Blautia_hansenii
Clostridium_kluyveri
Clostridium_sp_JC122
Clostridium_hylemonae
Clostridium_celatum
Clostridium_straminisolvens
Clostridium_orbiscindens
Roseburia_cecicola
Eubacterium_tenue
Clostridium_sp_7_2_43FAA
Lachnospiraceae_bacterium_4_1_37FAA
Eubacterium_rectale
Clostridium_viride
Ruminococcus_sp_K_1
Clostridium_symbiosum
Ruminococcus_torques
Clostridium_algidicarnis

TABLE 6

Clostridium_paraputrificum
Clostridium_bartlettii
Lachnospiraceae_bacterium_2_1_58FAA
Clostridium_disporicum
Ruminococcus_bromii
Eubacterium_hadrum
Clostridium_butyricum
Roseburia_sp_11SE37
Clostridium_perfringens
Clostridium_glycolicum
Clostridium_hylemonae
Clostridium_orbiscindens
Ruminococcus_lactaris
Clostridium_symbiosum
Lachnospiraceae_bacterium_oral_taxon_F15
Blautia_hansenii
Turicibacter_sanguinis
Clostridium_straminisolvens
Clostridium_botulinum
Lachnospiraceae_bacterium_4_1_37FAA
Roseburia_cecicola
Ruminococcus_sp_K_1
Clostridium_bifermentans
Eubacterium_rectale
Clostridium_quinii
Clostridium_viride
Clostridium_kluyveri
Clostridium_tyrobutyricum
Oscillibacter_sp_G2
Clostridium_sp_JC122
Lachnospiraceae_bacterium_3_1_57FAA
Clostridium_aldenense
Ruminococcus_torques
Clostridium_sp_7_2_43FAA
Clostridium_celatum
Eubacterium_sp_WAL_14571
Eubacterium_tenue
Lachnospiraceae_bacterium_5_1_57FAA
Clostridium_clostridioforme
Clostridium_sp_YIT_12070
Blautia_sp_M25
Anaerostipes_caccae
Roseburia_inulinivorans
Clostridium_sp_D5
Clostridium_asparagiforme
Coprobacillus_sp_D7
Clostridium_sp_HGF2
Clostridium_citroniae
Clostridium_difficile
Oscillibacter_valericigenes
Clostridium_algidicarnis

TABLE 7

| | | GAM + | | Sweet B + | Sweet | |
|---|---|---|---|---|---|---|
| OTU | BBA | FOS/inulin | M2GSC | FOS/Inulin | GAM | Total |
| Blautia producta | 1 | | | | | 1 |
| Clostridium bartlettii | 4 | | 1 | | | 5 |
| Clostridium bolteae | 2 | | | 5 | 1 | 8 |
| Clostridium botulinum | | | | 5 | | 5 |
| Clostridium butyricum | 37 | 43 | 8 | 1 | 33 | 122 |
| Clostridium celatum | 4 | | | | 1 | 5 |
| Clostridium clostridioforme | 1 | | | | 1 | 2 |
| Clostridium disporicum | 26 | 26 | 22 | 33 | 50 | 157 |
| Clostridium glycolicum | 4 | 9 | 14 | | | 27 |
| Clostridium mayombei | 2 | 2 | | | | 4 |
| Clostridium paraputrificum | 8 | 8 | 33 | 16 | 6 | 71 |
| Clostridium sordellii | | | 14 | | | 14 |
| Clostridium sp. 7_2_43FAA | | 1 | | | | 1 |
| Clostridium symbiosum | 3 | | | | | 3 |
| Clostridium tertium | | 1 | | 1 | | 2 |
| (blank) | | 2 | | 31 | | 33 |
| Totals | 92 | 92 | 92 | 92 | 92 | 460 |

TABLE 8
Results of the prophylaxis mouse model and dosing
information for the germinable, and sporulatable fractions

| | | | Average | |
|---|---|---|---|---|
| | | | Weight on | Average |
| | | | Day 3 | Clinical |
| | | # Deaths | Relative to | Score |
| Test Article | Dose | by Day 6 | Day −1 | on Day 3 |
| Vehicle | NA | 10 | 0.72 | NA |
| Naive | NA | 0 | 1.03 | 0 |
| Donor B fecal | 0.2 mL of 10% | 1 | 0.91 | 0.11 |
| suspension | suspension | | | |
| Donor A | 8.99 * 10\hat{ }7 Spore | 0 | 1.02 | 0 |
| Spore Prep | Equivalents/dose | | | |
| germinable | | | | |
| Donor A | 7.46 * 10\hat{ }7 Spore | 0 | 0.99 | 0 |
| Spore Prep | Equivalents/dose | | | |
| Sporulatable | | | | |

TABLE 9
16s rDNA identification of colony picks from plating a
20% fecal suspension or ethanol treated preparation to selective
media (number of colony picks matching each species in parentheses).

| | ethanol treated feces | 20% Suspension of feces |
|---|---|---|
| | (# of colonies) | (# of colonies) |
| Raffinose | Ruminococcus albus (5) | Bifidobacterium adolescentis (3) |
| Bifidobacterium | Clostridium sp. D5 (7) | Bifidobacterium longum (6) |
| Agar | Lachnospiraceae bacterium | Streptococcus bovis (1) |
| | 3_1_57FAA_CT1 (1) | Escherichia coli (4) |
| | Clostridium bolteae (3) | |
| | Robinsoniella peoriensis (1) | |
| | Ruminococcus lactaris (1) | |
| | Eubacterium fissicatena (1) | |
| | Eubacterium contortum | |
| | Eubacterium xylanophilum (1) | |
| | Clostridium clostridiiformes (1) | |
| Enterococcosel | no colonies observed | Streptococcous bovis (4) |
| Agar | | Streptococcus pasteurianus (1) |
| Mitis Salivarius | Bacillus subtilis (1) | Streptococcus vestibularis (3) |
| Agar | Bacillus sonorensis (1) | Streptococcus bovis (4) |
| | | Streptococcus salivarius (1) |

TABLE 10
16s rDNA identification of colony picks from plating a
20% fecal suspension or ethanol treated preparation to selective
media (number of colony picks matching each species in parentheses)

| | ethanol treated feces | 20% Suspension of feces |
|---|---|---|
| | (# of colonies) | (# of colonies) |
| Raffinose | Ruminococcus sp. 5_1_39BFAA (12) | Bifidobacterium adolescentis (3) |
| Bifidobacterium Agar | Dorea longicatena (3) | Bifidobacterium longum (10) |
| | Eubacterium contortum (4) | Enterococcus faecium (1) |
| | Clostridium sp. D5 (5) | |
| | Clostridium sp. 7_2_43FAA (1) | |
| | Bryantella formatexigens (1) | |
| | Clostridium orbiscindens (1) | |
| Enterococcosel Agar | no colonies observed | Enterococcus faecium (5) |
| Mitis Salivarius Agar | Bacillus sp. BT1B_CT2 (2) | Streptococcus vestibularis (1) |
| | Bacillus sp. B27(2008) (1) | Enterococcus faecium (4) |
| | Bacillus sonorensis (1) | Streptococcus salivarius (1) |

TABLE 11
Colony counts in Log CFU/mL determined from a 20%
fecal suspension and ethanol treated spore composition
Table 11 depicts the estimated concentration of a 20% fecal suspension
and the ethanol treated spore composition Colonies were counted
from plating a 20% feces suspension (Sample1) or ethanol treated
suspension to selective media and used to back-calculate the
concentration of presumptive cells in each sample (Log CFU/mL).

| | Log CFU/mL of | Log CFU/mL of | |
|---|---|---|---|
| | 20% | Ethanol-treated | Log |
| Selective Media | Suspension | spore composition | Reduction |
| Mitis Salivarius | 4.92 | 1 (1) | 3.92 |
| Enterococcosel | 4.75 | 1 Limit of Detection | 3.75 |
| | | (0) | |
| Raffinose | 6.65 | 2.70 | 3.95 |
| Bifidobacterium | | | |

TABLE 12
Colony counts in Log CFU/mL determined from a 20%
fecal suspension and ethanol treated spore composition.
Table 12 depicts the estimated concentration of a 20% fecal suspension
and the ethanol treated spore composition Colonies were counted from
plating a 20% feces suspension (Sample2) or ethanol treated
suspension to selective media and used to back-calculate the
concentration of presumptive cells in each sample (Log CFU/mL).

| | Log CFU/mL of | Log CFU/mL of | |
|---|---|---|---|
| | 20% | Ethanol-treated | Log |
| Selective Media | Suspension | spore composition | Reduction |
| Mitis Salivarius | 5.25 | 1.90 (8) | 3.34 |
| Enterococcosel | 5.14 | 1 Limit of Detection | 4.14 |
| | | (0) | |
| BIFIDO | 7.22 | 4.60 | 2.62 |
| Raffinose | 6.36 | 3.18 | 3.19 |
| Bifidobacterium | | | |

TABLE 13
Results of Plating Ethanol-treated fecal suspensions on
BBE and MacConkey II lactose agar

| | | MacConkey II Lactose |
|---|---|---|
| Donor | BBE Agar Results* | Result* |
| Donor A Sample 1 | No Colonies Observed | No Colonies Observed |
| Donor A Sample 2 | No Colonies Observed | No Colonies Observed |
| Donor B Sample 1 | No Colonies Observed | No Colonies Observed |
| Donor B Sample 2 | No Colonies Observed | No Colonies Observed |
| Donor B Sample 3 | No Colonies Observed | No Colonies Observed |
| Donor B Sample 4 | No Colonies Observed | No Colonies Observed |
| Donor B Sample 5 | No Colonies Observed | No Colonies Observed |
| Donor C Sample 1 | No Colonies Observed | No Colonies Observed |
| Donor C Sample 1 | No Colonies Observed | No Colonies Observed |
| Donor C Sample 1 | No Colonies Observed | No Colonies Observed |
| Donor C Sample 1 | No Colonies Observed | No Colonies Observed |
| Donor C Sample 1 | No Colonies Observed | No Colonies Observed |
| Donor C Sample 1 | No Colonies Observed | No Colonies Observed |
| Donor C Sample 1 | No Colonies Observed | No Colonies Observed |
| Donor D Sample 1 | No Colonies Observed | No Colonies Observed |
| Donor D Sample 2 | No Colonies Observed | No Colonies Observed |
| Donor E Sample 1 | No Colonies Observed | No Colonies Observed |
| Donor E Sample 2 | No Colonies Observed | No Colonies Observed |
| Donor F Sample 1 | No Colonies Observed | No Colonies Observed |
| Donor F Sample 2 | No Colonies Observed | No Colonies Observed |

*Note: The limit of detection for these results is 10 colony forming units per mL of sample.

TABLE 14
Results from Sabouraud Dextrose agar plating of fecal
suspensions before and after treatment with 50% Ethanol

| | CFU/mL | CFU/mL |
|---|---|---|
| Donor | Pre-Ethanol Inactivation | Post-Ethanol Inactivation |
| A | 2.00 × 10⁵ cfu/mL | No Colonies Detected* |
| B | 1.80 × 10⁶ cfu/mL | No Colonies Detected* |
| C | 2.00 × 10³ cfu/mL | 2.00 × 10³ cfu/mL |
| D | 2.00 × 10³ cfu/mL | No Colonies Detected* |

*Note: The limit of detection for this experiment was 2.00 × 10³ cfu/mL.

TABLE 15
Mortality and weight change in mice challenged with C. difficile
with or without ethanol treated, spore product treatment

| | mortality | % weight change |
|---|---|---|
| Test article | (n = 10) | on Day 3 |
| vehicle (negative | 20% | −10.5% |
| control) | | |
| Donor feces (positive | 0 | −0.1% |
| control) | | |
| EtOH-treated feces 1x | 0 | 2.3% |
| EtOH-treated feces 0.1x | 0 | 2.4% |
| EtOH-treated feces | 0 | −3% |
| 0.01x | | |
| heat-treated feces | 0 | 0.1% |

TABLE 16
16S rDNA identified spore forming species from picked colony plates

| Treatment | Species | No. isolates |
|---|---|---|
| 70 deg 1 h | Clostridium_celatum | 4 |
| 70 deg 1 h | Clostridium_clostridioform | 1 |
| 70 deg 1 h | Clostridium_hylemonae | 1 |
| 70 deg 1 h | Clostridium_paraputrificum | 3 |
| 70 deg 1 h | Clostridium_sp_D5 | 1 |
| 70 deg 1 h | Clostridium_symbiosum | 1 |
| 80 deg 1 h | Clostridium_bartlettii | 6 |
| 80 deg 1 h | Clostridium_butyricum | 1 |
| 80 deg 1 h | Clostridium_paraputrificum | 5 |
| 80 deg 1 h | Coprobacillus_sp_D7 | 1 |
| 80 deg 1 h | Eubacterium_sp_WAL_14571 | 1 |
| 80 deg 1 h | Ruminococcus_bromii | 1 |
| 90 deg 1 h | Clostridium_butyricum | 1 |
| 90 deg 10 min | Ruminococcus_bromii | 1 |
| 90 deg 10 min | Anaerotruncus_colihominis | 2 |
| 90 deg 10 min | Clostridium_bartlettii | 1 |
| 100 deg 10 min | Ruminococcus_bromii | 1 |

TABLE 17
Spore-forming species identified in ethanol treated or
heat treated samples and not identified in untreated samples

| | isolated from | isolated from | isolated from |
|---|---|---|---|
| Species | untreated | EtOH-treated | heat-treated |
| Acetivibrio ethanolgignens | | x | |
| Anaerofustis stercorihominis | | x | |
| Bacillus anthracis | | x | |
| Bacillus horti | | x | |
| Bacillus licheniformis | | | x |
| Bacillus nealsonii | | x | |
| Bacillus pumilus | | | x |
| Bacillus sp. BT1B_CT2 | | x | |
| Bacillus thuringiensis | | x | |
| Bacteroides galacturonicus | | x | |
| (phylogenetically in | | | |
| Clostridiales) | | | |
| Bacteroides pectinophilus | | x | |
| (phylogenetically in | | | |
| Clostridiales) | | | |
| Blautia wexlerae | | x | x |
| Brachyspira pilosicoli | | x | |
| Brevibacillus parabrevis | | | x |
| Clostridium aldenense | | x | |
| Clostridium beijerinckii | | x | |
| Clostridium carnis | | x | |
| Clostridium celatum | | x | |
| Clostridium favososporum | | x | |
| Clostridium hylemonae | | | x |
| Clostridium irregulare | | x | |
| Clostridium methylpentosum | | | x |
| Clostridium sp. D5 | | x | x |
| Clostridium sp. L2-50 | | x | |
| Clostridium sp. MT4 E | | x | |
| Clostridium sp. NML 04A032 | | x | |
| Clostridium sp. SS2/1 | | x | |
| Clostridium sp. YIT 12069 | | | x |
| Clostridium stercorarium | | x | |
| Clostridium xylanolyticum | | x | |
| Coprococcus sp. ART55/1 | | x | |
| Deferribacteres sp. oral clone | | x | |
| JV006 | | | |
| Desulfitobacterium frappieri | | x | |
| Eubacterium callanderi | | x | |
| Eubacterium siraeum | | x | |
| Exiguobacterium acetylicum | | x | |
| Gemmiger formicilis | | x | |
| Lachnospira multipara | | x | |
| Lachnospira pectinoschiza | | x | |
| Roseburia faecalis | | x | |
| Ruminococcus albus | | x | |

TABLE 18
Donor A, 45 species in 374 EtOH-resistant colonies sequenced

OTU
Anaerostipes_sp_3_2_56FAA
Bacillus_anthracis
Bacillus_cereus
Bacillus_thuringiensis
Blautia_producta
Blautia_sp_M25
Clostridiales_sp_SSC_2
Clostridium_aldenense
Clostridium_bartlettii
Clostridium_bolteae
Clostridium_celatum
Clostridium_disporicum
Clostridium_ghonii
Clostridium_hathewayi
Clostridium_lactatifermentans
Clostridium_mayombei
Clostridium_orbiscindens
Clostridium_paraputrificum
Clostridium_perfringens
Clostridium_sordellii
Clostridium_stercorarium
Clostridium_straminisolvens
Clostridium_tertium
Coprobacillus_sp_D7
Coprococcus_catus
Deferribacteres_sp_oral_clone_JV006
Dorea_formicigenerans
Eubacterium_rectale
Eubacterium_siraeum
Eubacterium_sp_WAL_14571
Eubacterium_ventriosum
Flexistipes_sinusarabici
Fulvimonas_sp_NML_060897
Lachnospiraceae_bacterium_2_1_58FAA
Lachnospiraceae_bacterium_3_1_57FAA
Lachnospiraceae_bacterium_A4
Lachnospiraceae_bacterium_oral_taxon_F15
Moorella_thermoacetica
Roseburia_faecalis
Roseburia_hominis
Ruminococcus_albus
Ruminococcus_bromii
Ruminococcus_gnavus
Ruminococcus_sp_5_1_39BFAA
Ruminococcus_torques

TABLE 19
Donor B, 26 species in 195 EtOH-resistant
colonies sequenced
OTU
Bacillus_horti
Blautia_wexlerae
Chlamydiales_bacterium_NS11
Clostridiales_sp_SSC_2
Clostridium_bartlettii
Clostridium_celatum
Clostridium_disporicum
Clostridium_ghonii
Clostridium_oroticum
Clostridium_paraputrificum
Clostridium_perfringens
Clostridium_sordellii
Clostridium_sp_L2_50
Clostridium_sp_MT4_E
Clostridium_straminisolvens
Coprococcus_sp_ART55_1
Eubacterium_callanderi
Eubacterium_rectale
Eubacterium_ruminantium
Gemmiger_formicilis
Lachnospira_pectinoschiza
Ruminococcus_albus
Ruminococcus_gnavus
Ruminococcus_obeum
Ruminococcus_sp_5_1_39BFAA
Ruminococcus_sp_K _1

TABLE 20
Donor C, 39 species in 416 EtOH-resistant
colonies sequenced
OTU
Bacteroides_galacturonicus
Bacteroides_pectinophilus
Blautia_producta
Blautia_sp_M25
Blautia_wexlerae
Clostridiales_sp_SS3_4
Clostridiales_sp_SSC_2
Clostridium_bartlettii
Clostridium_citroniae
Clostridium_disporicum
Clostridium_indolis
Clostridium_orbiscindens
Clostridium_paraputrificum
Clostridium_sordellii
Clostridium_sp_NML_04A032
Clostridium_sp_SS2_1
Clostridium_straminisolvens
Clostridium_viride
Clostridium_xylanolyticum
Coprobacillus_sp_D7
Dorea_longicatena
Eubacterium_rectale
Eubacterium_ventriosum
Hydrogenoanaerobacterium_saccharovorans
Lachnospira_multipara
Lachnospira_pectinoschiza
Lachnospiraceae_bacterium_A4
Oscillibacter_sp_G2
Pseudoflavonifractor_capillosus
Roseburia_hominis
Roseburia_intestinalis
Ruminococcus_albus
Ruminococcus_lactaris
Ruminococcus_obeum
Ruminococcus_sp_5_1_39BFAA
Ruminococcus_sp_K _1
Ruminococcus_torques
Syntrophococcus_sucromutans

TABLE 21
Donor D, 12 species in 118 EtOH-resistant
colonies sequenced
OTU
Blautia_luti
Blautia_wexlerae
Brachyspira_pilosicoli
Clostridium_paraputrificum
Collinsella_aerofaciens
Coprobacillus_sp_D7
Desulfitobacterium_frappieri
Eubacterium_rectale
Moorella_thermoacetica
Ruminococcus_gnavus
Ruminococcus_obeum
Ruminococcus_sp_K_1

TABLE 22
Donor E, 11 species in 118 EtOH-resistant colonies
sequenced
OTU
Blautia_luti
Blautia_wexlerae
Brachyspira_pilosicoli
Clostridium_paraputrificum
Coprobacillus_sp_D7
Desulfitobacterium_frappieri
Eubacterium_rectale
Moorella_thermoacetica
Ruminococcus_gnavus
Ruminococcus_obeum
Ruminococcus_sp_K_1

TABLE 23
Donor F, 54 OTUs in 768 EtOH-resistant colonies
sequenced
OTU
Anaerofustis_stercorihominis
Anaerostipes_sp_3_2_56FAA
Bacillus_nealsonii
Bacillus_sp_BT1B_CT2
Blautia_producta
Butyrivibrio_crossotus
Clostridiales_bacterium_SY8519
Clostridiales_sp_1_7_47
Clostridium_aldenense
Clostridium_bartlettii
Clostridium_bolteae
Clostridium_butyricum
Clostridium_citroniae
Clostridium_clostridioforme
Clostridium_disporicum
Clostridium_favososporum
Clostridium_glycolicum
Clostridium_hathewayi
Clostridium_indolis
Clostridium_leptum
Clostridium_mayombei
Clostridium_nexile
Clostridium_orbiscindens
Clostridium_sordellii
Clostridium_sp_7_2_43FAA
Clostridium_sp_D5
Clostridium_sp_M62_1
Clostridium_sp_NML_04A032
Clostridium_spiroforme
Clostridium_symbiosum
Clostridium_tertium
Coprobacillus_sp_29_1
Coprobacillus_sp_D7
Eubacterium_contortum
Eubacterium_desmolans
Eubacterium_ramulus
Exiguobacterium_acetylicum
Faecalibacterium_prausnitzii
Lachnospiraceae_bacterium_2_1_58FAA
Lachnospiraceae_bacterium_3_1_57FAA
Lachnospiraceae_bacterium_5_1_57FAA
Lachnospiraceae_bacterium_6_1_63FAA
Lachnospiraceae_bacterium_oral_taxon_F15
Marvinbryantia_formatexigens
Mycoplasma_amphoriforme
Oscillibacter_sp_G2
Pseudoflavonifractor_capillosus
Ruminococcus_gnavus
Ruminococcus_hansenii
Ruminococcus_obeum
Ruminococcus_sp_5_1_39BFAA
Ruminococcus_sp_ID8
Turicibacter_sanguinis

TABLE 24
Organisms crown from ethanol treated spore population
on various media (See Example 7 for full media names and
references).

| | total number | unique | % unique |
|---|---|---|---|
| Media | reads | OTUs | OTUs |
| M2GSC | 93 | 33 | 0.35 |
| M-BHI | 66 | 26 | 0.39 |
| Sweet B | 74 | 23 | 0.31 |
| GAM fructose | 44 | 18 | 0.41 |
| M2 mannitol | 39 | 17 | 0.44 |
| M2 soluble starch | 62 | 16 | 0.26 |
| M2 lactate | 43 | 14 | 0.33 |
| GAM FOS/Inulin | 52 | 14 | 0.27 |
| EYA | 29 | 13 | 0.45 |
| Mucin | 19 | 12 | 0.63 |
| M2 lactose | 32 | 12 | 0.38 |
| BHIS az1/ge2 | 35 | 12 | 0.34 |
| BHIS CInM az1/ge2 | 24 | 11 | 0.46 |
| GAM mannitol | 41 | 11 | 0.27 |
| BBA | 29 | 10 | 0.34 |
| Sulfite-polymyxin milk | 48 | 9 | 0.19 |
| Noack-Blaut Eubacterium | 12 | 4 | 0.33 |
| agar | | | |
| | 742 total analyzed | | |

TABLE 25
Species identified as germinable and sporulatable by colony picking

| | | GAM + | | Sweet B + | Sweet | |
|---|---|---|---|---|---|---|
| OTU | BBA | FOS/inulin | M2GSC | FOS/Inulin | GAM | Total |
| Blautia producta | 1 | | | | | 1 |
| Clostridium bartlettii | 4 | | 1 | | | 5 |
| Clostridium bolteae | 2 | | | 5 | 1 | 8 |
| Clostridium botulinum | | | | 5 | | 5 |
| Clostridium butyricum | 37 | 43 | 8 | 1 | 33 | 122 |
| Clostridium celatum | 4 | | | | 1 | 5 |
| Clostridium clostridioforme | 1 | | | | 1 | 2 |
| Clostridium disporicum | 26 | 26 | 22 | 33 | 50 | 157 |
| Clostridium glycolicum | 4 | 9 | 14 | | | 27 |
| Clostridium mayombei | 2 | 2 | | | | 4 |
| Clostridium paraputrificum | 8 | 8 | 33 | 16 | 6 | 71 |
| Clostridium sordellii | | | 14 | | | 14 |
| Clostridium sp. 7_2_43FAA | | 1 | | | | 1 |
| Clostridium symbiosum | 3 | | | | | 3 |
| Clostridium tertium | | 1 | | 1 | | 2 |
| (blank) | | 2 | | 31 | | 33 |
| Totals | 92 | 92 | 92 | 92 | 92 | 460 |

| | | | Dominant |
|---|---|---|---|
| | | Spore | OTU in |
| | Phylogenetic | Forming | Augmented |
| OTU | Clade | OTU | Ecology |
| Bacteroides sp. 2_1_22 | clade38 | N | Y |
| Streptococcus anginosus | clade60 | N | |
| Prevotella intermedia | clade8l | N | |
| Prevotella nigrescens | clade8l | N | |
| Oribacterium sp. ACB7 | clade90 | N | |
| Prevotella salivae | clade104 | N | |
| Bacteroides intestinalis | clade171 | N | Y |
| Bifidobacterium dentium | clade172 | N | |
| Alcaligenes faecalis | clade183 | N | |
| Rothia dentocariosa | clade194 | N | |
| Peptoniphilus lacrimalis | clade291 | N | |
| Anaerococcus sp. gpac155 | clade294 | N | |
| Sutterella stercoricanis | clade302 | N | Y |
| Bacteroides sp. 3_1_19 | clade335 | N | Y |
| Parabacteroides goldsteinii | clade335 | N | |
| Bacteroides dorei | clade378 | N | Y |
| Bacteroides massiliensis | clade378 | N | |
| Lactobacillus iners | clade398 | N | |
| Granulicatella adiacens | clade460 | N | |
| Eggerthella sp. 1_3_56FAA | clade477 | N | |
| Gordonibacter pamelaeae | clade477 | N | |
| Finegoldia magna | clade509 | N | |
| Actinomyces nasicola | clade523 | N | |
| Streptobacillus moniliformis | clade532 | N | |
| Oscillospira guilliermondii | clade540 | N | |
| Orientia tsutsugamushi | clade541 | N | |
| Christensenella minuta | clade558 | N | |
| Clostridium oroticum | clade96 | Y | |
| Clostridium sp. D5 | clade96 | Y | |
| Clostridium glycyrrhizinilyticum | clade147 | Y | |
| Coprococcus comes | clade147 | Y | |
| Ruminococcus lactaris | clade147 | Y | |
| Ruminococcus torques | clade147 | Y | Y |
| Clostridiales sp. SS3/4 | clade246 | Y | |
| Clostridium hylemonae | clade260 | Y | |
| Clostridium aerotolerans | clade269 | Y | |
| Clostridium asparagiforme | clade300 | Y | Y |
| Clostridium sp. M62/1 | clade300 | Y | |
| Clostridium symbiosum | clade300 | Y | |
| Lachnospiraceae genomosp. C1 | clade300 | Y | |
| Blautia sp. M25 | clade304 | Y | Y |
| Blautia stercoris | clade304 | Y | |
| Ruminococcus hansenii | clade304 | Y | |
| Ruminococcus obeum | clade304 | Y | |
| Ruminococcus sp. 5_1_39BFAA | clade304 | Y | |
| Bryantella formatexigens | clade309 | Y | |
| Eubacterium cellulosolvens | clade309 | Y | |
| Clostridium sp. HGF2 | clade351 | Y | |
| Clostridium bartlettii | clade354 | Y | |
| Clostridium bifermentans | clade354 | Y | |
| Clostridium glycolicum | clade354 | Y | |
| Eubacterium tenue | clade354 | Y | |
| Dorea formicigenerans | clade360 | Y | |
| Dorea longicatena | clade360 | Y | |
| Lachnospiraceae bacterium | clade360 | Y | |
| 2_1_46FAA | | | |
| Lachnospiraceae bacterium | clade360 | Y | Y |
| 9_1_43BFAA | | | |
| Ruminococcus gnavus | clade360 | Y | |
| Clostridium hathewayi | clade362 | Y | |
| Blautia hydrogenotrophica | clade368 | Y | |
| Clostridiaceae bacterium END-2 | clade368 | Y | |
| Roseburia faecis | clade369 | Y | |
| Roseburia hominis | clade370 | Y | |
| Roseburia intestinalis | clade370 | Y | |
| Eubacterium sp. WAL 14571 | clade384 | Y | |
| Erysipelotrichaceae bacterium | clade385 | Y | |
| 5_2_54FAA | | | |
| Eubacterium biforme | clade385 | Y | |
| Eubacterium dolichum | clade385 | Y | |
| Coprococcus catus | clade393 | Y | |
| Acetivibrio ethanolgignens | clade396 | Y | |
| Anaerosporobacter mobilis | clade396 | Y | |
| Bacteroides pectinophilus | clade396 | Y | |
| Eubacterium hallii | clade396 | Y | |
| Eubacterium xylanophilum | clade396 | Y | |
| Anaerostipes caccae | clade408 | Y | |
| Clostridiales bacterium 1_7_47FAA | clade408 | Y | |
| Clostridium aldenense | clade408 | Y | |
| Clostridium citroniae | clade408 | Y | |
| Eubacterium hadrum | clade408 | Y | Y |
| Acetanaerobacterium elongatum | clade439 | Y | |
| Faecalibacterium prausnitzii | clade478 | Y | |
| Gemmiger formicilis | clade478 | Y | Y |
| Eubacterium ramulus | clade482 | Y | |
| Lachnospiraceae bacterium | clade483 | Y | |
| 3_1_57FAA_CT1 | | | |
| Lachnospiraceae bacterium A4 | clade483 | Y | Y |
| Lachnospiraceae bacterium DJF | clade483 | Y | |
| VP30 | | | |
| Holdemania filiformis | clade485 | Y | |
| Clostridium orbiscindens | clade494 | Y | |
| Pseudoflavonifractor capillosus | clade494 | Y | |
| Ruminococcaceae bacterium D16 | clade494 | Y | |
| Acetivibrio cellulolyticus | clade495 | Y | |
| Eubacterium limosum | clade512 | Y | |
| Anaerotruncus colihominis | clade516 | Y | |
| Clostridium methylpentosum | clade516 | Y | |
| Clostridium sp. YIT 12070 | clade516 | Y | |
| Hydrogenoanaerobacterium | clade516 | Y | |
| saccharovorans | | | |
| Eubacterium ventriosum | clade519 | Y | |
| Eubacterium eligens | clade522 | Y | |
| Lachnospira pectinoschiza | clade522 | Y | |
| Lactobacillus rogosae | clade522 | Y | Y |
| Clostridium leptum | clade537 | Y | |
| Eubacterium coprostanoligenes | clade537 | Y | |
| Ruminococcus bromii | clade537 | Y | |
| Clostridium viride | clade540 | Y | |
| Butyrivibrio crossotus | clade543 | Y | |
| Coprococcus eutactus | clade543 | Y | |
| Eubacterium ruminantium | clade543 | Y | |
| Eubacterium rectale | clade568 | Y | Y |
| Roseburia inulinivorans | clade568 | Y | |
| Butyricicoccus pullicaecorum | clade572 | Y | |
| Eubacterium desmolans | clade572 | Y | |
| Papillibacter cinnamivorans | clade572 | Y | |
| Sporobacter termitidis | clade572 | Y | |
| Clostridium lactatifermentans | clade576 | Y | |

Bacterial OTUs associated with engraftment and ecological augmentation and establishment of a more diverse microbial ecology in patients treated with an ethanol treated spore preparation. OTUs that comprise an augmented ecology are not present in the patient prior to treatment and/or exist at extremely low frequencies such that they do not comprise a significant fraction of the total microbial carriage and are not detectable by genomic and/or microbiological assay methods. OTUs that are members of the engrafting and augmented ecologies were identified by characterizing the OTUs that increase in their relative abundance post treatment and that respectively are: (i) present in the ethanol treated spore preparation and absent in the patient pretreatment, or (ii) absent in the ethanol treated spore preparation, but increase in their relative abundance through time post treatment with the preparation due to the formation of favorable growth conditions by the treatment. Notably, the latter OTUs can grow from low frequency reservoirs in the patient, or be introduced from exogenous sources such as diet. OTUs that comprise a “core” augmented or engrafted ecology can be defined by the percentage of total patients in which they are observed to engraft and/or augment; the greater this percentage the more likely they are to be part of a core ecology responsible for catalyzing a shift away from a dysbiotic ecology. The dominant OTUs in an ecology can be identified using several methods including but not limited to defining the OTUs that have the greatest relative abundance in either the augmented or engrafted ecologies and defining a total relative abundance threshold. As example, the dominant OTUs in the augmented ecology of Patient-1 were identified by defining the OTUs with the greatest relative abundance, which together comprise 60% of the microbial carriage in this patient's augmented ecology.

TABLE 27
Reduction in the opportunistic pathogen or pathobiont
load by ethanol treated spores.

| | Pretreatment | Day 5 | Day 14 | Day 25 |
|---|---|---|---|---|
| Klebsiella (% of total reads) | 20.27% | 1.32% | 7.62% | 0.00% |
| Fusobacterium (% total of | 19.14% | 3.01% | 0.01% | 0.00% |
| reads) | | | | |

TABLE 28
Changes in Enterobacteria as a function of treatment measured
on Simmons Citrate Agar

| | | Pretreatment | Day 25 |
|---|---|---|---|
| Patient | Organism | titer (cfu/g) | titer (cfu/g) |
| 1 | Klebsiella pneumoniae | 9 × 10⁶ | 1 × 10³ |
| 1 | Klebsiella sp. Co9935 | 4 × 10⁶ | 1 × 10³ |
| 1 | Escherichia coli | 7 × 10⁶ | 1 × 10⁶ |
| 2 | Klebsiella sp. Co9935 | 4 × 10⁶ | 1 × 10³ |
| 4 | Klebsiella pneumoniae | 3 × 10⁸ | <1 × 10⁴ |
| 4 | Klebsiella sp. Co9935 | 6 × 10⁷ | <1 × 10⁴ |
| 5 | Klebsiella pneumoniae | 1 × 10⁶ | <1 × 10⁴ |

TABLE 29
Augmentation of Bacteroides as a function of bacterial
composition treatment of Patient 1.

| | Bacteroides | Pretreatment titer | Day 25 |
|---|---|---|---|
| Media | species | (cfu/g) | titer (cfu/g) |
| BBE | B. fragilis group | <2 × 10⁴ | 3 × 10⁸ |
| PFA | All Bacteroides | <2 × 10⁷ | 2 × 10¹⁰ |

TABLE 30
Bacteroides spp. in Patient 1 post-treatment
with the ethanol treated spore preparation
based full-length 16S rDNA sequences of isolated strains.

| | % of total Bacteroides |
|---|---|
| Species | cfu (1.58E10 cfu/g) |
| Bacteroides sp. 4_1_36 | 63% |
| Bacteroides cellulosilyticus | 14% |
| Bacteroides sp. 1_1_30 | 14% |
| Bacteroides uniformis | 4.8% |
| Bacteroides ovatus | 1.7% |
| Bacteroides dorei | 0.91% |
| Bacteroides xylanisolvens | 0.83% |
| Bacteroides sp. 3_1_19 | 0.23% |

TABLE 31
Titers (in cfu/g) of imipenem-resistant M. morganii,
P. rettgeri and P. pennerii from Patients 2, 4 & 5

| Patient | Organism | Pretreatment titer | Day 28 titer * |
|---|---|---|---|
| Patient 2 | M. morganii | 1 × 10⁴ | 6 × 10² |
| Patient 2 | P. rettgeri | 9 × 10³ | <5 × 10¹ |
| Patient 4 | M. morganii | 2 × 10⁴ | <5 × 10¹ |
| Patient 4 | P. pennerii | 2 × 10⁴ | <5 × 10¹ |
| Patient 5 | M. morganii | 5 × 10³ | <5 × 10¹ |

* Limit of detection based on plating 200 uL of 10% wt/vol suspension is 5 × 10¹

TABLE 32
OTUs detected by a minimum of ten 16S-V4 sequence reads
in at least a one ethanol treated spore preparation
(pan-microbiome). OTUs that engraft in a treated patients
and the percentage of patients in which they
engraft are denoted, as are the clades, spore forming status,
and Keystone OTU status. Starred OTUs occur in ≧80% of the
ethanol preps and engraft in ≧50% of the treated patients.

| | | % of | | | |
|---|---|---|---|---|---|
| | | Spore | % of | | |
| | | Preps | Patients | Spore | Key- |
| | | with | OTU | For- | stone |
| OTU | clade | OTU | Engrafts | mer | OTU |
| Prevotella_maculosa | clade_104 | 10% | 0% | N | N |
| Prevotella_copri | clade_168 | 20% | 0% | N | N |
| Bacteroides_caccae | clade_170 | 30% | 0% | N | Y |
| Bifidobacterium_sp_TM_7* | clade_172 | 90% | 60% | N | N |
| Bifidobacterium_gallicum | clade_172 | 70% | 20% | N | N |
| Bifidobacterium_dentium | clade_172 | 50% | 0% | N | N |
| Lactobacillus_casei | clade_198 | 20% | 10% | N | N |
| Actinomyces_odontolyticus | clade_212 | 20% | 30% | N | N |
| Clostridium_colicanis | clade_223 | 10% | 10% | Y | N |
| Clostridiales_sp_SS3_4* | clade_246 | 100% | 70% | Y | N |
| Clostridium_sporogenes | clade_252 | 40% | 40% | Y | N |
| Clostridium_butyricum | clade_252 | 20% | 20% | Y | N |
| Clostridium_disporicum | clade_253 | 40% | 30% | Y | N |
| Clostridium_hylemonae* | clade_260 | 100% | 50% | Y | N |
| Clostridium_scindens | clade_260 | 10% | 60% | Y | N |
| Coprococcus_comes* | clade_262 | 90% | 80% | Y | Y |
| Lachnospiraceae_ | clade_262 | 90% | 80% | Y | Y |
| bacterium_1_4_56FAA* | | | | | |
| Ruminococcus_torques | clade_262 | 30% | 70% | Y | Y |
| Parabacteroides_merdae | clade_286 | 30% | 20% | N | Y |
| Bifidobacterium_bifidum | clade_293 | 10% | 0% | N | N |
| Johnsonella_ignava | clade_298 | 10% | 10% | N | N |
| Blautia_glucerasea* | clade_309 | 100% | 80% | Y | N |
| Blautia_sp_M25* | clade_309 | 100% | 70% | Y | Y |
| Lachnospiraceae_ | clade_309 | 100% | 60% | Y | N |
| bacterium_6_1_63FAA* | | | | | |
| Eubacterium_cellulosolvens | clade_309 | 10% | 30% | Y | Y |
| Lactobacillus_fermentum | clade_313 | 10% | 0% | N | N |
| Sarcina_ventriculi | clade_353 | 10% | 10% | Y | N |
| Clostridium_bartlettii* | clade_354 | 90% | 70% | Y | N |
| Clostridium_bifermentans | clade_354 | 70% | 70% | Y | N |
| Clostridium_mayombei | clade_354 | 50% | 50% | Y | N |
| Dorea_longicatena* | clade_360 | 100% | 60% | Y | Y |
| Lachnospiraceae_ | clade_360 | 100% | 30% | Y | N |
| bacterium_9_1_43BFAA | | | | | |
| Lachnospiraceae_ | clade_360 | 80% | 80% | Y | N |
| bacterium_2_1_58FAA* | | | | | |
| Lachnospiraceae_ | clade_360 | 50% | 50% | Y | N |
| bacterium_2_1_46FAA | | | | | |
| Lactobacillus_perolens | clade_373 | 10% | 0% | N | N |
| Bacteroides_dorei | clade_378 | 60% | 50% | N | Y |
| Eubacterium_biforme | clade_385 | 10% | 0% | Y | N |
| Peptoniphilus_sp_gpac077 | clade_389 | 10% | 20% | N | N |
| Coprococcus_catus* | clade_393 | 100% | 70% | Y | Y |
| Eubacterium_hallii* | clade_396 | 90% | 60% | Y | Y |
| Anaerosporobacter_mobilis | clade_396 | 40% | 60% | Y | N |
| Bacteroides_pectinophilus | clade_396 | 10% | 60% | Y | N |
| Lactobacillus_hominis | clade_398 | 10% | 0% | N | N |
| Lactococcus_lactis | clade_401 | 40% | 40% | N | N |
| Ruminococcus_ | clade_406 | 80% | 50% | Y | N |
| champanellensis* | | | | | |
| Ruminococcus_callidus | clade_406 | 10% | 10% | Y | N |
| Clostridium_clostridioforme* | clade_408 | 100% | 60% | Y | Y |
| Eubacterium_hadrum* | clade_408 | 100% | 90% | Y | Y |
| Clostridium_symbiosum | clade_408 | 30% | 50% | Y | Y |
| Anaerostipes_caccae | clade_408 | 10% | 50% | Y | N |
| Parasutterella_ | clade_432 | 10% | 0% | N | N |
| excrementihominis | | | | | |
| Sutterella_stercoricanis | clade_432 | 10% | 0% | N | N |
| Eubacterium_rectale* | clade_444 | 100% | 80% | Y | Y |
| Lachnobacterium_bovis* | clade_444 | 100% | 80% | Y | N |
| Desulfovibrio_desulfuricans | clade_445 | 10% | 0% | N | Y |
| Eubacterium_sp_oral_ | clade_476 | 80% | 70% | Y | N |
| clone_JS001* | | | | | |
| Faecalibacterium_prausnitzii* | clade_478 | 100% | 60% | Y | Y |
| Subdoligranulum_variabile* | clade_478 | 100% | 80% | Y | Y |
| Coprobacillus_sp_D7* | clade_481 | 90% | 60% | Y | N |
| Clostridium_cocleatum | clade_481 | 60% | 20% | Y | N |
| Clostridium_spiroforme | clade_481 | 40% | 50% | Y | N |
| Eubacterium_ramulus* | clade_482 | 80% | 60% | Y | N |
| Flavonifractor_plautii | clade_494 | 70% | 60% | Y | Y |
| Pseudoflavonifractor_capillosus | clade_494 | 60% | 60% | Y | Y |
| Ruminococcaceae_ | clade_494 | 30% | 50% | Y | Y |
| bacterium_D16 | | | | | |
| Acetivibrio_cellulolyticus* | clade_495 | 70% | 80% | Y | N |
| Clostridium_stercorarium | clade_495 | 40% | 50% | Y | N |
| Enterococcus_durans | clade_497 | 10% | 10% | N | N |
| Enterococcus_ faecium | clade_497 | 10% | 10% | N | N |
| Dialister_invisus | clade_506 | 50% | 10% | N | N |
| Eubacterium_limosum | clade_512 | 20% | 0% | Y | N |
| Ruminococcus_flavefaciens | clade_516 | 60% | 60% | Y | N |
| Eubacterium_ventriosum | clade_519 | 30% | 60% | Y | Y |
| Bilophila_wadsworthia | clade_521 | 90% | 0% | N | Y |
| Lachnospira_pectinoschiza | clade_522 | 40% | 60% | Y | N |
| Eubacterium_eligens | clade_522 | 30% | 50% | Y | Y |
| Catonella_morbi | clade_534 | 20% | 0% | N | N |
| Clostridium_sporosphaeroides* | clade_537 | 100% | 80% | Y | N |
| Ruminococcus_bromii | clade_537 | 60% | 30% | Y | Y |
| Clostridium_leptum | clade_537 | 40% | 70% | Y | Y |
| Clostridium_sp_YIT_12069 | clade_537 | 40% | 60% | Y | N |
| Clostridium_viride | clade_540 | 10% | 10% | Y | N |
| Megamonas_funiformis | clade_542 | 50% | 0% | N | N |
| Eubacterium_ruminantium* | clade_543 | 80% | 90% | Y | N |
| Coprococcus_eutactus | clade_543 | 20% | 20% | Y | N |
| Collinsella_aerofaciens | clade_553 | 50% | 10% | Y | Y |
| Alkaliphilus_metalliredigenes | clade_554 | 40% | 10% | Y | N |
| Turicibacter_sanguinis | clade_555 | 80% | 40% | Y | N |
| Phascolarctobacterium_faecium | clade_556 | 20% | 0% | N | N |
| Clostridiales_bacterium_ | clade_558 | 80% | 50% | N | N |
| oral_clone_P4PA* | | | | | |
| Lutispora_thermophila | clade_564 | 100% | 0% | Y | N |
| Coriobacteriaceae_ | clade_566 | 70% | 0% | N | N |
| bacterium_JC110 | | | | | |
| Eggerthella_sp_1_3_56FAA | clade_566 | 70% | 30% | N | N |
| Adlercreutzia_equolifaciens | clade_566 | 40% | 0% | N | N |
| Gordonibacter_pamelaeae | clade_566 | 30% | 0% | N | Y |
| Slackia_isoflavoniconvertens | clade_566 | 10% | 0% | N | N |
| Eubacterium_desmolans* | clade_572 | 90% | 70% | Y | N |
| Papillibacter_cinnamivorans* | clade_572 | 90% | 80% | Y | N |
| Clostridium_colinum | clade_576 | 30% | 30% | Y | N |
| Akkermansia_muciniphila | clade_583 | 60% | 10% | N | Y |
| Clostridiales_bacterium_ | clade_584 | 60% | 30% | N | N |
| oral_taxon_F32 | | | | | |
| Prochlorococcus_marinus | clade_592 | 30% | 0% | N | N |
| Methanobrevibacter_wolinii | clade_595 | 30% | 0% | N | N |
| Bacteroides_fragilis | clade_65 | 20% | 30% | N | Y |
| Lactobacillus_delbrueckii | clade_72 | 10% | 0% | N | N |
| Escherichia_coli | clade_92 | 50% | 0% | N | Y |
| Clostridium_sp_D5 | clade_96 | 80% | 60% | Y | N |
| Streptococcus_thermophilus | clade_98 | 90% | 20% | N | Y |
| Streptococcus_sp_CM6 | clade_98 | 20% | 10% | N | N |
| Streptococcus_sp_oral_ | clade_98 | 10% | 0% | N | N |
| clone_ASCE05 | | | | | |

TABLE 33
Top 20 OTUs ranked by CES

| | | | Spore | Keystone |
|---|---|---|---|---|
| OTU | Clade | CES | Former | OTU |
| Eubacterium_hadrum | clade_408 | 4.2 | Y | Y |
| Eubacterium_rectale | clade_444 | 4.2 | Y | Y |
| Subdoligranulum_variabile | clade_478 | 4.2 | Y | Y |
| Blautia_sp_M25 | clade_309 | 4.2 | Y | Y |
| Coprococcus_catus | clade_393 | 4.2 | Y | Y |
| Lachnospiraceae_bacterium_ | clade_262 | 4.2 | Y | Y |
| 1_4_56FAA | | | | |
| Coprococcus_comes | clade_262 | 4.2 | Y | Y |
| Blautia_glucerasea | clade_309 | 4.0 | Y | N |
| Lachnobacterium_bovis | clade_444 | 4.0 | Y | N |
| Clostridium_sporosphaeroides | clade_537 | 4.0 | Y | N |
| Clostridiales_sp_SS3_4 | clade_246 | 4.0 | Y | N |
| Papillibacter_cinnamivorans | clade_572 | 4.0 | Y | N |
| Clostridium_bartlettii | clade_354 | 4.0 | Y | N |
| Eubacterium_desmolans | clade_572 | 4.0 | Y | N |
| Clostridium_clostridioforme | clade_408 | 3.2 | Y | Y |
| Dorea_longicatena | clade_360 | 3.2 | Y | Y |
| Faecalibacterium_prausnitzii | clade_478 | 3.2 | Y | Y |
| Eubacterium_hallii | clade_396 | 3.2 | Y | Y |
| Clostridium_leptum | clade_537 | 3.2 | Y | Y |
| Lachnospiraceae_bacterium_ | clade_309 | 3.0 | Y | N |
| 6_1_63FAA | | | | |

TABLE 34
Subsets of the Core Ecology tested in the C. difficile mouse model

| | | Substitute For OTU in |
|---|---|---|
| Subset | OTU | Table 1 (Clade) |
| Subset 1 | Collinsella aerofaciens | none (Clade_553) |
| | Clostridium tertium | C. sporogenes (Clade_252) |
| | Clostridium disporicum | none (Clade_253) |
| | Clostridium innocuum | Clostridium_sp_HGF2 |
| | | (Clade_351) |
| | Clostridium mayombei | none (Clade_354) |
| | Clostridium butyricum | none (Clade_252) |
| | Coprococcus comes | none (Clade_262) |
| | Clostridium hylemonae | none (Clade_260) |
| | Clostridium bolteae | E. hadrum (Clade_408) |
| | Clostridium symbiosum | C. clostridioforme |
| | | (Clade_408) |
| | Clostridium orbiscindens | R._bacterium_D16 |
| | | (Clade_494) |
| | Lachnospiraceae | C. scindens (Clade_260) |
| | bacterium_5_1_57FAA | |
| | Blautia producta | Blautia_sp_M25 |
| | | (Clade_309) |
| | Ruminococcus gnavus | D. longicatena (Clade_360) |
| | Ruminococcus bromii | none (Clade_537) |
| Subset 2 | Collinsella aerofaciens | none (Clade_553) |
| | Clostridium butyricum | none (Clade_252) |
| | Clostridium hylemonae | none (Clade_260) |
| | Blautia producta | Blautia_sp_M25 |
| | | (Clade_309) |
| Subset 3 | Collinsella aerofaciens | none (Clade_553) |
| | Clostridium innocuum | Clostridium_sp_HGF2 |
| | | (Clade_351) |
| | Coprococcus comes | none (Clade_262) |
| | Ruminococcus bromii | none (Clade_537) |
| Subset 4 | Clostridium butyricum | none (Clade_252) |
| | Clostridium hylemonae | none (Clade_260) |
| | Blautia producta | Blautia_sp_M25 |
| | | (Clade_309) |
| Subset 5 | Clostridium butyricum | none (Clade_252) |
| | Clostridium hylemonae | none (Clade_260) |
| Subset 6 | Blautia producta | Blautia_sp_M25 |
| | | (Clade_309) |
| | Clostridium butyricum | none (Clade_252) |
| Subset 7 | Clostridium orbiscindens | R._bacterium_D16 |
| | | (Clade_494) |
| | Lachnospiraceae | C. scindens (Clade_260) |
| | bacterium_5_1_57FAA | |
| | Eubacterium rectale | none (Clade_444) |

TABLE 35
Results of bacterial compositions tested in a C. difficile mouse model

| | | | | Avg. |
|---|---|---|---|---|
| | | | Avg. | Maximum |
| | | Cumulative | Minimum | Clinical |
| | | Mortality | Relative | Score |
| Group | Dose | (%) | Weight | (Death = 4) |
| Vehicle | — | 40 | 0.87 | 2.8 |
| Control | | | | |
| Feces | 5.8e8 cfu | 0 | 0.99 | 0 |
| Control | total | | | |
| Subset 1 | 1e8 | 0 | 0.98 | 0 |
| | cfu/OTU | | | |
| Subset 2 | 1e8 | 10 | 0.84 | 2.1 |
| | cfu/OTU | | | |
| Subset 3 | 1e8 | 10 | 0.84 | 2.2 |
| | cfu/OTU | | | |
| Subset 4 | 1e8 | 0 | 0.87 | 2 |
| | cfu/OTU | | | |
| Subset 5 | 1e8 | 20 | 0.91 | 1.7 |
| | cfu/OTU | | | |
| Subset 6 | 1e8 | 40 | 0.82 | 2.8 |
| | cfu/OTU | | | |
| Subset 7 | 1e8 | 0 | 0.90 | 1 |
| | cfu/OTU | | | |

TABLE 36
OTUs and their clade assignments tested in ternary combinations with results in the in
vitro inhibition assay

| OTU1 | Clade1 | OTU2 | Clade2 |
|---|---|---|---|
| Clostridium_bolteae | clade_408 | Blautia_producta | clade_309 |
| Clostridium_bolteae | clade_408 | Clostridium_symbiosum | clade_408 |
| Clostridium_bolteae | clade_408 | Clostridium_symbiosum | clade_408 |
| Clostridium_bolteae | clade_408 | Clostridium_symbiosum | clade_408 |
| Clostridium_bolteae | clade_408 | Clostridium_symbiosum | clade_408 |
| Clostridium_bolteae | clade_408 | Faecalibacterium_prausnitzii | clade_478 |
| Clostridium_bolteae | clade_408 | Faecalibacterium_prausnitzii | clade_478 |
| Clostridium_bolteae | clade_408 | Faecalibacterium_prausnitzii | clade_478 |
| Clostridium_bolteae | clade_408 | Lachnospiraceae_bacterium_5_1_57FAA | clade_260 |
| Clostridium_bolteae | clade_408 | Lachnospiraceae_bacterium_5_1_57FAA | clade_260 |
| Clostridium_symbiosum | clade_408 | Blautia_producta | clade_309 |
| Clostridium_symbiosum | clade_408 | Faecalibacterium_prausnitzii | clade_478 |
| Clostridium_symbiosum | clade_408 | Faecalibacterium_prausnitzii | clade_478 |
| Clostridium_symbiosum | clade_408 | Faecalibacterium_prausnitzii | clade_478 |
| Clostridium_symbiosum | clade_408 | Lachnospiraceae_bacterium_5_1_57FAA | clade_260 |
| Clostridium_symbiosum | clade_408 | Lachnospiraceae_bacterium_5_1_57FAA | clade_260 |
| Collinsella_aerofaciens | clade_553 | Blautia_producta | clade_309 |
| Collinsella_aerofaciens | clade_553 | Clostridium_bolteae | clade_408 |
| Collinsella_aerofaciens | clade_553 | Clostridium_bolteae | clade_408 |
| Collinsella_aerofaciens | clade_553 | Clostridium_bolteae | clade_408 |
| Collinsella_aerofaciens | clade_553 | Clostridium_bolteae | clade_408 |
| Collinsella_aerofaciens | clade_553 | Clostridium_bolteae | clade_408 |
| Collinsella_aerofaciens | clade_553 | Clostridium_symbiosum | clade_408 |
| Collinsella_aerofaciens | clade_553 | Clostridium_symbiosum | clade_408 |
| Collinsella_aerofaciens | clade_553 | Clostridium_symbiosum | clade_408 |
| Collinsella_aerofaciens | clade_553 | Clostridium_symbiosum | clade_408 |
| Collinsella_aerofaciens | clade_553 | Coprococcus_comes | clade_262 |
| Collinsella_aerofaciens | clade_553 | Coprococcus_comes | clade_262 |
| Collinsella_aerofaciens | clade_553 | Coprococcus_comes | clade_262 |
| Collinsella_aerofaciens | clade_553 | Coprococcus_comes | clade_262 |
| Collinsella_aerofaciens | clade_553 | Coprococcus_comes | clade_262 |
| Collinsella_aerofaciens | clade_553 | Coprococcus_comes | clade_262 |
| Collinsella_aerofaciens | clade_553 | Faecalibacterium_prausnitzii | clade_478 |
| Collinsella_aerofaciens | clade_553 | Faecalibacterium_prausnitzii | clade_478 |
| Collinsella_aerofaciens | clade_553 | Faecalibacterium_prausnitzii | clade_478 |
| Collinsella_aerofaciens | clade_553 | Lachnospiraceae_bacterium_5_1_57FAA | clade_260 |
| Collinsella_aerofaciens | clade_553 | Lachnospiraceae_bacterium_5_1_57FAA | clade_260 |
| Coprococcus_comes | clade_262 | Blautia_producta | clade_309 |
| Coprococcus_comes | clade_262 | Clostridium_bolteae | clade_408 |
| Coprococcus_comes | clade_262 | Clostridium_bolteae | clade_408 |
| Coprococcus_comes | clade_262 | Clostridium_bolteae | clade_408 |
| Coprococcus_comes | clade_262 | Clostridium_bolteae | clade_408 |
| Coprococcus_comes | clade_262 | Clostridium_bolteae | clade_408 |
| Coprococcus_comes | clade_262 | Clostridium_symbiosum | clade_408 |
| Coprococcus_comes | clade_262 | Clostridium_symbiosum | clade_408 |
| Coprococcus_comes | clade_262 | Clostridium_symbiosum | clade_408 |
| Coprococcus_comes | clade_262 | Clostridium_symbiosum | clade_408 |
| Coprococcus_comes | clade_262 | Faecalibacterium_prausnitzii | clade_478 |
| Coprococcus_comes | clade_262 | Faecalibacterium_prausnitzii | clade_478 |
| Coprococcus_comes | clade_262 | Faecalibacterium_prausnitzii | clade_478 |
| Coprococcus_comes | clade_262 | Lachnospiraceae_bacterium_5_1_57FAA | clade_260 |
| Coprococcus_comes | clade_262 | Lachnospiraceae_bacterium_5_1_57FAA | clade_260 |
| Faecalibacterium_prausnitzii | clade_478 | Blautia_producta | clade_309 |
| Faecalibacterium_prausnitzii | clade_478 | Lachnospiraceae_bacterium_5_1_57FAA | clade_260 |
| Faecalibacterium_prausnitzii | clade_478 | Lachnospiraceae_bacterium_5_1_57FAA | clade_260 |
| Lachnospiraceae_bacterium_5_1_57FAA | clade_260 | Blautia_producta | clade_309 |

| OTU3 | Clade3 | Results |
|---|---|---|
| Eubacterium_rectale | clade_444 | ++++ |
| Blautia_producta | clade_309 | ++++ |
| Eubacterium_rectale | clade_444 | − |
| Faecalibacterium_prausnitzii | clade_478 | − |
| Lachnospiraceae_bacterium_5_1_57FAA | clade_260 | |
| Blautia_producta | clade_309 | ++++ |
| Eubacterium_rectale | clade_444 | |
| Lachnospiraceae_bacterium_5_1_57FAA | clade_260 | ++++ |
| Blautia_producta | clade_309 | ++++ |
| Eubacterium_rectale | clade_444 | + |
| Eubacterium_rectale | clade_444 | ++++ |
| Blautia_producta | clade_309 | ++++ |
| Eubacterium_rectale | clade_444 | |
| Lachnospiraceae_bacterium_5_1_57FAA | clade_260 | + |
| Blautia_producta | clade_309 | ++++ |
| Eubacterium_rectale | clade_444 | |
| Eubacterium_rectale | clade_444 | ++++ |
| Blautia_producta | clade_309 | ++++ |
| Clostridium_symbiosum | clade_408 | ++++ |
| Eubacterium_rectale | clade_444 | ++++ |
| Faecalibacterium_prausnitzii | clade_478 | ++++ |
| Lachnospiraceae_bacterium_5_1_57FAA | clade_260 | ++++ |
| Blautia_producta | clade_309 | ++++ |
| Eubacterium_rectale | clade_444 | |
| Faecalibacterium_prausnitzii | clade_478 | |
| Lachnospiraceae_bacterium_5_1_57FAA | clade_260 | + |
| Blautia_producta | clade_309 | ++++ |
| Clostridium_bolteae | clade_408 | ++++ |
| Clostridium_symbiosum | clade_408 | +++ |
| Eubacterium_rectale | clade_444 | +++ |
| Faecalibacterium_prausnitzii | clade_478 | ++++ |
| Lachnospiraceae_bacterium_5_1_57FAA | clade_260 | +++ |
| Blautia_producta | clade_309 | ++++ |
| Eubacterium_rectale | clade_444 | +++ |
| Lachnospiraceae_bacterium_5_1_57FAA | clade_260 | +++ |
| Blautia_producta | clade_309 | ++++ |
| Eubacterium_rectale | clade_444 | ++++ |
| Eubacterium_rectale | clade_444 | ++++ |
| Blautia_producta | clade_309 | ++++ |
| Clostridium_symbiosum | clade_408 | |
| Eubacterium_rectale | clade_444 | −− |
| Faecalibacterium_prausnitzii | clade_478 | +++ |
| Lachnospiraceae_bacterium_5_1_57FAA | clade_260 | +++ |
| Blautia_producta | clade_309 | ++++ |
| Eubacterium_rectale | clade_444 | −−− |
| Faecalibacterium_prausnitzii | clade_478 | |
| Lachnospiraceae_bacterium_5_1_57FAA | clade_260 | |
| Blautia_producta | clade_309 | ++++ |
| Eubacterium_rectale | clade_444 | − |
| Lachnospiraceae_bacterium_5_1_57FAA | clade_260 | |
| Blautia_producta | clade_309 | ++++ |
| Eubacterium_rectale | clade_444 | |
| Eubacterium_rectale | clade_444 | ++++ |
| Blautia_producta | clade_309 | ++++ |
| Eubacterium_rectale | clade_444 | |
| Eubacterium_rectale | clade_444 | ++++ |

What is claimed is:

1. A method of characterizing a therapeutic composition, comprising the steps of:
(a) providing a therapeutic composition comprising at least one desired bacterial strain and optionally comprising at least one undesired bacterial strain;
(b) subjecting the therapeutic composition to a first detection step and a second detection step,
wherein the first detection step comprises attempting to culture at least one undesired bacterial strain, and wherein the second detection step comprises attempting to amplify at least one target nucleic acid sequence not present in the desired bacterial strain, thereby characterizing the therapeutic composition.

2. The method of claim 1, wherein the desired bacterial strain comprises a plurality of desired bacterial strains.

3. The method of claim 1, wherein the result of the attempt to culture the at least one undesired bacterial strain is that the undesired bacterial strain is not detectably cultured.

4. The method of claim 1, wherein the undesired bacterial strain is not known to be present in the therapeutic composition.

5. The method of claim 1, wherein the undesired bacterial strain is a contaminating bacterial strain derived from the manufacturing environment or process.

6. The method of claim 1, wherein the result of the attempt to amplify the at least one target nucleic acid sequence is that the target nucleic acid sequence is not detectably amplified.

7. The method of claim 6, wherein the target nucleic acid sequence is present in i) a bacterial strain derived from a fecal culture, and/or ii) a fecal material.

8. The method of claim 1, wherein the first detection step has a sensitivity for the undesired bacterial strain of at least 1×10⁻³, and wherein the second detection step has a sensitivity for the undesired bacterial strain of at least 1×10⁻³.

9. The method of claim 1, wherein the first detection step has a sensitivity for the undesired bacterial strain of at least 1×10⁻⁴, and wherein the second detection step has a sensitivity for the undesired bacterial strain of at least 1×10⁻⁴.

10. The method of claim 1, wherein the first detection step has a sensitivity for the undesired bacterial strain of at least 1×10⁻⁵, and wherein the second detection step has a sensitivity for the undesired bacterial strain of at least 1×10⁻⁵.

11. The method of claim 1, further comprising the step of detecting, or attempting to detect, a non-bacterial microbial contaminant in the therapeutic composition.

12. The method of claim 11, wherein the non-bacterial microbial contaminant comprises a phage, virus, or eukaryotic contaminant.

13. The method of claim 1, wherein the first detection step is performed prior to the second detection step.

14. The method of claim 1, wherein the first detection step is performed after the second detection step.

15. The method of claim 1, wherein the first detection step and the second detection step are performed concurrently.

16. The method of any of claims 1-15, wherein the second detection step is carried out using a product of the first detection step.

17. The method of any of claims 1-15, wherein the first detection step is carried out using a product of the second detection step.

18. The method of claim 1, wherein the therapeutic composition is validated to detect a contaminant in a background of 1×10⁵ CFU of the product bacteria.

19. The method of claim 1, further comprising the step of attempting to enrich at least one undesired bacterial strain in the therapeutic composition.

20. The validated therapeutic composition provided by the method of claim 1.

21. A method of characterizing a therapeutic composition, comprising the steps of:
(a) providing a therapeutic composition comprising at least one desired entity and optionally comprising at least one undesired entity;
(b) subjecting the therapeutic composition to an enrichment step wherein the at least one undesired entity or component thereof, if present in the therapeutic composition, is enriched; and
(c) subjecting the enriched therapeutic composition to a first detection step and a second detection step, wherein the first detection step comprises attempting to detect the undesired entity at a concentration of about less than or equal to 1×10⁻³ the concentration of the desired entity, and wherein the second detection step comprises attempting to detect the undesired entity at a concentration of about less than or equal to 1×10⁻³ the concentration of the desired entity, wherein the first detection step and the second detection step are not identical, thereby characterizing the therapeutic composition.

22. The method of claim 21, wherein the first detection step comprises attempting to detect the undesired entity at a concentration of about less than or equal to 1×10⁻⁴ the concentration of the desired entity, and wherein the second detection step comprises attempting to detect the undesired entity at a concentration of about less than or equal to 1×10⁻⁴ the concentration of the desired entity.

23. The method of claim 21, wherein the first detection step comprises attempting to detect the undesired entity at a concentration of about less than or equal to 1×10⁻⁵ the concentration of the desired entity, and wherein the second detection step comprises attempting to detect the undesired entity at a concentration of about less than or equal to 1×10⁻⁵ the concentration of the desired entity.

24. The method of claim 21, wherein the desired entity comprises a plurality of desired entities.

25. The method of claim 21, wherein the at least one desired entity comprises a bacteria.

26. The method of claim 21, wherein the at least one undesired entity comprises a bacterium, yeast, virus or combination thereof.

27. The method of claim 21, wherein the first detection step and the second detection step are performed simultaneously.

28. The method of claim 21, wherein the first detection step and the second detection step are performed sequentially.

29. The method of claim 21, wherein the second detection step detects a product of the first detection step.

30. The method of claim 21, wherein the undesired entity is not detectably present in the characterized therapeutic composition at a concentration of about greater than or equal to 1×10⁻⁷ the concentration of the desired entity.

31. The method of claim 21, wherein the component of the undesired entity comprises a nucleic acid.

32. A method of characterizing a bacterial composition, comprising the steps of:
(a) providing a composition comprising at least one desired bacterial species and optionally comprising at least one undesired entity;
(b) subjecting the therapeutic composition to a first detection step and a second detection step, wherein the first detection step comprises attempting to detect the at least one undesired entity and the first detection step has a sensitivity for the undesired entity of at least 1×10-3, and wherein the second detection step comprises attempting to detect the at least one undesired entity and the second detection step has a sensitivity for the undesired entity of at least 1×10-3, wherein the first and second detection steps are not identical and have a combined sensitivity for the undesired entity of at least 1×10-6.

33. The method of claim 32, wherein the first detection step comprises attempting to detect the at least one undesired entity and the first detection step has a sensitivity for the undesired entity of at least 1×10⁻⁴, and wherein the second detection step comprises attempting to detect the at least one undesired entity and the second detection step has a sensitivity for the undesired entity of at least 1×10⁻⁴.

34. The method of claim 32, wherein the first detection step comprises attempting to detect the at least one undesired entity and the first detection step has a sensitivity for the undesired entity of at least 1×10⁻⁵, and wherein the second detection step comprises attempting to detect the at least one undesired entity and the second detection step has a sensitivity for the undesired entity of at least 1×10⁻⁵.

35. The method of claim 32, wherein the at least one desired bacterial species comprises a plurality of desired bacterial species.

36. The method of claim 32, wherein the first detection step is performed prior to the second detection step.

37. The method of claim 32, wherein the first detection step and the second detection step are performed concurrently.

38. The method of claim 32, wherein the first detection step is carried out using a product of the second detection step.

39. The method of claim 32, wherein the second detection step is carried out using a product of the first detection step.

40. A method of characterizing a spore population present in a composition comprising the steps of:
(a) purifying the spore population present in a composition from a fecal donation; and
(b) deriving the spore population present in a composition through culture methods.

41. The method of claim 40, wherein the spore population present in a composition is purified via solvent, acid, detergent, or heat treatment, or a density gradient separation, filtration, or any combination of methods.

42. The method of claim 40, wherein the purifying increases the purity, potency, and/or concentration of spores in a sample.

43. The method of claim 40, wherein the spore population is derived starting from isolated spore former species or spore former OTUs or from a mixture of such species.

44. The method of claim 40, wherein the spore population is in vegetative or spore form.

45. The method of claim 40, wherein the spores can be purified from natural sources including but not limited to feces, soil, and water.

46. The method of claim 40, wherein the spore population is a non-limiting subset of a microbial composition.

47. The method of claim 40, wherein ethanol treated fecal suspensions are a non-limiting additional subset of a microbial composition enriched for spores and spore formers.

48. The method of claim 40, wherein the spore population comprises spore forming species wherein residual non-spore forming species have been inactivated by chemical or physical treatments.

49. The method of claim 48, wherein the chemical or physical treatments include ethanol, detergent, heat or sonication.

50. The method of claim 40, wherein the non-spore forming species have been removed from the spore preparation by various separation steps.

51. The method of claim 50, wherein the separation steps include density gradients, centrifugation, filtration and chromatography.

52. The method of claim 40, wherein inactivation and separation methods are combined to make the spore preparation.

53. The method of claim 40, wherein the spore preparation comprises spore forming species that are enriched over viable non-spore formers or vegetative forms of spore formers.

54. The method of claim 53, wherein the spores are enriched by 2-fold, 5-fold, 10-fold, 50-fold, 100-fold, 1000-fold, 10,000 fold or greater than 10,000-fold compared to all vegetative forms of bacteria.

55. The method of claim 40, wherein the spores in the spore preparation undergo partial germination during processing and formulation such that the final composition comprises spores and vegetative bacteria derived from spore forming species.

The application's sequence listing, which the Patent Office published only in electronic form, follows.

SEQUENCE LISTING (2048 sequences)

SEQ ID NO: 1 - DNA, 1532 bp, Abiotrophia defectiva
atgagagtttgatcctggctcaggatgaacgctggcggcgtgcctaacacatgcaagtcgaacggagattacggacggaagttttcggatggaagcctgtaattcttagtggcggacgggtgagtaacgcgtgggcaacctgccctatacagggggatagcagctggaaacggctggtaagaccgcataagtcggttaaatcgcatgatttgatcgggaaatgagcaatcaggtataggatgggcccgcgtccgattagccagttggcagggtaaaagcctaccaaagcgacgatcggtagccggactgagaggtcggacggccacattgggactgagacacggcccaaactcctacgggaggcagcagtgggggatattgcacaatggaggaaactctgatgcagcgacgccgcgtgagtgaagaagtatttcggtatgtaaagctctatcagcagggaagatgatgacggtacctgactaagaagccccggctaactacgcgccagcagccgcggtaatacgtagggggcaagcgttatccggatttactgggtgtaaagggagcgcaggcggttttgcaagttgagagtggaagcagggggctcaaccccctgactgctcccaaaactgtaaaacttgagtatgggagaggcaggcggaattcctagtgtagcggtgaaatgcttagatattaggaagaacaccggtggcgaaggcggcctgctggaccaaaactgacgctgaggctcgaaagcgtgggtagcaaacaggattagataccctggtagtccacgctgtaaacgatgaatactaggtgctgggatgcataagcatttcggtgccgtcgcaaacgcattaagtattccacctggggagtacgttcgcaagaatgaaactcaaaggaattgacggggacccgcacaagcggtggagcatgtggtttaattcgacgcaacgcgaagaaccttacccggtcttgagatcctcctgaatactgagtaatgtcagtagtccttcgggacaggagagacaggtggtgcatggttgtcgtcagctcgtgtcgtgagatgttgggttaagtcccgcaacgagcgcaacccctatttttagtagccagcggttcggccgggcactctaaagagactgccgaggataactcggaggaaggcggggatgacgtcaaatcatcatgccccttatgaccggggctacacacgtgctacaatggcagttacagagggaagcgaaggcgtgagccggagcaaatctcagaaaggctgcctcagttcggattgtagtctgcaactcgactacatgaagctggaatcgctagtaatcgcgaatcagaatgtcgcggtgaatacgttcccgggtcttgtacacaccgcccgtcacaccatgggagtcggaaatgcccgaagtcagtggcctaaccgtaagggaggagctgccgaaggcaggtctggtgactggggtgaagtcgtaacaaggtagccgtatcggaaggtgcggctggatcacctcctttct

SEQ ID NO: 2 - DNA, 1407 bp, Abiotrophia para-adiacens
agagtttgatcatggctcaggacgaacgctggcggcgtgcctaatacatgcaagtcgaacgagagcgaccggtgcttgcactggtcaatctagtggcgaacgggtgagtaacacgtgggtaacctgcccatcagagggggataacattcggaaacggatgctaaaaccgcataggtcttcgaaccgcatggtttgaagaggaaaagaggcgcaagcttctgctgatggatggacccgcggtgcattagctagttggtgaggtaacggctcaccaaggccgtgatgcatagccgacctgagagggtgatcggccacattgggactgagacacggcccaaactcctacgggaggcagcagtagggaatcttccgcaatggacgcaagtctgacggagcaacgccgcgtgagtgaagaaggttttcggatcgtaaaactctgttgttagagaagaacaagtgctagagtaactgttagcgccttgacggtatctaaccagaaagccacggctaactacgtgccagcagccgcggtaatacgtaggtggcaagcgttgtccggatttattgggcgtaaagcgagcgcaggcggttccttaagtctgatgtgaaagcccccggctcaaccggggagggtcattggaaactggggaacttgagtgcagaagaggagagtggaattccatgtgtagcggtgaaatgcgtagatatatggaggaacaccagtggcgaaggcgactctctggtctgtaactgacgctgaggctcgaaagcgtgggtagcaaacaggattagataccctggtagtccacgccgtaaacgatgagtgctaagtgttggagggtttccgcccttcagtgctgcagttaacgcattaagcactccgcctggggagtacgaccgcaaggttgaaactcaaaggaattgacggggacccgcacaagcggtggagcatgtggtttaattcgaagcaacgcgaagaaccttaccaagtcttgacatcctttgaccactctagagatagagctttcccttcggggacaaagtgacaggtggtgcatggttgtcgtcagctcgtgtcgtgagatgttgggttaagtcccgcaacgagcgcaacccttattactagttgccagcattgagttgggcactctagtgagactgccggtgacaaaccggaggaaggtggggatgacgtcaaatcatcatgccccttatgacttgggctacacacgtgctacaatggatggtacaacgagcagcgaactcgcgagggtaagcgaatctcttaaagccattctcagttcggattgtaggctgcaactcgcctacatgaagccggaatcgctagtaatcgcggatcagcacgccgcggtgaatacgttcccgggtcttgtacacaccgcccgt

SEQ ID NO: 3 - DNA, 1328 bp, Abiotrophia sp.
  oral clone P4PA_155 P1
gacgaacgctggcggtgtgcctaatacatgcaagtcgaacgagtggcgaacgggtgagtaacacgtgggtaacctacctcatagtgggggataacagtcggaaacgactgctaataccgcatagggaaagtcgctaagagatggacccgcggtgcattagctggttggtagggtaaaggcctaccaaggcgatgatgcatagccgacctgagagggtgatcggccacattgggactgagactcggcccagactcctacgggaggcagcagtagggaatcttccgcaatggacgcaagtctgacggagcaacgccgcgtgagtgaagaaggtcttcggatcgtaaagctctgttgttggagaagatgacggtatctaaccggaaagccacggctaactacgtgccagcagccgcggtaatacgtaggtggcgagcgttgtccggatttattgggcgtaaagggagtgtaggcggtcttttaagtctgatgtgaaagcccacggctcaaccgtggagggtcattggaaactgggagacttgagtgcagaagaggagagcggaattccatgtgtagcggtgaaatgcgtagatatatggaggaacaccagtggcgaaggcggctctctggtctgactgacgctgaggctcgaaagcgtggggagcaaacaggattagataccctggtagtccacgccgtaaacgatgagtgctaagtgttggagcttcagtgctggagttaacgcaataagcactccgcctggggagtacggccgcaaggctgaaactcaaaggaattgacggggacccgcacaagcggtggagcatgtggtttaattcgaagcaacgcgaagaaccttaccaggtcttgacatcgacaggtggtgcatggttgtcgtcagctcgtgtcgtgagatgttgggttaagtcccgcaacgagcgcaacccctataactagttgccagcatggggactctagttagactgccggtgacaaaccggaggaaggtggggatgacgtcaaatcatcatgccccttatgacctgggctacacacgtgctacaatggatggcaacgagcagcgaactcgcgagggtaagcgaatctctaccattctcagttcggatgtagtctgcaacccgactacagaagccggaatcgctagtaatcgcggatcagcacgccgcggtgaatacgttcccgggtcttgtacacaccgcccgtcacaccacgagagtttgtaacacccgaagccggtgcctagggagccgtcgaaggtgggatagatgattggggtgaagtcgtaacaaggtagccgtatcggaaggtgc

SEQ ID NO: 4 - DNA, 1533 bp, Acetanaerobacterium elongatum
gagtttgatcctggctcaggacgaacgctggcggcgcgcctaacacatgcaagtcgagcggagtaatgtctaacacagagcggtgaaggatgattcactgttgtgtgttagatgttacttagcggcggacgggtgagtaacacgtgagcaatctgcctttcagagggggataacgtttggaaacgaacgctaataccgcatgatatacctaggtcgcatgaccttggtatcaaaggagcaatccgctgaaagatgagctcgcgtccgattaggtagttggtgaggtaacggcccaccaagcctgcgatcggtagccggactgagaggtcgatcggccacattgggactgagacacggcccagactcctacgggaggcagcagtgggggatattgcacaatggaggaaactctgatgcagcgacgccgcgtgagggaagaaggtcttcggattgtaaacctctgtcttcggggacgataatgacggtacccgaggaggaagccacggctaactacgtgccagcagccgcggtaatacgtaggtggcaagcgttgtccggaattactgggtgtaaagggagcgtaggcgggctcgcaagttgaatgttaaatctaccggctcaaccggtaaccgcgttcaaaactgcgagtcttgagtgtagtagaggcaggcggaattcctagtgtagcggtgaaatgcgtagatattaggaggaacaccagtggcgaaggcggcctgctgggcttttactgacgctgatgctcgaaagcatggggagcaaacaggattagataccctggtagtccatgccgtaaacgatgattactaggtgtggggggactgaccccttccgtgccgcagttaacacaataagtaatccacctggggagtacggccgcaaggttgaaactcaaaggaattgacgggggcccgcacaagcagtggagtatgtggtttaattcgaagcaacgcgaagaaccttaccaggtcttgacatcgcacgcattacctagagatagggaagcccttcggggcgtgtagacaggtggtgcatggttgtcgtcagctcgtgtcgtgagatgttgggttaagtcccgcaacgagcgcaacccttacagttagttgctacgcaagagcactctaacaggactgccgttgacaaaacggaggaaggtggggatgacgtcaaatcatcatgccccttatgacctgggccacacacgtactacaatggccatcaacagaggggtgcaaagccgcgaggcagagcaaatctcaaaaaatggtctcagttcggattgcaggctgcaactcgcctgcatgaagccggaattgctagtaatcgcgaatcagcatgtcgcggtgaatacgttcccgggccttgtacacaccgcccgtcacaccatgagagccggtaacacccgaagcttgtagtctaaccgcaaggaggacgcaattgaaggtggggctggtaattggggtgaagtcgtaacaaggtagccgtatcggaaggtgcggctggatcacctcctta

SEQ ID NO: 5 - DNA, 1464 bp, Acetivibrio cellulolyticus
gacgaacgctggcggcgtgcttaacacatgcaagtcgagcggagaatatagcaatatattcttagcggcggacgggtgagtaacgcgtgggcaatctgcctcatacagggggataacactgggaaactagtgctaataccgcataaaatagtgaagtggcatcactttactatcaaaggagcaatccggtgtgagatgagcccgcgtccgattagctagttggtggggtaacggcccaccaaggcgacgatcggtagccgaactgagaggttgatcggccacattgggactgagacacggcccagactcctacgggaggcagcagtggggaatattgcgcaatgggggaaaccctgacgcagcaacgccgcgtgaaggatgaaggttttcggattgtaaacttctttgattggggacgataatgacggtacccaaaaaacaagccacggctaactacgtgccagcagccgcggtaatacgtaggtggcaagcgttgtccggatttactgggtgtaaagggcgtgtaggcggggatgcaagtcagatgtgaaattcggggctcaaccccggcgctgcatctgaaactgtatctcttgagtgctggagaggaaagcggaattcctagtgtagcggtgaaatgcgtagatattaggaggaacaccagtggcgaaggcggctttctggacagtaactgacgctgaggcgcgaaagcgtggggagcgaacaggattagataccctggtagtccacgccgtaaacgatggatactaggtgtaggaggtatcgaccccttctgtgccggagttaacacaataagtatcccacctggggagtacggccgcaaggttgaaactcaaaggaattgacgggggcccgcacaagcagtggagtatgtggtttaattcgaagcaacgcgaagaaccttaccagggcttgacataccattgacgtayctagagataggtatttcttcgggacaatggatacaggtggtgcatggttgtcgtcagctcgtgtcgtgagatgttgggttaagtcccgcaacgagcgcaacccctgttgttagttgccatcattaagttgggcactctagcgagactgccggtgacaaatcggaggaaggtggggacgacgtcaaatcatcatgccccttatgtcctgggctacacacgtactacaatggctattacagagggaagcgaagccgtgaggtggagcaaatctccaaaaatagtcccagttcagattgtaggctgaaactcgcctacatgaagtcggaattgctagtaatggcaggtcagcatactgccgtgaatacgttcccgggccttgtacacaccgcccgtcacaccatgagagtctgcaacacccgaagtcagtagtctaactgtaaagaggacgctgccgaaggtggggccgatgattggggtgaagtcgtaacaaggtagccgtatcggaaggtgc

SEQ ID NO: 6 - DNA, 1529 bp, Acetivibrio ethanolgignens
tgatcctggctcaggatgaacgctggcggcgtgcttaacacatgcaagtcgaacgaagcacttaaaacagattggaatagcttgctaggaagagaagttttatttgactgagtggcggacgggtgagtaacgcgtgggtaacctgcctcacacagggggataacagttagaaatgactgctaataccgcataatatgcagcctcgcatgagactgctttgaaaactccggtggtgtgagatgggcccgcgtctgattagccagttggcagggtaacggcctaccaaagcgacgatcagtagccggcttgagagagtgaacggccacattgggactgagacacggcccaaactcctacgggaggcagcagtggggaatattgcacaatgggggaaaccctgatgcagcgacgccgcgtgagtgaagaagtatttcggtatgtaaagctctatcagcagggaagataatgacggtacctgactaagaagccccggctaactacgtgccagcagccgcggtaatacgtagggggcaagcgttatccggatttactgggtgtaaagggagcgtaggtggttcggcaagtctgatgtgaaagcccggggctcaaccccgggactgcattggaaactgtcggacttgagtgctggagaggtaagtggaattcctagtgtagcggtgaaatgcgtagatattaggaggaacaccagtggcgaaggcggcttactggacagtaactgacactgaggctcgaaagcgtggggagcaaacaggattagataccctggtagtccacgccgtaaacgatgaatactaggtgtcggggcccataagggcttcggtgccgcagctaacgcaataagtattccacctggggagtacgttcgcaagaatgaaactcaaaggaattgacggggacccgcacaagcggtggagcatgtggtttaattcgaagcaacgcgaagaaccttaccaggtcttgacatcccgacgaccggcccgtaacggggtcctttcttcggaacgtcggtgacaggtggtgcatggttgtcgtcagctcgtgtcgtgagatgttgggttaagtcccgcaacgagcgcaacccctgttcttagtagccagcagttcggctgggcactctagggagactgccagggataacctggaggaaggtggggatgacgtcaaatcatcatgccccttatgatctgggctacacacgtgctacaatggcgtaaacaaagggaagcgaccctgtgaaggtaagcaaatctcaaaaataacgtctcagttcggattgtagtctgcaactcgactacatgaagctggaatcgctagtaatcgcaaatcagaatgttgcggtgaatacgttcccgggtcttgtacacaccgcccgtcacaccatgggagtcggatatgcccgaagtcagtgacctaaccgcaaggagggagctgccgaaggtggagccgatgactggggtgaagtcgtaacaaggtagccgtatcggaaggtgcggctggatcacctcctt

SEQ ID NO: 7 - DNA, 1480 bp, Acetobacter aceti
gagtttgattctggctcagagcgaacgctggcggcatgcttaacacatgcaagtcgcacgaaggcttcggccttagtggcggacgggtgagtaacgcgtaggaatctatccatgggtgggggataactccgggaaactggagctaataccgcatgatacctgagggtcaaaggcgcaagtcgcctgtggaggagtctgcgtttgattagcttgttggtggggtaaaggcctaccaaggcgatgatcaatagctggtctgagaggatgatcagccacactgggactgagacacggcccagactcctacgggaggcagcagtggggaatattggacaatgggggcaaccctgatccagcaatgccgcgtgtgtgaagaaggttttcggattgtaaagcactttcggcggggacgatgatgacggtacccgcagaagaagccccggctaacttcgtgccagcagccgcggtaatacgaagggggctagcgttgctcggaatgactgggcgtaaagggcgtgtaggcggtttgtacagtcagatgtgaaatccccgggcttaacctgggagctgcatttgatacgtgcagactagagtatgagagagggttgtggaattctcagtgtagaggtgaaattcgtagatattgggaagaacaccggtggcgaaggcggcaacctggctcattactgacgctgaggcgcgaaagcgtggggagcaaacaggattagataccctggtagtccacgctgtaaacgatgtgtgctggatgttgggtaacttagttactcagtgtcgtagctaacgcgataagcacaccgcctggggagtacggccgcaaggttgaaactcaaaggaattgacgggggcccgcacaagcggtggagcatgtggtttaattcgaagcaacgcgcagaaccttaccagggcttgtatggagaggctgtattcagagatggatatttcccgcaagggacctcttgcacaggtgctgcatggctgtcgtcagctcgtgtcgtgagatgttgggttaagtcccgcaacgagcgcaacccttatctttagttgccagcatgtttgggtgggcactctaaagagactgccggtgacaagccggaggaaggtggggatgacgtcaagtcctcatggcccttatgtcctgggctacacacgtgctacaatggcggtgacagtgggaagctagatggcgacatcgtgccgatctctaaaaaccgtctcagttcggattgcactctgcaactcgagtgcatgaaggtggaatcgctagtaatcgcggatcagcatgccgcggtgaatacgttcccgggccttgtacacaccgcccgtcacaccatgggagttggtttgaccttaagccggtgagcgaaccgcaaggacgcagccgaccacggtcgggtcagcgactggggtgaagtcgtaacaaggtagccgtaggggaacctgcggctggatcacctccttt

SEQ ID NO: 8 - DNA, 1442 bp, Acetobacter fabarum
agcgaacgctggcggcatgcttaacacatgcaagtcgcacgaacctttcggggttagtggcggacgggtgagtaacgcgtaggaatctgtccacgggtgggggataactctgggaaactggagctaataccgcatgatacctgagggtcaaaggcgcaagtcgcctgtggaggagcctgcgttcgattagctagttggtggggtaaaggcctaccaaggcgatgatcgatagctggtttgagaggatgatcagccacactgggactgagacacggcccagactcctacgggaggcagcagtggggaatattggacaatgggggcaaccctgatccagcaatgccgcgtgtgtgaagaaggtcttcggattgtaaagcactttcgacggggacgatgatgacggtacccgtagaagaagccccggctaacttcgtgccagcagccgcggtaatacgaagggggctagcgttgctcggaatgactgggcgtaaagggcgtgtaggcggtttacacagtcagatgtgaaatccccgggcttaacctgggagctgcatttgatacgtgtagactagagtgtgagagagggttgtggaattcccagtgtagaggtgaaattcgtagatattgggaagaacaccggtggcgaaggcggcaacctggctcattactgacgctgaggcgcgaaagcgtggggagcaaacaggattagataccctggtagtccacgctgtaaacgatgtgtgctagatgttgggtaactttgttattcagtgtcgcagttaacgcgttaagcacaccgcctggggagtacggccgcaaggttgaaactcaaaggaattgacgggggcccgcacaagcggtggagcatgtggtttaattcgaagcaacgcgcagaaccttaccagggcttgaatgtagaggctgtattcagagatggatatttcccgcaagggacctctaacacaggtgctgcatggctgtcgtcagctcgtgtcgtgagatgttgggttaagtcccgcaacgagcgcaacccctatctttagttgccagcatgtttgggtgggcactctagagagactgccggtgacaagccggaggaaggtggggatgacgtcaagtcctcatggcccttatgtcctgggctacacacgtgctacaatggcggtgacagtgggaagctagatggtgacatcgtgctgatctctaaaagccgtctcagttcggattgcactctgcaactcgagtgcatgaaggtggaatcgctagtaatcgcggatcagcatgccgcggtgaatacgttcccgggccttgtacacaccgcccgtcacaccatgggagttggtttgaccttaagccggtgagcgaacccgcaaggggcgcagccgaccacggtcgggtcagcgactggggtgaagtcgtaacaaggtagccgtaggggaacc

SEQ ID NO: 9 - DNA, 1443 bp, Acetobacter lovaniensis
tgagttttgatcctggctcagagcgaacgctggcggcatgcttaacacatgcaagtcgcacgaacctttcggggttagtggcggacgggtgagtaacgcgtaggaatctgtccacgggtgggggataactctgggaaactggagctaataccgcatgatacctgagggtcaaaggcgcaagtcgcctgtggaggagcctgcgttcgattagctagttggtggggtaaaggcctaccaaggcgatgatcgatagctggtttgagaggatgatcagccacactgggactgagacacggcccagactcctacgggaggcagcagtggggaatattggacaatgggggcaaccctgatccagcaatgccgcgtgtgtgaagaaggtcttcggattgtaaagcactttcgacggggacgatgatgacggtacccgtagaagaagccccggctaacttcgtgccagcagccgcggtaatacgaagggggctagcgttgctcggaatgactgggcgtaaagggcgtgtaggcggtttacacagtcagatgtgaaatccccgggcttaacctgggagctgcatttgatacgtgtagactagagtgtgagagagggttgtggaattcccagtgtagaggtgaaattcgtagatattgggaagaacaccggtggcgaaggcggcaacctggctcatgactgacgctgaggcgcgaaagcgtggggagcaaacaggattagataccctggtagtccacgctgtaaacgatgtgtgctagatgttgggtaactttgttattcagtgtcgcagttaacgcgttaagcacaccgcctggggagtacggccgcaaggttgaaactcaaaggaattgacgggggcccgcacaagcggtggagcatgtggtttaattcgaagcaacgcgcagaaccttaccagggcttgaatgtagaggctgtattcagagatggatatttcccgcaagggacctctaacacaggtgctgcatggctgtcgtcagctcgtgtcgtgagatgttgggttaagtcccgcaacgagcgcaacccctatctttagttgccagcatgtttgggtgggcactctagagagactgccggtgacaagccggaggaaggtggggatgacgtcaagtcctcatggcccttatgtcctgggctacacacgtgctacaatggcggtgacagtgggaagctagatggtgacatcatgctgatctctaaaagccgtctcagttcggattgcactctgcaactcgagtgcatgaaggtggaatcgctagtaatcgcggatcagcatgccgcggtgaatacgttcccgggccttgtacacaccgcccgtcacaccatgggagttggtttgaccttaagccggtgagcgaacccgcaaggggcgcagccgaccacggtcgggtccagcgactggggtgaagtcgtac

SEQ ID NO: 10 - DNA, 1442 bp, Acetobacter malorum
agcgaacgctggcggcatgcttaacacatgcaagtcgcacgaaggcttcggccttagtggcggacgggtgagtaacgcgtaggaatctatccacgggtgggggataactccgggaaactggagctaataccgcatgatacctgagggtcaaaggcgcaagtcgcctgtggaggagcctgcgtttgattagcttgttggtggggtaatggcctaccaaggcgatgatcaatagctggtctgagaggatgatcagccacactgggactgagacacggcccagactcctacgggaggcagcagtggggaatattggacaatgggggcaaccctgatccagcaatgccgcgtgtgtgaagaaggttttcggattgtaaagcactttcggcggggacgatgatgacggtacccgcagaagaagccccggctaacttcgtgccagcagccgcggtaatacgaagggggctagcgttgctcggaatgactgggcgtaaagggcgtgtaggcggtttgtacagttagatgtgaaatccccgggcttaacctgggagctgcatttaatacgtgcagactagagtgtgagagagggttgtggaattcccagtgtagaggtgaaattcgtagatattgggaagaacaccggtggcgaaggcggcaacctggctcattactgacgctgaggcgcgaaagcgtggggagcaaacaggattagataccctggtagtccacgctgtaaacgatgtgtgctggatgttgggtaacttagttactcagtgtcgtagctaacgcgataagcacaccgcctggggagtacggccgcaaggttgaaactcaaaggaattgacgggggcccgcacaagcggtggagcatgtggtttaattcgaagcaacgcgcagaaccttaccagggcttgtatgggtaggctgtgtccagagatgggcatttcccgcaagggacctaccgcacaggtgctgcatggctgtcgtcagctcgtgtcgtgagatgttgggttaagtcccgcaacgagcgcaacccctatctttagttgccagcatgtttgggtgggcactctagagagactgccggtgacaagccggaggaaggtggggatgacgtcaagtcctcatggcccttatgtcctgggctacacacgtgctacaatggcgatgacaatgggaagctagatggcgacatcgtgctgatctcaaaaagtcgtctcagttcggattgcactctgcaactcgagtgcatgaaggtggaatcgctagtaatcgcggatcagcatgccgcggtgaatacgttcccgggccttgtacacaccgcccgtcacaccatgggagttggtttgaccttaagccggtgagcgaacccgcaaggggcgcagccgaccacggtcgggtcagcgactggggtgaagtcgtaacaaggtagccgtaggggaacc

SEQ ID NO: 11 - DNA, 1401 bp, Acetobacter orientalis
tgagtttgatcctggctcagagcgaacgctggcggcatgcttaacacatgcaagtcgcacgaaggtttcggccttagtggcggacgggtgagtaacgcgtaggaatctatccatgggtgggggataactctgggaaactggagctaataccgcatgatacctgagggtcaaaggcgcgagtcgcctgtggaggagcctgcgtttgattagcttgttggtggggtaatggcctaccaaggcgatgatcaatagctggtctgagaggatgatcagccacactgggactgagacacggcccagactcctacgggaggcagcagtggggaatattggacaatgggggcaaccctgatccagcaatgccgcgtgtgtgaagaaggttttcggattgtaaagcactttcgacggggacgatgatgacggtacccgtagaagaagccccggctaacttcgtgccagcagccgcggtaatacgaagggggctagcgttgctcggaatgactgggcgtaaagggcgtgtaggcggtttgtacagtcagatgtgaaatccccgggcttaacctgggagctgcatttgatacgtgcagactagagtgtgagagagggttgtggaattcccagtgtagaggtgaaattcgtagatattgggaagaacaccggtggcgaaggcggcaacctggctcataactgacgctgaggcgcgaaagcgtggggagcaaacaggattagataccctggtagtccacgctgtaaacgatgtgtgctagatgttgggtaacttagttattcagtgtcgcagttaacgcgttaagcacaccgcctggggagtacggccgcaaggttgaaactcaaaggaattgacgggggcccgcacaagcggtggagcatgtggtttaattcgaagcaacgcgcagaaccttaccagggcttgtatgggtaggctgtgtccagagatgggcatttcccgcaagggacctaccgcacaggtgctgcatggctgtcgtcagctcgtgtcgtgagatgttgggttaagtcccgcaacgagcgcaacccctatctttagttgccagcatgtttgggtgggcactctagagagactgccggtgacaagccggaggaaggtggggatgacgtcaagtcctcatggcccttatgtcctgggctacacacgtgctacaatggcggtgacagtgggaagctagatggcgacatcgtgctgatctctaaaaaccgtctcagttcggattgtactctgcaactcgagtacatgaaggtggaatcgctagtaatcgcggatcagcatgccgcggtgaatacgttcccgggccttgtacacaccgcccgtcacaccatgggagttggtttgaccttaagccggtgagcgaacccgcaaggggcgca

SEQ ID NO: 12 - DNA, 1479 bp, Acetobacter pasteurianus
gagtttgattctggctcagagcgaacgctggcggcatgcttaacacatgcaagtcgcacgaaggtttcggccttagtggcggacgggtgagtaacgcgtaggtatctatccatgggtgggggataacactgggaaactggtgctaataccgcatgacacctgagggtcaaaggcgcaagtcgcctgtggaggagcctgcgtttgattagctagttggtggggtaaaggcctaccaaggcgatgatcaatagctggtttgagaggatgatcagccacactgggactgagacacggcccagactcctacgggaggcagcagtggggaatattggacaatgggggcaaccctgatccagcaatgccgcgtgtgtgaagaaggtcttcggattgtaaagcactttcgacggggacgatgatgacggtacccgtagaagaagccccggctaacttcgtgccagcagccgcggtaatacgaagggggctagcgttgctcggaatgactgggcgtaaagggcgtgtaggcggtttgtacagtcagatgtgaaatccccgggcttaacctgggagctgcatttgatacgtgcagactagagtgtgagagagggttgtggaattcccagtgtagaggtgaaattcgtagatattgggaagaacaccggtggcgaaggcggcaacctggctcattactgacgctgaggcgcgaaagcgtggggagcaaacaggattagataccctggtagtccacgctgtaaacgatgtgtgctagatgttgggtgacttagtcattcagtgtcgcacttaacgcgttaagcacaccgcctggggagtacggccgcaaggttgaaactcaaaggaattgacgggggcccgcacaaggcgtggagcatgtggtttaattcgaagcaacgcgcagaaccttaccagggcttgaatgtagaggctgcaagcagagatgtttgtttcccgcaagggacctctaacacaggtgctgcatggctgtcgtcagctcgtgtcgtgagatgttgggttaagtcccgcaacgagcgcaacccctatctttagttgccatcaggttgggctgggcactctagagagactgccggtgacaagccggaggaaggtggggatgacgtcaagtcctcatggcccttatgtcctgggctacacacgtgctacaatggcggtgagagtgggaagctaggtggtgacaccatggtgatctctaaaagccgtctcagttcggattgcactctgcaactcgagtgcatgaaggtggaatcgctagtaatcgcggatcagcatgccgcggtgaatacgttcccgggccttgtacacaccgcccgtcacaccatgggagttggtttgaccttaagccggtgagcgaaccgcaaggacgcagcgaccacggtcgggtcagcgactggggtgaagtcgtaacaaggtagccgtaggggaacctgcggctggatcacctccttt

SEQ ID NO: 13 - DNA, 1440 bp, Acetobacter pomorum
agcgaacgctggcggcatgcttaacacatgcaagtcgcacgaaggtttcggccttagtggcggacgggtgagtaacgcgtaggtatctatccatgggtgggggataacactgggaaactggtgctaataccgcatgacacctgagggtcaaaggcgcaagtcgcctgtggaggagcctgcgtttgattagctagttggtggggtaaaggcctaccaaggcgatgatcaatagctggtttgagaggatgatcagccacactgggactgagacacggcccagactcctacgggaggcagcagtggggaatattggacaatgggggcaaccctgatccagcaatgccgcgtgtgtgaagaaggtcttcggattgtaaagcactttcgacggggacgatgatgacggtacccgtagaagaagccccggctaacttcgtgccagcagccgcggtaatacgaagggggctagcgttgctcggaatgactgggcgtaaagggcgtgtaggcggtttgtacagtcagatgtgaaatccccgggcttaacctgggagctgcatttgatacgtgcagactagagtatgagagagggttgtggaattcccagtgtagaggtgaaattcgtagatattgggaagaacaccggtggcgaaggcggcaacctggctcattactgacgctgaggcgcgaaagcgtggggagcaaacaggattagataccctggtagtccacgctgtaaacgatgtgtgctagatgttgggtaacttagttattcagtgtcgcagttaacgcgttaagcacaccgcctggggagtacggccgcaaggttgaaactcaaaggaattgacgggggcccgcacaagcggtggagcatgtggtttaattcgaagcaacgcgcagaaccttaccagggcttgaatgtagaggctgcaagcagagatgtttgtttcccgcaagggacctctaacacaggtgctgcatggctgtcgtcagctcgtgtcgtgagatgttgggttaagtcccgcaacgagcgcaacccctatctttagttgccatcaggttgggctgggcactctagagagactgccggtgacaagccggaggaaggtggggatgacgtcaagtcctcatggcccttatgtcctgggctacacacgtgctacaatggcggtgacagtgggaagctaggtggtgacaccatgctgatctctaaaagccgtctcagttcggattgcactctgcaactcgagtgcatgaaggtggaatcgctagtaatcgcggatcagcatgccgcggtgaatacgttcccgggccttgtacacaccgcccgtcacaccatgggagttggtttgaccttaagccggtgagcgaaccgcaaggacgcagccgaccacggtcgggtcagcgactggggtgaagtcgtaacaaggtagccgtaggggaacc

SEQ ID NO: 14 - DNA, 1412 bp, Acetobacter syzygii
agcgaacgctggcggcatgcttaacacatgcaagtcgcacgaacctttcggggttagtggcggacgggtgagtaacgcgtaggaatctgtccatgggtgggggataactctgggaaactggagctaataccgcatgatacctgagggtcaaaggcgcaagtcgcctgtggaggagcctgcgttcgattagctagttggtggggtaaaggcctaccaaggcgatgatcgatagctggtttgagaggatgatcagccacactgggactgagacacggcccagactcctacgggaggcagcagtggggaatattggacaatgggggcaaccctgatccagcaatgccgcgtgtgtgaagaaggtcttcggattgtaaagcactttcgacggggacgatgatgacggtacccgtagaagaagccccggctaacttcgtgccagcagccgcggtaatacgaagggggctagcgttgctcggaatgactgggcgtaaagggcgtgtaggcggtttgtacagtcagatgtgaaatccccgggcttaacctgggagctgcatttgatacgtacagactagagtgtgagagagggttgtggaattcccagtgtagaggtgaaattcgtagatattgggaagaacaccggtggcgaaggcggcaacctggctcattactgacgctgaggcgcgaaagcgtggggagcaaacaggattagataccctggtagtccacgctgtaaacgatgtgtgctagatgttgggtgactttgtcattcagtgtcgcagttaacgcgttaagcacaccgcctggggagtacggccgcaaggttgaaactcaaaggaattgacgggggcccgcacaagcggtggagcatgtggtttaattcgaagcaacgcgcagaaccttaccagggcttgaatgtagaggctgtattcagagatggatatttcccgcaagggacctctaacacaggtgctgcatggctgtcgtcagctcgtgtcgtgagatgttgggttaagtcccgcaacgagcgcaacccctatctttagttgccagcatgtttgggtgggcactctagagagactgccggtgacaagccggaggaaggtggggatgacgtcaagtcctcatggcccttatgtcctgggctacacacgtgctacaatggcggtgacagtgggaagctagatggtgacatcgtgctgatctctaaaagccgtctcagttcggattgcactctgcaactcgagtgcatgaaggtggaatcgctagtaatcgcggatcagcatgccgcggtgaatacgttcccgggccttgtacacaccgcccgtcacaccatgggagttggtttgaccttaagccggtgagcgaacccgcaaggggcgcagccgaccacggtcgggtcagcgactggggtg

SEQ ID NO: 15 - DNA, 1443 bp, Acetobacter tropicalis
  modified_base (9)..(9): a, c, t, g, unknown or other
tgagttganctggctcagagcgaacgctggcggcatgcttaacacatgcaagtcgcacgaaggtttcggccttagtggcggacgggtgagtaacgcgtaggaatctatccatgggtgggggataactctgggaaactggagctaataccgcatgatacctgagggtcaaaggcgcaagtcgcctgtggaggagcctgcgttcgattagcttgttggtggggtaatggcctaccaaggcgatgatcgatagctggtctgagaggatgatcagccacactgggactgagacacggcccagactcctacgggaggcagcagtggggaatattggacaatgggggcaaccctgatccagcaatgccgcgtgtgtgaagaaggttttcggattgtaaagcactttcggcggggacgatgatgacggtacccgcagaagaagccccggctaacttcgtgccagcagccgcggtaatacgaagggggctagcgttgctcggaatgactgggcgtaaagggcgtgtaggcggtttgtacagtcagatgtgaaatccccgggcttaacctgggagctgcatttgatacgtgcagactagagtgtgagagagggttgtggaattcccagtgtagaggtgaaattcgtagatattgggaagaacaccggtggcgaaggcggcaacctggctcatgactgacgctgaggcgcgaaagcgtggggagcaaacaggattagataccctggtagtccacgctgtaaacgatgtgtgctggatgttgggcaacttagttgttcagtgtcgtagctaacgcgataagcacaccgcctggggagtacggccgcaaggttgaaactcaaaggaattgacgggggcccgcacaagcggtggagcatgtggtttaattcgaagcaacgcgcagaaccttaccagggcttgtatgtgtaggctgtgtccagagatgggcatttcccgcaagggacctacagcacaggtgctgcatggctgtcgtcagctcgtgtcgtgagatgttgggttaagtcccgcaacgagcgcaacccctatctttagttgccagcatgtttgggtgggcactctagagagactgccggtgacaagccggaggaaggtggggatgacgtcaagtcctcatggcccttatgtcctgggctacacacgtgctacaatggcggtgacagtgggaagctagatggcgacatcgtgctgatctctaaaagccgtctcagttcggattgcactctgcaactcgagtgcatgaaggtggaatcgctagtaatcgcggatcaagcatgccgcggtgaatacgttcccgggccttgtacacaccgcccgtcacaccatgggagttggtttgaccttaagccggtgagcgaacccagctaatggggcgcagccgaccacggtcgggtcagcgactggggtgaagtcgtac

SEQ ID NO: 16 - DNA, 1475 bp, Acetobacteraceae bacterium AT-5844
agagtttgatcctggctcagagtgaacgctggcggcatgcttaacacatgcaagtcgtgcgccccgcaaggggagcggcggacgggtgagtaacacgtaggaatgtgtccggaggtgggggataaccctgggaaactagggctaataccgcatatgggctgaggcccaaagccgtgaggcgccatcggagtagcctgcgcctgattagctagttggtggggtaaaggcctaccaaggcgacgatcagtagctggtctgagaggacgatcagccacactgggactgagacacggcccagactcctacgggaggcagcagtggggaatattggacaatgggcgcaagcctgatccagcaatgccgcgtgtgtgaagaaggtcttcggatcgtaaagcactttcggcggggacgatgatgacggtacccgcagaagaagccccggctaacttcgtgccagcagccgcggtaatacgaagggggctagcgttactcggaattactgggcgtaaagggcgcgtaggcggcgttccaagttaggcgtgaaagtcctgggctcaacctgggaactgcgcttaagactggagtgcttgaggatggaagagggttgtggaattcccagtgtagaggtgaaattcgtagatattgggaagaacaccggtggcgaaggcggcaacctggtccattactgacgctgaggcgcgatagcgtggggagcaaacaggattagataccctggtagtccacgccgtaaacgatgtgcgctggatgttgggggtcctagaccttcagtgtcgtagctaacgcgataagcgcaccgcctggggagtacggccgcaaggttgaaactcaaaggaattgacgggggcccgcacaagcggtggagcatgtggtttaattcgaagcaacgcgcagaaccttaccagctcttgacatgggtaggaccggtgcagagatgcacttttcccgcaagggacctaccgcacaggtgctgcatggctgtcgtcagctcgtgtcgtgagatgttgggttaagtcccgcaacgagcgcaaccctcgcctttagttgccagcatgtttgggtgggcactctaaaggaactgccggtgacaagccggaggaaggtggggatgacgtcaagtcctcatggcccttatgggctgggctacacacgtgctacaatggcggtgacaacgggatgccaggcagcgatgccgagccgatcccaaaaagccgtctcagttcagattgcagcctgcaactcggctgcatgaaggtggaatcgctagtaatcgcggatcagcacgccgcggtgaatacgttcccgggccttgtacacaccgcccgtcacaccatgggagttggttttaccttaagtcggtgcggtaaccgcaaggagctagccgaccacggtaggatcagtgactggggtgaagtcgtaacaaggtagccgtaggggaacctgcggctggatcacct

SEQ ID NO: 17 - DNA, 1506 bp, Acholeplasma laidlawii
tatatggagagtttgatcctggctcaggatgaacgctggcggcgtgcctaatacatgcaagtcgaacgaagcatcttcggatgcttagtggcgaacgggtgagtaacacgtagataacctacctttaactcgaggataactccgggaaactggagctaatactggataggatgtgtgcatgaaaaaaacacatttaaagatttatcggtttaagaggggtctgcggcgcattagttagttggtggggtaaaagcctaccaagacgatgatgcgtagccggactgagaggtctaccggccacattgggactgagaacggcccaaactcctacgggaggcagcagtagggaattttcggcaatgggggaaaccctgaccgagcaacgccgcgtgaacgacgaagtacttcggtatgtaaagttcttttatatgggaagaaaaattaaaaattgacggtaccatatgaataagccccggctaactatgtgccagcagccgcggtaatacatagggggcgagcgttatccggatttactgggcgtaaagggtgcgtaggtggttataaaagtttgtggtgtaagtgcagtgcttaacgctgtgaggctatgaaaactatataactagagtgagacagaggcaagtggaattccatgtgtagcggtaaaatgcgtaaatatatggaggaacaccagtggcgaaggcggcttgctgggtctatactgacactgatgcacgaaagcgtggggagcaaacaggattagataccctggtagtccacgccgtaaacgatgagaactaagtgttggccaaaaggtcagtgctgcagttaacgcattaagttctccgcctgagtagtacgtacgcaagtatgaaactcaaaggaattgacgggaccccgcacaagcggtggatcatgttgtttaattcgaagatacacgaaaaaccttaccaggtcttgacatactctgcaaaggcttagaaataagttcggaggctaacagatgtacaggtggtgcacggttgtcgtcagctcgtgtcgtgagatgttgggttaagtcccgcaacgagcgcaacccttattgctagttaccatcattaagttggggactctagcgagactgccagtgataaattggaggaaggtggggatgacgtcaaatcatcatgccccttatgacctgggctacaaacgtgatacaatggctggaacaaagagaagcgatagggtgacctggagcgaaactcacaaaaacagtctcagttcggattggagtctgcaactcgactccatgaagtcggaatcgctagtaatcgcaaatcagcatgttgcggtgaatacgttctcggggtttgtacacaccgcccgtcaaaccacgaaagtgggcaatacccaacgccggtggcctaacccgaaagggagggagccgtctaaggtagggtccatgattggggttaagtcgtaacaaggtatccctacgggaacgtggggatggatcacctcctttct

SEQ ID NO: 18 - DNA, 1523 bp, Achromobacter denitrificans
  modified_base (847)..(847): a, c, t, g, unknown or other
  modified_base (1509)..(1509): a, c, t, g, unknown or other
agagtttgatcatggctcagattgaacgctagcgggatgccttacacatgcaagtcgaacggcagcacggacttcggtctggtggcgagtggcgaacgggtgagtaatgtatcggaacgtgcccagtagcgggggataactacgcgaaggcgtagctaataccgcatacgccctacgggggaaagcaggggatcgcaagaccttgcactattggagcggccgatatcggattagctagttggtggggtaacggctcaccaaggcgacgatccgtagctggtttgagaggacgaccagccacactgggactgagacacggcccagactcctacgggaggcagcagtggggaattttggacaatgggggaaaccctgatccagccatcccgcgtgtgcgatgaaggccttcgggttgtaaagcacttttggcaggaaagaaacgtcgcgggttaataccccggggaactgacggtacctgcagaataagcaccggctaactacgtgccagcagccgcggtaatacgtagggtgcaagcgttaatcggaattactgggcgtaaagcgtgcgcaggcggttcggaaagaaagatgtgaaatcccagagcttaactttggaactgcatttttaactaccgggctagagtgtgtcagagggaggtggaattccgcgtgtagcagtgaaatgcgtagatatgcggaggaacaccgatggcgaaggcagcctcctgggataacactgacgctcatgcacgaaagcgtggggagcaaacaggattagataccctggtagtccacgccctaaacgatgtcaactagctgttggggccttcgggccttggtagcgcanctaacgcgtgaagttgaccgcctggggagtacggtcgcaagattaaaactcaaaggaattgacggggacccgcacaagcggtggatgatgtggattaattcgatgcaacgcgaaaaaccttacctacccttgacatgtctggaatcctgaagagatttaggagtgctcgcaagagaaccggaacacaggtgctgcatggctgtcgtcagctcgtgtcgtgagatgttgggttaagtcccgcaacgagcgcaacccttgtcattagttgctacgaaagggcactctaatgagactgccggtgacaaaccggaggaaggtggggatgacgtcaagtcctcatggcccttatgggtagggcttcacacgtcatacaatggtcgggacagagggtcgccaacccgcgagggggagccaatcccagaaacccgatcgtagtccggatcgcagtctgcaactcgactgcgtgaagtcggaatcgctagtaatcgcggatcagcatgtcgcggtgaatacgttcccgggtcttgtacacaccgcccgtcacaccatgggagtgggttttaccagaagtagttagcctaaccgcaaggagggcgattaccacggtaggattcatgactggggtgaagtcgtaacaaggtagccgtatcggaaggtgcggntggatcacctcctt

SEQ ID NO: 19 - DNA, 1534 bp, Achromobacter piechaudii
ttaaactgaagagtttgatcctggctcagattgaacgctagcgggatgccttacacatgcaagtcgaacggcagcacggacttcggtctggtggcgagtggcgaacgggtgagtaatgtatcggaacgtgcctagtagcgggggataactacgcgaaagcgtagctaataccgcatacgccctacgggggaaagcaggggatcgtaagaccttgcactattagagcggccgatatcggattagctagttggtggggtaatggctcaccaaggcgacgatccgtagctggtttgagaggacgaccagccacactgggactgagacacggcccagactcctacgggaggcagcagtggggaattttggacaatgggggaaaccctgatccagccatcccgcgtgtgcgatgaaggccttcgggttgtaaagcacttttggcaggaaagaaacgtcatgggctaataccccgtgaaactgacggtacctgcagaataagcaccggctaactacgtgccagcagccgcggtaatacgtagggtgcaagcgttaatcggaattactgggcgtaaagcgtgcgcaggcggttcggaaagaaagatgtgaaatcccagagcttaactttggaactgcatttttaactaccgagctagagtgtgtcagagggaggtggaattccgcgtgtagcagtgaaatgcgtagatatgcggaggaacaccgatggcgaaggcagcctcctgggataacactgacgctcatgcacgaaagcgtggggagcaaacaggattagataccctggtagtccacgccctaaacgatgtcaactagctgttggggccttcgggccttggtagcgcagctaacgcgtgaagttgaccgcctggggagtacggtcgcaagattaaaactcaaaggaattgacggggacccgcacaagcggtggatgatgtggattaattcgatgcaacgcgaaaaaccttacctacccttgacatgtctggaattccgaagagatttggaagtgctcgcaagagaactggaacacaggtgctgcatggctgtcgtcagctcgtgtcgtgagatgttgggttaagtcccgcaacgagcgcaacccttgtcattagttgctacgaaagggcactctaatgagactgccggtgacaaaccggaggaaggtggggatgacgtcaagtcctcatggcccttatgggtagggcttcacacgtcatacaatggtcgggacagagggtcgccaacccgcgagggggagccaatcccagaaacccgatcgtagtccggatcgcagtctgcaactcgactgcgtgaagtcggaatcgctagtaatcgcggatcagcatgtcgcggtgaatacgttcccgggtcttgtacacaccgcccgtcacaccatgggagtgggttttaccagaagtagttagcctaaccgcaaggggggcgattaccacggtaggattcatgactggggtgaagtcgtaacaaggtagccgtatcggaaggtgcggctggatcacctcctttc

SEQ ID NO: 20 - DNA, 1534 bp, Achromobacter xylosoxidans
ttaaactgaagagtttgatcctggctcagattgaacgctagcgggatgccttacacatgcaagtcgaacggcagcacggacttcggtctggtggcgagtggcgaacgggtgagtaatgtatcggaacgtgcccagtagcgggggataactacgcgaaagcgtagctaataccgcatacgccctacgggggaaagcaggggatcgcaagaccttgcactattggagcggccgatatcggattagctagttggtggggtaacggctcaccaaggcgacgatccgtagctggtttgagaggacgaccagccacactgggactgagacacggcccagactcctacgggaggcagcagtggggaattttggacaatgggggaaaccctgatccagccatcccgcgtgtgcgatgaaggccttcgggttgtaaagcacttttggcaggaaagaaacgtcgcgggttaatacctcgcgaaactgacggtacctgcagaataagcaccggctaactacgtgccagcagccgcggtaatacgtagggtgcaagcgttaatcggaattactgggcgtaaagcgtgcgcaggcggttcggaaagaaagatgtgaaatcccagagcttaactttggaactgcatttttaactaccgggctagagtgtgtcagagggaggtggaattccgcgtgtagcagtgaaatgcgtagatatgcggaggaacaccgatggcgaaggcagcctcctgggataacactgacgctcatgcacgaaagcgtggggagcaaacaggattagataccctggtagtccacgccctaaacgatgtcaactagctgttggggccttcgggccttggtagcgcagctaacgcgtgaagttgaccgcctggggagtacggtcgcaagattaaaactcaaaggaattgacggggacccgcacaagcggtggatgatgtggattaattcgatgcaacgcgaaaaaccttacctacccttgacatgtctggaatgccgaagagatttggcagtgctcgcaagagagccggaacacaggtgctgcatggctgtcgtcagctcgtgtcgtgagatgttgggttaagtcccgcaacgagcgcaacccttgtcattagttgctacgaaagggcactctaatgagactgccggtgacaaaccggaggaaggtggggatgacgtcaagtcctcatggcccttatgggtagggcttcacacgtcatacaatggtcgggacagagggtcgccaacccgcgagggggagccaatcccagaaacccgatcgtagtccggatcgcagtctgcaactcgactgcgtgaagtcggaatcgctagtaatcgcggatcagcatgtcgcggtgaatacgttcccgggtcttgtacacaccgcccgtcacaccatgggagtgggttttaccagaagtagttagcctaaccgcaaggggggcgattaccacggtaggattcatgactggggtgaagtcgtaacaaggtagccgtatcggaaggtgcggctggatcacctcctttc

SEQ ID NO: 21 - DNA, 1545 bp, Acidaminococcus fermentans
agagtttgatcctggctcaggacgaacgctggcggcgtgcttaacacatgcaagtcgaacggagaactttcttcggaatgttcttagtggcgaacgggtgagtaacgcgtaggcaacctgccctctggttggggacaacattccgaaagggatgctaataccgaatgagatcctctttccgcatggagagaggatgaaagatggcctctacttgtaagctatcgccagaagatgggcctgcgtctgattagcttgtaggtgaggtaacggctcacctaggcgatgatcagtagccggtctgagaggatgaacggccacattgggactgagacacggcccaaactcctacgggaggcagcagtggggaatcttccgcaatggacgaaagtctgacggagcaacgccgcgtgagtgatgaaggccttcgggttgtaaaactctgttgtcagggacgaaagcaccgatctataatacattttggtgttgacggtacctgacgaggaagccacggctaactacgtgccagcagccgcggtaatacgtaggtggcaagcgttgtccggaattattgggcgtaaagagcatgtaggcgggcttttaagtccgacgtgaaaatgcggggcttaaccccgtatggcgttggatactggaagtcttgagtgcaggagaggaaaggggaattcccagtgtagcggtgaaatgcgtagatattgggaggaacaccagtggcgaaggcgcctttctggactgtgtctgacgctgagatgcgaaagccagggtagcaaacgggattagataccccggtagtcctggccgtaaacgatgggtactaggtgtaggaggtatcgaccccttctgtgccggagttaacgcaataagtaccccgcctggggactacgatcgcaagattgaaactcaaaggaattgacgggggcccgcacaagcggtggagtatgtggtttaattcgacgcaacgcgaagaaccttaccaaggcttgacattgagtgaaagacccagagatgggtccccttcttcggaagcacgaaaacaggtggtgcatggctgtcgtcagctcgtgtcgtgagatgttgggttaagtcccgcaacgagcgcaacccttatcctatgttaccagcacgtaatggtggggactcataggagactgccagggataacctggaggaaggcggggatgacgtcaagtcatcatgccccttatgtcttgggctacacacgtactacaatggtcggcaacaaagggcagcgaagccgcgaggcggagccaatcccagaaacccgaccccagttcggatcgcaggctgcaacccgcctgcgtgaagttggaatcgctagtaatcgcaggtcagcatactgcggtgaatacgttcccgggccttgtacacaccgcccgtcacaccacgaaagttggtaacacccgaagccggtgagataaccttttaggagtcagctgtctaaggtggggccgatgattggggtgaagtcgtaacaaggtagccgttcgagaacgagcggctggatcacct

SEQ ID NO: 22 - DNA, 1489 bp, Acidaminococcus intestini
ctggcggcgtgcttaacacatgcaagtcgaacggagaacttatttcggtaagttcttagtggcgaacgggtgagtaacgcgtgggcaacctgccctccagttggggacaacattccgaaagggatgctaataccgaatgtcctccctcctccgcatggaggagggaggaaagatggcctctgcttgcaagctatcgctggaagatgggcccgcgtctgattagctagttggtggggtaacggctcaccaaggcgatgatcagtagccggtctgagaggatgaacggccacattgggactgagacacggcccaaactcctacgggaggcagcagtggggaatcttccgcaatggacgaaagtctgacggagcaacgccgcgtgagtgatgaaggtcttcggattgtaaaactctgttgttagggacgaaagcaccgtgttcgaacaggtcatggtgttgacggtacctaacgaggaagccacggctaactacgtgccagcagccgcggtaatacgtaggtggcaagcgttgtccggaattattgggcgtaaagagcatgtaggcgggcttttaagtctgacgtgaaaatgcggggcttaaccccgtatggcgttggatactggaagtcttgagtgcaggagaggaaaggggaattcccagtgtagcggtgaaatgcgtagatattgggaggaacaccagtggcgaaggcgcctttctggactgtgtctgacgctgagatgcgaaagccagggtagcaaacgggattagataccccggtagtcctggccgtaaacgatggatactaggtgtaggaggtatcgaccccttctgtgccggagttaacgcaataagtatcccgcctggggactacgatcgcaagattgaaactcaaaggaattgacgggggcccgcacaagcggtggagtatgtggtttaattcgacgcaacgcgaagaaccttaccaaggcttgacattgagtgaaagacctagagataggtccctcccttcggggacacgaaaacaggtggtgcatggctgtcgtcagctcgtgtcgtgagatgttgggttaagtcccgcaacgagcgcaacccctatcctatgttaccagcgcgtaaaggcggggactcataggagactgccagggataacttggaggaaggcggggatgacgtcaagtcatcatgccccttatgtcttgggctacacacgtactacaatggtcggcaacaaagggcagcgaaaccgcgaggtggagcaaatcccagaaacccgaccccagttcggatcgtaggctgcaacccgcctacgtgaagttggaatcgctagtaatcgcaggtcagcatactgcggtgaatacgttcccgggccttgtacacaccgcccgtcacaccacgaaagttggtaacacccgaagccggtgagataaccttttaggagtcagctgtctaaggtggggccgatgattggggtgaagtcgtaacaaggtagc

SEQ ID NO: 23 - DNA, 1556 bp, Acidaminococcus sp.
  D21
ttggagagtttgatcctggctcaggacgaacgctggcggcgtgcttaacacatgcaagtcgaacggagaacttatttcggtaagttcttagtggcgaacgggtgagtaacgcgtgggcaacctgccctccagttggggacaacattccgaaagggatgctaataccgaatgtcctccctcctccgcatggaggagggaggaaagatggcctctgcttgcaagctatcgctggaagatgggcccgcgtctgattagctagttggtggggtaacggctcaccaaggcgatgatcagtagccggtctgagaggatgaacggccacattgggactgagacacggcccaaactcctacgggaggcagcagtggggaatcttccgcaatggacgaaagtctgacggagcaacgccgcgtgagtgatgaaggtcttcggattgtaaaactctgttgttagggacgaaagcaccgtgttcgaacaggtcatggtgttgacggtacctaacgaggaagccacggctaactacgtgccagcagccgcggtaatacgtaggtggcaagcgttgtccggaattattgggcgtaaagagcatgtaggcgggcttttaagtctgacgtgaaaatgcggggcttaaccccgtatggcgttggatactggaagtcttgagtgcaggagaggaaaggggaattcccagtgtagcggtgaaatgcgtagatattgggaggaacaccagtggcgaaggcgcctttctggactgtgtctgacgctgagatgcgaaagccagggtagcaaacgggattagataccccggtagtcctggccgtaaacgatggatactaggtgtaggaggtatcgaccccttctgtgccggagttaacgcaataagtatcccgcctggggactacgatcgcaagattgaaactcaaaggaattgacgggggcccgcacaagcggtggagtatgtggtttaattcgacgcaacgcgaagaaccttaccaaggcttgacattgagtgaaagacctagagataggtccctcccttcggggacacgaaaacaggtggtgcatggctgtcgtcagctcgtgtcgtgagatgttgggttaagtcccgcaacgagcgcaacccctatcctatgttaccagcgcgtaaaggcggggactcataggagactgccagggataacttggaggaaggcggggatgacgtcaagtcatcatgccccttatgtcttgggctacacacgtactacaatggtcggcaacaaagggcagcgaaaccgcgaggtggagcaaatcccagaaacccgaccccagttcggatcgtaggctgcaacccgcctacgtgaagttggaatcgctagtaatcgcaggtcagcatactgcggtgaatacgttcccgggccttgtacacaccgcccgtcacaccacgaaagttggtaacacccgaagccggtgagataaccttttaggagtcagctgtctaaggtggggccgatgattggggtgaagtcgtaacaaggtagccgttcgagaacgagcggctggatcacctcctttct

SEQ ID NO: 24 - DNA, 1451 bp, Acidilobus saccharovorans
tccggttgatcctgccggacccgactgctatcggggtgaggctaagccatgggagtcgcgcgcccagccgccgctgggcgggcgcacggctgagtaacacgtagctaacctaccctcgggacggggataaccccgggaaactggggctaatccccgataggcgagggggcctggaatggtccctcgccgaaagggaccctggggggttatcgcctggggtccgcccgaggatggggctgcggcccatcatggtagttggcggggtaatggcccgccaagccgacgacgggtaggggccgtgggagcgggagcccccagatgggccctgagacaagggcccaggccctacggggcgcaccaggcgcgaaacctccgcaatgcgggaaaccgtgacggggtcaccccgagtgctcccgtaagggagcttttccccgctgcaaggaggcgggggaataagcggggggcaagtctggtgtcagccgccgcggtaataccagccccgcgagtggtcgggacgtctactgggcctaaagcgcccgtagccggccccgtaagtccctcctgaaagccctgggctcaacccagggagtgggggggatactgcggggctagggggcgggagaggccgggggtaccccaggggtaggggcgaaatccgataatccctgggggaccaccagtggcgaaagcgcccggctggaacgcgcccgacggtgaggggcgaaagccgggggagcgaaccggattagatacccgggtagtcccggctgtaaacgatgcgggctaggtgtcgggcgggcgttagagcccgcccggtgccgcagggaagccgttaagcccgccgcctggggagtacggccgcaaggctgaaactttaaggaattggcgggggggcacacaaggggtggagcctgcggctcaattggagtcaacgccgggaacctcaccgggggcgacagcaggatgacggccaggctaacgaccttgcccgacgcgctgaggggaggtgcatggccgtcgccagctcgtgctgtgaagtgtcctgttaagtcaggcaacgagcgagacccccgcccctagttgcgacccggcgggagaccgttggggcacactagggggactgccgccgctaaggcggaggaaggagggggccacggcaggtcagcatgcccctaaaccccgggttgcacgcgggctacaatggcgggracagcgggatccgaccccgaaagggggaggcaatccctcaaaccccgccgtagtcgggattgggggctgtaactcgcccccatgaacctggaatccctagtaaccgcgcgtcaacatcgcgcggtgaatacgtccctgccccttgtacacactgcccgtcgctccacctgagagaaggaggggtgaggcttcctccttcgggagggagtcgaacccctccttctcgaggggggagaagtcgt

SEQ ID NO: 25 - DNA, 1524 bp, Acidithiobacillus ferrivorans
agagtttgatcctggctcagattgaacgctggcggcatgcctaacacatgcaagtcgaacggtagcaggccttcgggtgctgacgagtggcggacgggtgagtaatgcgtaggaatctgtcttttagtgggggacaacccagggaaacttgggctaataccgcatgagccctgagggggaaagcgggggatcttcggacctcgcgctaagagaagagcctacgtctgattagctagttggtagggtaaaggcctaccaaggcgacgatcagtagctggtctgagaggacgaccagccacactgggactgagacacggcccagactcctacgggaggcagcagtggggaatttttcgcaatgggggcaaccctgacgaagcaatgccgcgtggatgaagaaggccttcgggttgtaaagtcctttcgtgggggacgaaaaggtggttcctaatacgagctgctgttgacgtgaacccaagaagaagcaccggctaactccgtgccagcagccgcggtaatacggggggtgcaagcgttaatcggaatcactgggcgtaaagggtgcgtaggcggtacgttaggtctgtcgtgaaatccccgggctcaacctgggaatggcggtagaaaccggcgaactagagtatgggagagggtggtggaattccaggtgtagcggtgaaatgcgtagagatctggaggaacatcagtggcgaaggcggccacctggcccaatactgacgctgaggcacgaaagcgtggggagcaaacaggattagataccctggtagtccacgccctaaacgatgaatactagatgtttggtacctagcgtactgagtgtcgtagctaacgcgataagtattccgcctgggaagtacggccgcaaggttaaaactcaaaggaattgacgggggcccgcacaagcggtggagcatgtggtttaattcgatgcaacgcgaagaaccttacctgggcttgacatgtccggaatcctgcagagatgcgggagtgcccttcggggaatcggaacacaggtgctgcatggctgtcgtcagctcgtgtcgtgagatgttgggttaagtcccgcaacgagcgcaacccttgtccttagttgccagcggttcggccgggcactctagggagactgccggtgacaaaccggaggaaggtggggatgacgtcaagtcctcatggcctttatgtccagggctacacacgtgctacaatggcgcgtacagagggacgccaaaccgcgaggtggagcagaccccagaaagcgcgtcgtagttcggattgcagtctgcaactcgactgcatgaagtcggaatcgctagtaatcgcggatcagcatgccgcggtgaatacgttcccgggccttgtacacaccgcccgtcacaccatgggagtagattgtaccagaagcggctagcctaaccttcgggagggcggttaccacggtatggtttatgactggggtgaagtcgtaacaaggtagccgtaggggaacctgcggctggatcacct

SEQ ID NO: 26 - DNA, 1332 bp, Acidovorax sp.
  98-63833
tgagtttgatcctggctcagattgaacgctggcggcatgccttacacatgcaagtcgaacgagtggcgaacgggtgagtaatacatcggaacgtgcctagtagtgggggataactactcgaaagagtggctaataccgcatgaggaaaggtgctactagagcggccgatggcagattaggtagttggtgggataaaagcttaccaagccaacgatctgtagctggtctgagaggacgatcagccacactgggactgagacacggcccagactcctacgggaggcagcagtggggaattttggacaatgggcgaaagcctgatccagcaatgccgcgtgcaggatgaaggccttcgggttgtaaactgcttttgtacggaacgatgacggtaccgtaagaataagcaccggctaactacgtgccagcagccgcggtaatacgtagggtgcaagcgttaatcggaattactgggcgtaaagcgtgcgcaggcggttttgtaagacagaggtgaaatccccgggctcaacctgggaactgcctttgtgactgcaaggctagagtacggcagagggggatggaattccgcgtgtagcagtgaaatgcgtagatatgcggaggaacaccgatggcgaaggcaatcccctgggcctactgacgctcatgcacgaaagcgtggggagcaaacaggattagataccctggtagtccacgccctaaacgatgtcaactggttgttgggtactcagtaacgaagctaacgcgtgaagttgaccgcctggggagtacggccgcaaggttgaaactcaaaggaattgacggggacccgcacaagcggtggatgatgtggtttaattcgatgcaacgcgaaaaaccttacccacctttgacatgcacaggtgctgcatggctgtcgtcagctcgtgtcgtgagatgttgggttaagtcccgcaacgagcgcaacccttgccattagttgctacggcactctaatgggactgccggtgacaaaccggaggaaggtggggatgacgtcaagtcctcatggcccttataggtggggctacacacgtcatacaatggctggcaaagggttgccaacccgcgagggggagctaatcccatccagtcgtagtccggacgcagtctgcaactcgactgcggaagtcggaatcgctagtaatcgtggatcagcatgtcacggtgaatacgttcccgggtcttgtacacaccgcccgtcacaccatgggagcgggtctcgccagaagtaggtgcctagggcgcttaccacggcggggttcgtgactggggtgaagtcgtaacaaggtagccgta

SEQ ID NO: 27 - DNA, 1539 bp, Acinetobacter baumannii
tttaactgaagagtttgatcatggctcagattgaacgctggcggcaggcttaacacatgcaagtcgagcgggggaaggtagcttgctaccggacctagcggcggacgggtgagtaatgcttaggaatctgcctattagtgggggacaacatctcgaaagggatgctaataccgcatacgtcctacgggagaaagcaggggatcttcggaccttgcgctaatagatgagcctaagtcggattagctagttggtggggtaaaggcctaccaaggcgacgatctgtagcgggtctgagaggatgatccgccacactgggactgagacacggcccagactcctacgggaggcagcagtggggaatattggacaatggggggaaccctgatccagccatgccgcgtgtgtgaagaaggccttatggttgtaaagcactttaagcgaggaggaggctactttagttaatacctagagatagtggacgttactcgcagaataagcaccggctaactctgtgccagcagccgcggtaatacagagggtgcgagcgttaatcggatttactgggcgtaaagcgtgcgtaggcggcttattaagtcggatgtgaaatccccgagcttaacttgggaattgcattcgatactggtgagctagagtatgggagaggatggtagaattccaggtgtagcggtgaaatgcgtagagatctggaggaataccgatggcgaaggcagccatctggcctaatactgacgctgaggtacgaaagcatggggagcaaacaggattagataccctggtagtccatgccgtaaacgatgtctactagccgttggggcctttgaggctttagtggcgcagctaacgcgataagtagaccgcctggggagtacggtcgcaagactaaaactcaaatgaattgacgggggcccgcacaagcggtggagcatgtggtttaattcgatgcaacgcgaagaaccttacctggccttgacatactagaaactttccagagatggattggtgccttcgggaatctagatacaggtgctgcatggctgtcgtcagctcgtgtcgtgagatgttgggttaagtcccgcaacgagcgcaacccttttccttacttgccagcatttcggatgggaactttaaggatactgccagtgacaaactggaggaaggcggggacgacgtcaagtcatcatggcccttacggccagggctacacacgtgctacaatggtcggtacaaagggttgctacacagcgatgtgatgctaatctcaaaaagccgatcgtagtccggattggagtctgcaactcgactccatgaagtcggaatcgctagtaatcgcggatcagaatgccgcggtgaatacgttcccgggccttgtacacaccgcccgtcacaccatgggagtttgttgcaccagaagtagctagcctaactgcaaagagggcggttaccacggtgtggccgatgactggggtgaagtcgtaacaaggtagccgtaggggaacctgcggctggatcacctcctta

SEQ ID NO: 28 - DNA, 1607 bp, Acinetobacter calcoaceticus
cactactcacgcgttgggagctctcccatatggtcgacctgcaggcggccgcgaattcactagtgattagagtttgattatggctcagattgaacgctggcggcaggcttaacacatgcaagtcgagcggagtgatggtgcttgcactatcacttagcggcggacgggtgagtaatgcttaggaatctgcctattagtgggggacaacatttcgaaaggaatgctaataccgcatacgtcctacgggagaaagcaggggatcttcggaccttgcgctaatagatgagcctaagtcggattagctagttggtggggtaaaggcctaccaaggcgacgatctgtagcgggtctgagaggatgatccgccacactgggactgagacacggcccagactcctacgggaggcagcagtggggaatattggacaatgggcgcaagcctgatccagccatgccgcgtgtgtgaagaaggccttatggttgtaaagcactttaagcgaggaggaggctactgaagttaataccttcagatagtggacgttactcgcagaataagcaccggctaactctgtgccagcagccgcggtaatacagagggtgcaagcgttaatcggatttactgggcgtaaagcgcgcgtaggcggctaattaagtcaaatgtgaaatccccgagcttaacttgggaattgcattcgatactggttagctagagtgtgggagaggatggtagaattccaggtgtagcggtgaaatgcgtagagatctggaggaataccgatggcgaaggcagccatctggcctaacactgacgctgaggtgcgaaagcatggggagcaaacaggattagataccctggtagtccatgccgtaaacgatgtctactagccgttggggcctttgaggctttagtggcgcagctaacgcgataagtagaccgcctggggagtacggtcgcaagactaaaactcaaatgaattgacgggggcccgcacaagcggtggagcatgtggtttaattcgatgcaacgcgaagaaccttacctggccttgacatagtaagaactttccagagatggattggtgccttcgggaacttacatacaggtgctgcatggctgtcgtcagctcgtgtcgtgagatgttgggttaagtcccgcaacgagcgcaacccttttccttatttgccagcgagtaatgtcgggaactttaaggatactgccagtgacaaactggaggaaggcggggacgacgtcaagtcatcatggcccttacggccagggctacacacgtgctacaatggtcggtacaaagggttgctacctagcgataggatgctaatctcaaaaagccgatcgtagtccggattggagtctgcaactcgactccatgaagtcggaatcgctagtaatcgcggatcagaatgccgcggtgaatacgttcacgggccttgtacacaccgcccgtcacaccatgggagtttgttgcaccagaagtaggtagtctaaccgcaagggggacgcttaccacggtgtggccgatgactggggtgaagtcgtaacaaggtaaccgtaaatcgaattcccgcggccgccatggcggccggagctg

SEQ ID NO: 29 - DNA, 1296 bp, Acinetobacter sp.
  C1
attgaacgctggcggcaggcttaacacatgcaagtcgagcgagcggcggacgggtgagtaatgcttaggaatctgcctattagtgggggacaacattccgaaaggaatgctaataccgcatacggaaaggcgctaatagatgagcctaagtcggattagctagttggtggggtaaaggcctaccaaggcgacgatctgtagcgggtctgagaggatgatccgccacactgggactgagacacggcccagactcctacgggaggcagcagtggggaatattggacaatgggcggaagcctgatccagtcatgccgcgtgtgtgaggaaggccttttggttgtaaagcactttaagcgaggaggaggacgttactcgcagaataagcaccggctaactctgtgccagcagccgcggtaatacagagggtgcgagcgttaatcggatttactgggcgtaaagcgtgcgtaggcggctgattaagtcggatgtgaaatccctgagcttaacttaggaattgcattcgatactggtcagctagagtatgggagaggatggtagaattccaggtgtagcggtgaaatgcgtagagatctggaggaataccgatggcgaaggcagccatctggcctaactgacgctgaggtacgaaagcatggggagcaaacaggattagataccctggtagtccatgccgtaaacgatgtctactagccgttggggctttagtggcgcggctaacgcgataagtagaccgcctggggagtacggtcgcaagactaaaactcaaatgaattgacgggggcccgcacaagcggtggagcatgtggtttaattcgatgcaacgcgaagaaccttacctggccttgacatatacaggtgctgcatggctgtcgtcagctcgtgccgtgagatgttgggttaagtcccgcaacgagcgcaacccttttccttacttgccagcatatgggaactttaaggatactgccagtgacaaactggaggaaggcggggacgacgtcaagtcatcatggcccttacggccagggctacacacgtgctacaatggtcggcaaagggttgctacctagcgataggatgctaatctcaaccgatcgtagtccggatggagtctgcaactcgactccagaagtcggaatcgctagtaatcgcggatcagaatgccgcggtgaatacgttcccgggccttgtacacaccgcccgtcacaccatgggagtttgttgcaccagaagtaggtgtctaggacgcttaccacggtgtggccgatgactggggtg

SEQ ID NO: 30 - DNA, 1540 bp, Acinetobacter haemolyticus
ttaaactgaagagtttgatcatggctcagattgaacgctggcggcaggcttaacacatgcaagtcgagcggggaagtgtagcttgctacattacctagcggcggacgggtgagtaatgcttaggaatctgcctattagtgggggacaacattccgaaaggaatgctaataccgcatacgtcctacgggagaaagcaggggatcttcggaccttgcgctaatagatgagcctaagtcggattagctagttggtggggtaaaggcctaccaaggcgacgatctgtagcgggtctgagaggatgatccgccacactgggactgagacacggcccagactcctacgggaggcagcagtggggaatattggacaatgggcggaagcctgatccagccatgccgcgtgtgtgaagaaggccttttggttgtaaagcactttaagcgaggaggaggctactctagttaatacctagagatagtggacgttactcgcagaataagcaccggctaactctgtgccagcagccgcggtaatacagagggtgcgagcgttaatcggatttactgggcgtaaagcgtgcgtaggcggctgattaagtcggatgtgaaatccctgagcttaacttaggaattgcattcgatactggtcagctagagtatgggagaggatggtagaattccaggtgtagcggtgaaatgcgtagagatctggaggaataccgatggcgaaggcagccatctggcctaatactgacgctgaggtacgaaagcatggggagcaaacaggattagataccctggtagtccatgccgtaaacgatgtctactagccgttggggcctttgaggctttagtggcgcagctaacgcgataagtagaccgcctggggagtacggtcgcaagactaaaactcaaatgaattgacgggggcccgcacaagcggtggagcatgtggtttaattcgatgcaacgcgaagaaccttacctggtcttgacatagtaagaactttccagagatggattggtgccttcgggaacttacatacaggtgctgcatggctgtcgtcagctcgtgtcgtgagatgttgggttaagtcccgcaacgagcgcaacccttttccttatttgccagcgggttaagccgggaactttaaggatactgccagtgacaaactggaggaaggcggggacgacgtcaagtcatcatggcccttacgaccagggctacacacgtgctacaatggtcggtacaaagggttgctacctagcgataggatgctaatctcaaaaagccgatcgtagtccggattggagtctgcaactcgactccatgaagtcggaatcgctagtaatcgcggatcagaatgccgcggtgaatacgttcccgggccttgtacacaccgcccgtcacaccatgggagtttgttgcaccagaagtaggtagtctaaccgtaaggaggacgcttaccacggtgtggccgatgactggggtgaagtcgtaacaaggtagccgtaggggaacctgcggctggatcacctcctta

SEQ ID NO: 31 - DNA, 1447 bp, Acinetobacter johnsonii
cctagcggcggacgggtgagtaatgcttaggaatctgcctattagtgggggacaacattccgaaaggaatgctaataccgcatacgccctacgggggaaagcaggggatcttcggaccttgcgctaatagatgagcctaagtcagattagctagttggtggggtaaaggcctaccaaggcgacgatctgtagcgggtctgagaggatgatccgccacactgggactgagacacggcccagactcctacgggaggcagcagtggggaatattggacaatgggcgaaagcctgatccagccatgccgcgtgtgtgaagaaggccttttggttgtaaagcactttaagcgaggaggaggctacttagattaatactctaggatagtggacgttactcgcagaataagcaccggctaactctgtgccagcagccgcggtaatacagagggtgcgagcgttaatcggatttactgggcgtaaagcgtgcgtaggcggcttcttaagtcggatgtgaaatccctgagcttaacttaggaattgcattcgatactgggaagctagagtatgggagaggatggtagaattccaggtgtagcggtgaaatgcgtagagatctggaggaataccgatggcgaaggcagccatctggcctaatactgacgctgaggtacgaaagcatggggagcaaacaggattagataccctggtagtccatgccgtaaacgatgtctactagccgttggggcctttgaggctttagtggcgcagctaacgcgataagtagaccgcctggggagtacggtcgcaagactaaaactcaaatgaattgacgggggcccgcacaagcggtggagcatgtggtttaattcgatgcaacgcgaagaaccttacctggtcttgacatagtaagaactttccagagatggattggtgccttcgggaacttacatacaggtgctgcatggctgtcgtcagctcgtgtcgtgagatgttgggttaagtcccgcaacgagcgcaacccttttccttatttgccagcgggttaagccgggaactttaaggatactgccagtgacaaactggaggaaggcggggacgacgtcaagtcatcatggcccttacgaccagggctacacacgtgctacaatggtcggtacaaagggttgctacctagcgataggatgctaatctcaaaaagccgatcgtagtccggattggagtctgcaactcgactccatgaagtcggaatcgctagtaatcgcggatcagaatgccgcggtgaatacgttcccgggccttgtacacaccgcccgtcacaccatgggaatttgttgcaccagaagtaggtagtctaaccgcaaggaggacgcttaccacggtgtggccgatgactggggtgaagtcgtaacaaggtagccgtaggggaacctgcggctggatcacctcctta

SEQ ID NO: 32 - DNA, 1537 bp, Acinetobacter junii
aactgaagagtttgatcatggctcagattgaacgctggcggcaggcttaacacatgcaagtcgagcggagatgaggtgcttgcaccttatcttagcggcggacgggtgagtaatgcttaggaatctgcctattagtgggggacaacattccgaaaggaatgctaataccgcatacgtcctacgggagaaagcaggggatcttcggaccttgcgctaatagatgagcctaagtcggattagctagttggtggggtaaaggcctaccaaggcgacgatctgtagcgggtctgagaggatgatccgccacactgggactgagacacggcccagactcctacgggaggcagcagtggggaatattggacaatggggggaaaccctgatccagccatgccgcgtgtgtgaagaaggccttatggttgtaaagcactttaagcgaggaggaggctactgagactaatactcttggatagtggacgttactcgcagaataagcaccggctaactctgtgccagcagccgcggtaatacagagggtgcgagcgttaatcggatttactgggcgtaaagcgtgcgtaggcggctttttaagtcggatgtgaaatccccgagcttaacttgggaattgcattcgatactgggaagctagagtatgggagaggatggtagaattccaggtgtagcggtgaaatgcgtagagatctggaggaataccgatggcgaaggcagccatctggcctaatactgacgctgaggtacgaaagcatggggagcaaacaggattagataccctggtagtccatgccgtaaacgatgtctactagccgttggggcctttgaggctttagtggcgcagctaacgcgataagtagaccgcctggggagtacggtcgcaagactaaaactcaaatgaattgacgggggcccgcacaagcggtggagcatgtggtttaattcgatgcaacgcgaagaaccttacctggccttgacatactagaaactttccagagatggattggtgccttcgggaatctagatacaggtgctgcatggctgtcgtcagctcgtgtcgtgagatgttgggttaagtcccgcaacgagcgcaacccttttccttacttgccagcatttcggatgggaactttaaggatactgccagtgacaaactggaggaaggcggggacgacgtcaagtcatcatggcccttacggccagggctacacacgtgctacaatggtcggtacaaagggttgctacacagcgatgtgatgctaatctcaaaaagccgatcgtagtccggattggagtctgcaactcgactccatgaagtcggaatcgctagtaatcgcggatcagaatgccgcggtgaatacgttcccgggccttgtacacaccgcccgtcacaccatgggagtttgttgcaccagaagtaggtagtctaaccgcaaggaggacgcttaccacggtgtggccgatgactggggtgaagtcgtaacaaggtagccgtaggggaacctgcggctggatcacctcctta

SEQ ID NO: 33 - DNA, 1449 bp, Acinetobacter lwoffii
gacctagcggcggacgggtgagtaatgcttaggaatctgcctattagtgggggacaacatctcgaaagggatgctaataccgcatacgtcctacgggagaaagcaggggaccttcgggccttgcgctaatagatgagcctaagtcggattagctagttggtggggtaaaggcctaccaaggcgacgatctgtagcgggtctgagaggatgatccgccacactgggactgagacacggcccagactcctacgggaggcagcagtggggaatattggacaatggggggaaccctgatccagccatgccgcgtgtgtgaagaaggccttttggttgtaaagcactttaagcgaggaggaggctaccgagattaatactcttggatagtggacgttactcgcagaataagcaccggctaactctgtgccagcagccgcggtaatacagagggtgcaagcgttaatcggatttactgggcgtaaagcgcgcgtaggtggccaattaagtcaaatgtgaaatccccgagcttaacttgggaattgcattcgatactggttggctagagtatgggagaggatggtagaattccaggtgtagcggtgaaatgcgtagagatctggaggaataccgatggcgaaggcagccatctggcctaatactgacactgaggtgcgaaagcatggggagcaaacaggattagataccctggtagtccatgccgtaaacgatgtctactagccgttggggcctttgaggctttagtggcgcagctaacgcgataagtagaccgcctggggagtacggtcgcaagactaaaactcaaatgaattgacgggggcccgcacaagcggtggagcatgtggtttaattcgatgcaacgcgaagaaccttacctggtcttgacatagtaagaactttccagagatggattggtgccttcgggaacttacatacaggtgctgcatggctgtcgtcagctcgtgtcgtgagatgttgggttaagtcccgcaacgagcgcaacccttttccttatttgccagcgggttaagccgggaactttaaggatactgccagtgacaaactggaggaaggcggggacgacgtcaagtcatcatggcccttacgaccagggctacacacgtgctacaatggtcggtacaaagggttgctacctcgcgagaggatgctaatctcaaaaagccgatcgtagtccggattggagtctgcaactcgactccatgaagtcggaatcgctagtaatcgcggatcagaatgccgcggtgaatacgttcccgggccttgtacacaccgcccgtcacaccatgggagtttgttgcaccagaagtaggtagtctaaccttaggggggacgcttaccacggtgtggcagatgactggggtgaagtcgtaacaaggtagccgtaggggaacctgcggctggatcacctcctta

SEQ ID NO: 34 - DNA, 1517 bp, Acinetobacter parvus
agagtttgatcatggctcagattgaacgctggcggcaggcttaacacatgcaagtcgagcggggattgggtgcttgcacctaatcttagcggcggacgggtgagtaatgcttaggaatctgccatttagtgggggacaacattccgaaagggatgctaataccgcatacgccctacgggggaaagcaggggatcttcggaccttgcgctaaatgatgagcctaagtcggattagctagttggtggggtaaaggcctaccaaggcgacgatctgtagcgggtctgagaggatgatccgccacactgggactgagacacggcccagactcctacgggaggcagcagtggggaatattggacaatgggcggaagcctgatccagccatgccgcgtgtgtgaagaaggccttttggttgtaaagcactttaagcgaggaggaggctacctggattaatactctaggatagtggacgttactcgcagaataagcaccggctaactctgtgccagcagccgcggtaatacagagggtgcgagcgttaatcggatttactgggcgtaaagcgtgcgtaggcggctgattaagtcggatgtgaaatccctgagcttaacttaggaattgcattcgatactggtcagctagagtatgggagaggatggtagaattccaggtgtagcggtgaaatgcgtagagatctggaggaataccgatggcgaaggcagccatctggcctaatactgacgctgaggtacgaaagcatggggagcaaacaggattagataccctggtagtccatgccgtaaacgatgtctactagccgttggggcctttgaggctttagtggcgcagctaacgcgataagtagaccgcctggggagtacggtcgcaagactaaaactcaaatgaattgacgggggcccgcacaagcggtggagcatgtggtttaattcgatgcaacgcgaagaaccttacctggccttgacatagtagaaactttccagagatggattggtgccttcgggaatctacatacaggtgctgcatggctgtcgtcagctcgtgtcgtgagatgttgggttaagtcccgcaacgagcgcaacccttttccttacttgccagcatttcggatgggaactttaaggatactgccagtgacaaactggaggaaggcggggacgacgtcaagtcatcatggcccttacggccagggctacacacgtgctacaatggtcggtacaaagggttgctacctagcgataggatgctaatctcaaaaagccgatcgtagtccggattggagtctgcaactcgactccatgaagtcggaatcgctagtaatcgcggatcagaatgccgcggtgaatacgttcccgggccttgtacacaccgcccgtcacaccatgggagtttgttgcaccagaagtaggtagtctaaccttaggggggacgcttaccacggtgtggccgatgactggggtgaagtcgtaacaaggtagccgtaggggaacctgcggctg

SEQ ID NO: 35 - DNA, 1539 bp, Acinetobacter radioresistens
tttaactgaagagtttgatcatggctcagattgaacgctggcggcaggcttaacacatgcaagtcgagcggatgaaggtagcttgctaccggattcagcggcggacgggtgagtaatgcttaggaatctgcctattagtgggggacaacgttccgaaaggagcgctaataccgcatacgtcctacgggagaaagcaggggacctttgggccttgcgctaatagatgagcctaagtcggattagctagttggtagggtaaaggcctaccaaggcgacgatctgtagcgggtctgagaggatgatccgccacactgggactgagacacggcccagactcctacgggaggcagcagtggggaatattggacaatggggggaaccctgatccagccatgccgcgtgtgtgaagaaggccttttggttgtaaagcactttaagcgaggaggaggctacctagattaatactttaggatagtggacgttactcgcagaataagcaccggctaactctgtgccagcagccgcggtaatacagagggtgcgagcgttaatcggatttactgggcgtaaagcgtgcgtaggcggccaattaagtcaaatgtgaaatccccgagcttaacttgggaattgcattcgatactggttggctagagtatgggagaggatggtagaattccaggtgtagcggtgaaatgcgtagagatctggaggaataccgatggcgaaggcagccatctggcctaatactgacgctgaggtacgaaagcatggggagcaaacaggattagataccctggtagtccatgccgtaaacgatgtctactagccgttggggcccttgaggctttagtggcgcagctaacgcgataagtagaccgcctggggagtacggtcgcaagactaaaactcaaatgaattgacgggggcccgcacaagcggtggagcatgtggtttaattcgatgcaacgcgaagaaccttacctggccttgacatacagagaactttccagagatggattggtgccttcgggaactctgatacaggtgctgcatggctgtcgtcagctcgtgtcgtgagatgttgggttaagtcccgcaacgagcgcaacccttttccttatttgccagcacttcgggtgggaactttaaggatactgccagtgacaaactggaggaaggcggggacgacgtcaagtcatcatggcccttacggccagggctacacacgtgctacaatggtcggtacaaagggttgctacacagcgatgtgatgctaatctcaaaaagccgatcgtagtccggattggagtctgcaactcgactccatgaagtcggaatcgctagtaatcgcggatcagaatgccgcggtgaatacgttcccgggccttgtacacaccgcccgtcacaccatgggagtttgttgcaccagaagtaggtagtctaaccgcaaggaggacgcttaccacggtgtggccgatgactggggtgaagtcgtaacaaggtagccgtaggggaacctgcggctggatcacctcctta

SEQ ID NO: 36 - DNA, 1466 bp, Acinetobacter schindleri
ggcggcaggcttaacacatgcaagtcgagcggggaaaggtaccttgctacctgacctagcggcggacgggtgagtaatgcttaggaatctgcctattagtgggggacaacgttccgaaaggaacgctaataccgcatacgccctacgggggaaagcaggggatcttcggaccttgcgctaatagatgagcctaagtcggattagctagttggtggggtaaaggcctaccaaggcgacgatctgtagcgggtctgagaggatgatccgccacactgggactgagacacggcccagactcctacgggaggcagcagtggggaatattggacaatgggcggaagcctgatccagccatgccgcgtgtgtgaagaaggccttttggttgtaaagcactttaagcgaggaggaggctcctttagttaatacctaaagagagtggacgttactcgcagaataagcaccggctaactctgtgccagcagccgcggtaatacagagggtgcgagcgttaatcggatttactgggcgtaaagcgtgcgtaggcggctttttaagtcggatgtgaaatccctgagcttaacttaggaattgcattcgatactggaaagctagagtatgggagaggatggtagaattccaggtgtagcggtgaaatgcgtagagatctggaggaataccgatggcgaaggcagccatctggcctaatactgacgctgaggtacgaaagcatggggagcaaacaggattagataccctggtagtccatgccgtaaacgatgtctactagccgttggggcctttgaggctttagtggcgcagctaacgcgataagtagaccgcctggggagtacggtcgcaagactaaaactcaaatgaattgacgggggcccgcacaagcggtggagcatgtggtttaattcgatgcaacgcgaagaaccttacctggccttgacatactaagaactttccagagatggattggtgccttcgggaacttagatacaggtgctgcatggctgtcgtcagctcgtgtcgtgagatgttgggttaagtcccgcaacgagcgcaacccttttccttatttgccatcgggtaatgccgggaactttaaggatactgccagtgacaaactggaggaaggcggggacgacgtcaagtcatcatggcccttacggccagggctacacacgtgctacaatggtcggtacaaagggttgctacctcgcgagaggatgctaatctcaaaaagccgatcgtagtccggatcgcagtctgcaactcgactgcgtgaagtcggaatcgctagtaatcgcggatcagaatgccgcggtgaatacgttcccgggccttgtacacaccgcccgtcacaccatgggagtttgttgcaccagaagtaggtagtctaaccgcaaggaggacgcttaccacggtgtggccgatgactgggacgaagtcgtaacaaggta

SEQ ID NO: 37 - DNA, 1291 bp, Acinetobacter sp.
  56A1
gcttgctactggacctagcggcggacgggtgagtaatgcttaggaatctgcctattagtgggggacaacatctcgaaagggatgctaataccgcatacgtcctacgggagaaagcaggggatcttcggaccttgcgctaatagatgagcctaagtcggattagctagttggtggggtaaaggcctaccaaggcgacgatctgtagcgggtctgagaggatgatccgccacactgggactgagacacggcccagactcctacgggaggcagcagtggggaatattggacaatggggggaaccctgatccagccatgccgcgtgtgtggaagaaggccttatggttgtaaagcactttaagcgaggaggaggctactttagttaatacctagagatagtggacgttactcgcagaataagcaccggctaactctgtgccagcagccgcggtaatacagagggtgcgagcgttaatcggatttactgggcgtaaagcgtgcgtaggcggcttattaagtcggatgtgaaatccccgagcttaacttgggaattgcattcgatactggtgagctagagtatgggagaggatggtagaattccaggtgtagcggtgaaatgcgtagagatctggaggaataccgatggcgaaggcagccatctggcctaatactgacgctgaggtacgaaagcatggggagcaaacaggattagataccctggtagtccatgccgtaaacgatgtctactagccgttggggcctttgaggctttagtggcgcagctaacgcgataagtagaccgcctggggagtacggtcgcaagactaaaactcaaatgaattgacgggggcccgcacaagcggtggagcatgtggtttaattcgatgcaacgcgaagaaccttacctggccttgacatactagaaactttccagagatggattggtgccttcgggaatctagatacaggtgctgcatggctgtcgtcagctcgtgtcgtgagatgttgggttaagtcccgcaacgagcgcaacccttttccttacttgccagcatttcggatgggaactttaaggatactgccagtgacaaactggaggaaggcggggacgacgtcaagtcatcatggcccttacggccagggctacacacgtgctacaatggtcggtacaaagggttgctacacagcgatgtgatgctaatctcaaaaagccgatcgtagtccggattggagtctgcaactcgactccatgaagtcggaatcgctagtaatcgcggatcagaatgccgcggtg

SEQ ID NO: 38 - DNA, 1513 bp, Acinetobacter sp.
  CIP 101934
ctcagattgaacgctggcggcaggcttaacacatgcaagtcgagcggggaaggttgcttcggtaactgacctagcggcggacgggtgagtaatgcttaggaatctgcctattagtgggggacaacgttccgaaaggaacgctaataccgcatacgccctacgggggaaagcaggggatcttcggaccttgcgctaatagatgagcctaagtcggattagctagttggtggggtaaaggcctaccaaggcgacgatctgtagcgggtctgagaggatgatccgccacactgggactgagacacggcccagactcctacgggaggcagcagtggggaatattggacaatgggcgcaagcctgatccagccatgccgcgtgtgtgaagaaggccttttggttgtaaagcactttaagcgaggaggaggctcctttagttaatacctaaagtgagtggacgttactcgcagaataagcaccggctaactctgtgccagcagccgcggtaatacagagggtgcgagcgttaatcggatttactgggcgtaaagcgtgcgtaggcggctttttaagtcggatgtgaaatccctgagcttaacttaggaattgcattcgatactggaaagctagagtatgggagaggatggtagaattccaggtgtagcggtgaaatgcgtagagatctggaggaataccgatggcgaaggcagccatctggcctaatactgacgctgaggtacgaaagcatggggagcaaacaggattagataccctggtagtccatgccgtaaacgatgtctactagccgttggggcctttgaggctttagtggcgcagctaacgcgataagtagaccgcctggggagtacggtcgcaagactaaaactcaaatgaattgacgggggcccgcacaagcggtggagcatgtggtttaattcgatgcaacgcgaagaaccttacctggccttgacatactaagaactttccagagatggattggtgccttcgggaacttagatacaggtgctgcatggctgtcgtcagctcgtgtcgtgagatgttgggttaagtcccgcaacgagcgcaacccttttccttatttgccagcgggtaatgccgggaactttaaggatactgccagtgacaaactggaggaaggcggggacgacgtcaagtcatcatggcccttacggccagggctacacacgtgctacaatggtcggtacaaagggttgctacctcgcgagaggatgctaatctcaaaaagccgatcgtagtccggatcgcagtctgcaactcgactgcgtgaagtcggaatcgctagtaatcgcggatcagaatgccgcggtgaatacgttcccgggccttgtacacaccgcccgtcacaccatgggagtttgttgcaccagaagtaggtagtctaaccgcaaggaggacgcttaccacggtgtggccgatgactggggtgaagtcgtaacaaggtagccgtaggggaacctgcggttggatcacctcc

SEQ ID NO: 39 - DNA, 1494 bp, Acinetobacter sp.
  CIP 102143
tggctcagattgaacgctggcggcaggcttaacacatgcaagtcgagcggggattgggtgcttgcacctaatcttagcggcggacgggtgagtaatgcttaggaatctgccatttagtgggggacaacattccgaaagggatgctaataccgcatacgccctacgggggaaagcaggggatcttcggaccttgcgctaaatgatgagcctaagtcggattagctagttggtggggtaaaggcctaccaaggcgacgatctgtagcgggtctgagaggatgatccgccacactgggactgagacacggcccagactcctacgggaggcagcagtggggaatattggacaatggggggaagcctgatccagccatgccgcgtgtgtgaagaaggccttttggttgtaaagcactttaagcgaggaggaggctacctggattaatactctaggatagtggacgttactcgcagaataagcaccggctaactctgtgccagcagccgcggtaatacagagggtgcgagcgttaatcggatttactgggcgtaaagcgtgcgtaggcggctgattaagtcggatgtgaaatccctgagcttaacttaggaattgcattcgatactggtcagctagagtatgggagaggatggtagaattccaggtgtagcggtgaaatgcgtagagatctggaggaataccgatggcgaaggcagccatctggcctaatactgacgctgaggtacgaaagcatggggagcaaacaggattagataccctggtagtccatgccgtaaacgatgtctactagccgttggggcctttgaggctttagtggcgcagctaacgcgataagtagaccgcctggggagtacggtcgcaagactaaaactcaaatgaattgacgggggcccgcacaagcggtggagcatgtggtttaattcgatgcaacgcgaagaaccttacctggccttgacatagtagaaactttccagagatggattggtgccttcgggaatctacatacaggtgctgcatggctgtcgtcagctcgtgtcgtgagatgttgggttaagtcccgcaacgagcgcaacccttttccttacttgccagcatttcggatgggaactttaaggatactgccagtgacaaactggaggaaggcggggacgacgtcaagtcatcatggcccttacggccagggctacacacgtgctacaatggtcggtacaaagggttgctacctagcgataggatgctaatctcaaaaagccgatcgtagtccggattggagtctgcaactcgactccatgaagtcggaatcgctagtaatcgcggatcagaatgccgcggtgaatacgttcccgggccttgtacacaccgcccgtcacaccatgggagtttgttgcaccagaagtaggtagtctaaccttaggggggacgcttaccacggtgtggccgatgactggggtgaagtcgtaacaaggtagccgtagggga

SEQ ID NO: 40 - DNA, 1465 bp, Acinetobacter sp.
  CIP 53.82
acatgcaagtcgagcggggatagggtgcttgcacctgattcctagcggcggacgggtgagtaaagcttaggaatctgcctattagtgggggacaacattccgaaagggatgctaataccgcatacgccctacgggggaaagcaggggatcttcggaccttgcgctaatagatgagcctaagtcggattagctagttggtggggtaaaggcctaccaaggcgacgatctgtagcgggtctgagaggatgatccgccacactgggactgagacacggcccagactcctacgggaggcagcagtggggaatattggacaatggggggaaccctgatccagccatgccgcgtgtgtgaagaaggccttttggttgtaaagcactttaagcgaggaggaggcgctctaggataataccctagatgcgtggacgttactcgcagaataagcaccggctaactctgtgccagcagccgcggtaatacagagggtgcgagcgttaatcggatttactgggcgtaaagcgcgcgtaggtggctaattaagtcaaatgtgaaatccccgagcttaacttgggaattgcattcgatactggttagctagagtatgggagaggatggtagaattccaggtgtagcggtgaaatgcgtagagatctggaggaataccgatggcgaaggcagccatctggcctaatactgacactgaggtgcgaaagcatggggagcaaacaggattagataccctggtagtccatgccgtaaacgatgtctactagccgttggggcctttgaggctttagtggcgcagctaacgcgataagtagaccgcctggggagtacggtcgcaagactaaaactcaaatgaattgacgggggcccgcacaagcggtggagcatgtggtttaattcgatgcaacgcgaagaaccttacctggccttgacatacagagaactttccagagatggattggtgccttcgggaactctgatacaggtgctgcatggctgtcgtcagctcgtgtcgtgagatgttgggttaagtcccgcaacgagcgcaacccttttccttacttgccagcatttcggatgggaactttaaggatactgccagtgacaaactggaggaaggcggggacgacgtcaagtcatcatggcccttacggccagggctacacacgtgctacaatggtcggtacaaagggttgctacacagcgatgtgatgctaatctcaaaaagccgatcgtagtccggattggagtctgcaactcgactccatgaagtcggaatcgctagtaatcgcggatcagaatgccgcggtgaatacgttcccgggccttgtacacaccgcccgtcacaccatgggagtttgttgcaccagaagtaggtagtctaaccttagggaggacgcttaccacggtgtggccgatgactggggtgaagtcgtaacaaggtagccgtaggggaacc

SEQ ID NO: 41 - DNA, 1280 bp, Acinetobacter sp.
  M16-22
  modified_base (489)..(489): a, c, t, g, unknown or other
cgagcggacgggtgagtgatgcttgggagtctgcctgttagtgggggacaacttcttacaggggatgctaataccgcccacatcctaccggagaaagcaggggatcttccttccttgctctagtagatgaacctgcctcggattaactagttggtggggtaaaggcctacccaggcgaccatctatcccgggtctgagaggatgatccaccacactgggactgagacacagcccagactcctaccggaggcaggagtggggaatataggacaatggggggaaccctgatccatgcatgccgcgtgtgtgaagaaggccttatggttgtaaagcactttaatcgaggaggaggctactttagttagtacctagagatagtggacgttactcgcagaataagcaccggctaactctgtgccaccagccgcggtaatacagagggtgcgagcgttaatcggatttactgggcgtaaagcgcgcgcaggcggntatcaagtcggatgtgaaatccccgagctcaacttgggaattgcattcgatactggcgagctagagtatgggagaggagggtagaattccaggtgtagcggtgaaatgcgtagagatctggaggaataccgatggcgaaggcagccatctggcctaatactgacgctgaggtacgaaagcatggggagcaaacaggattagataccctggtagtccatgccgtaaacgatgtctactagccggtggtgcctttgaggcgttagttgcgcagctaacgcgataagtagaccgcctggggagtacggtcgcaagattaaaactcaaatgaattgacgggggcccgcacaagcggtggagcatgtggtttaattcgatgcaacgcgaagaaccttacctggccttgacatactagaaactttccagagatggattggtgccttcgggaatttagatacaggtgctgcatggctgtcgtcagctcgtgttgtgagatgttgggttaagtcccgcaacgagcgcaacccttttccttacttgccagcatttcggatgggaactttaaggatactgccagtgacaaactggaggaaggcggggacgacgtcaagtcatcatggcccttacggccagggctacacacgtgctacaatggtcggtacaaagggatgctacacagcgaggtcatgctaatctcaaaaagccgatcgtagtccggattggagtctgcaactcgactccatgaagtcggaatcgctagtaatcgcggatcagaatgccgcggtgaatacgtt

SEQ ID NO: 42 - DNA, 1540 bp, Acinetobacter sp.
  RUH2624
tttaactgaagagtttgatcatggctcagattgaacgctggcggcaggcttaacacatgcaagtcgagcgggggaaggtagcttgctaccggacctagcggcggacgggtgagtaatgcttaggaatctgcctattagtgggggacaacatctcgaaagggatgctaataccgcatacgtcctacgggagaaagcaggggatcttcggaccttgcgctaatagatgagcctaagtcggattagctagttggtggggtaaaggcctaccaaggcgacgatctgtagcgggtctgagaggatgatccgccacactgggactgagacacggcccagactcctacgggaggcagcagtggggaatattggacaatgggcgcaagcctgatccagccatgccgcgtgtgtgaagaaggccttatggttgtaaagcactttaagcgaggaggaggctactttagataatacctagagatagtggacgttactcgcagaataagcaccggctaactctgtgccagcagccgcggtaatacagagggtgcaagcgttaatcggatttactgggcgtaaagcgcgcgtaggcggctaattaagtcaaatgtgaaatccccgagcttaacttgggaattgcattcgatactggttagctagagtgtgggagaggatggtagaattccaggtgtagcggtgaaatgcgtagagatctggaggaataccgatggcgaaggcagccatctggcctaacactgacgctgaggtgcgaaagcatggggagcaaacaggattagataccctggtagtccatgccgtaaacgatgtctactagccgttggggcctttgaggctttagtggcgcagctaacgcgataagtagaccgcctggggagtacggtcgcaagactaaaactcaaatgaattgacgggggcccgcacaagcggtggagcatgtggtttaattcgatgcaacgcgaagaaccttacctggccttgacatagtaagaactttccagagatggattggtgccttcgggaacttacatacaggtgctgcatggctgtcgtcagctcgtgtcgtgagatgttgggttaagtcccgcaacgagcgcaacccttttccttatttgccagcgagtaatgtcgggaactttaaggatactgccagtgacaaactggaggaaggcggggacgacgtcaagtcatcatggcccttacggccagggctacacacgtgctacaatggtcggtacaaagggttgctacacagcgatgtgatgctaatctcaaaaagccgatcgtagtccggattggagtctgcaactcgactccatgaagtcggaatcgctagtaatcgcggatcagaatgccgcggtgaatacgttcccgggccttgtacacaccgcccgtcacaccatgggagtttgttgcaccagaagtagctagcctaactgcaaagagggcggttaccacggtgtggccgatgactggggtgaagtcgtaacaaggtagccgtaggggaacctgcggctggatcacctcctta

SEQ ID NO: 43 - DNA, 1540 bp, Acinetobacter sp.
  SH024
tttaactgaagagtttgatcatggctcagattgaacgctggcggcaggcttaacacatgcaagtcgagcggagagaggtagcttgctactgatcttagcggcggacgggtgagtaatgcttaggaatctgcctattagtgggggacaacatttcgaaaggaatgctaataccgcatacgtcctacgggagaaagcaggggatcttcggaccttgcgctaatagatgagcctaagtcggattagctagttggtggggtaaaggcctaccaaggcgacgatctgtagcgggtctgagaggatgatccgccacactgggactgagacacggcccagactcctacgggaggcagcagtggggaatattggacaatgggcgcaagcctgatccagccatgccgcgtgtgtgaagaaggccttatggttgtaaagcactttaagcgaggaggaggctactttagataatacctagagatagtggacgttactcgcagaataagcaccggctaactctgtgccagcagccgcggtaatacagagggtgcaagcgttaatcggatttactgggcgtaaagcgcgcgtaggcggctaattaagtcaaatgtgaaatccccgagcttaacttgggaattgcattcgatactggttagctagagtgtgggagaggatggtagaattccaggtgtagcggtgaaatgcgtagagatctggaggaataccgatggcgaaggcagccatctggcctaacactgacgctgaggtgcgaaagcatggggagcaaacaggattagataccctggtagtccatgccgtaaacgatgtctactagccgttggggcctttgaggctttagtggcgcagctaacgcgataagtagaccgcctggggagtacggtcgcaagactaaaactcaaatgaattgacgggggcccgcacaagcggtggagcatgtggtttaattcgatgcaacgcgaagaaccttacctggccttgacatagtaagaactttccagagatggattggtgccttcgggaacttacatacaggtgctgcatggctgtcgtcagctcgtgtcgtgagatgttgggttaagtcccgcaacgagcgcaacccttttccttatttgccagcgagtaatgtcgggaactttaaggatactgccagtgacaaactggaggaaggcggggacgacgtcaagtcatcatggcccttacggccagggctacacacgtgctacaatggtcggtacaaagggttgctacctagcgataggatgctaatctcaaaaagccgatcgtagtccggattggagtctgcaactcgactccatgaagtcggaatcgctagtaatcgcggatcagaatgccgcggtgaatacgttcccgggccttgtacacaccgcccgtcacaccatgggagtttgttgcaccagaagtagctagcctaactgcaaagagggcggttaccacggtgtggccgatgactggggtgaagtcgtaacaaggtagccgtaggggaacctgcggctggatcacctcctta

SEQ ID NO: 44 - DNA, 1362 bp, Actinobacillus actinomycetemcomitans
attgaacgctggcggcaggcttaacacatgcaagtcggacggtagcaggagaaagcttgctttcttgctgacgagtggcggacgggtgagtaatgcttggggatctgtcttatggagggggataacgacgggaaactgtcgctaataccgcgtagagtcgggagacgaaagtgcgggaccttagggccgcatgccatgagatgagcccaagtgtgattaggtagttggtggggtaaaggcctaccaagccgacgatcgctagctggtctgagaggatggccagccacaccgggactgagacacggcccggactcctacgggaggcagcagtggggaatattgcgcaatgggggcaaccctgacgcagccatgccgcgtgaatgaagaaggccttcgggttgtaaagttctttcggtgatgaggaaggttggtgtgttaatagcatgccaacttgacgttaaatacagaagaagcaccggctaactccgtgccagcagccgcggtaatacggggggtgctagcgttaatcggaataactgggcgtaaagggcacgtaggcggacctttaagtgaggtgtgaaatccccgggcttaacctgggaattgcatttcatactgggggtctggagtactttagggaggggtagaattccacgtgtagcggtgaaatgcgtagagatgtggaggaataccgaaggcgaaggcagccccttggggatgtactgacgctgatgtgcgaaagcgtggggagcaaacaggattagataccctggtagtccacgctgtaaacggtgtcgatttggggattggggtttagccctggtgcccgaagctaacgtgataaatcgaccgcctggggagtacggccgcaaggttaaaactcaaatgaattgacgggggcccgcacaagcggtggagcatgtggtttaattcgatgcaacgcgaagaaccttacctactcttgacatccgaagaagaactcagagatgggtttgtgccttagggagctttgagacaggtgctgcatggctgtcgtcagctcgtgttgtgaaatgttgggttaagtcccgcaacgagcgcaacccttatcctttgttgccagcgattaggtcgggaactcaaaggagactgccggtgataaaccggaggaaggtggggatgacgtcaagtcatcatggcccttacgagtagggctacacacgtgctacaatggcgtatacagagggtaaccaaccagcgatggggagtgaatctcagaaagtgcgtctaagttcggattggagtctgcaactcgactccatgaagtcggaatcgctagtaatcgcgaatcagaatgttgcggtgaatacgttcccgggcctt

SEQ ID NO: 45 - DNA, 1542 bp, Actinobacillus minor
gaattgaagagtttgatcatggctcagattgaacgctggcggcaggcttaacacatgcaagtcgaacggtaacagggagaaagcttgctttctttgctgacgagtggcggacgggtgagtaatgcttgggaatctggcttatggagggggataactacgggaaactgtagctaataccgcgtaatatcttcggattaaagggtgggaccgtaaggccacctgccataagatgagcccaagtgggattaggtagttggtggggtaaaggcctaccaagccgacgatctctagctggtctgagaggatgaccagccacactggaactgagacacggtccagactcctacgggaggcagcagtggggaatattgcacaatggggggaaccctgatgcagccatgccgcgtgaatgaagaaggccttcgggttgtaaagttctttcggtgatgaggaaggcaggtaagttaatagcttacttgattgacgttagtcacagaagaagcaccggctaactccgtgccagcagccgcggtaatacggagggtgcgagcgttaatcggaatgactgggcgtaaagggcacgcaggcggtgacttaagtgagatgtgaaagccccgggcttaacctgggaattgcatttcatactgggtcgctagagtattttagggaggggtagaattccacgtgtagcggtgaaatgcgtagagatgtggaggaataccgaaggcgaaggcagccccttgggaatatactgacgctcatgtgcgaaagcgtggggagcaaacaggattagataccctggtagtccacgctgtaaacgctgtcgatttggggattgggctttgagcttggtgcccgtagctaacgtgataaatcgaccgcctggggagtacggccgcaaggttaaaactcaaatgaattgacgggggcccgcacaagcggtggagcatgtggtttaattcgatgcaacgcgaagaaccttacctactcttgacatccaaagaagaactcagagatgagtttgtgccttcgggaactttgagacaggtgctgcatggctgtcgtcagctcgtgttgtgaaatgttgggttaagtcccgcaacgagcgcaacccttatcctttgttgccagcggttaggccgggaactcaaaggagactgccagtgataaactggaggaaggtggggatgacgtcaagtcatcatggcccttacgagtagggctacacacgtgctacaatggcgtatacagagggaagcaatatggcgacatggagcaaatctcacaaagtacgtctaagtccggattggagtctgcaactcgactccatgaagtcggaatcgctagtaatcgcaaatcagaatgttgcggtgaatacgttcccgggccttgtacacaccgcccgtcacaccatgggagtgggttgtaccagaagtagatagcttaacggaaacgggggcgtttaccacggtatgattcatgactggggtgaagtcgtaacaaggtaaccgtaggggaacctgcggttggatcacctcctta

SEQ ID NO: 46 - DNA, 1538 bp, Actinobacillus pleuropneumoniae
gaattgaagagtttgatcatggctcagattgaacgctggcggcaggcttaacacatgcaagtcgaacggtaacgggaagggagcttgctttctttgccgacgagtggcggacgggtgagtaatgcttgggaatctggcttatggagggggataactacgggaaactgtagctaataccgcgtaatatctatggattaaagggtgggactttcgggccacctgccataagatgagcccaagtgggattaggtagttggttaggtaaaggctgaccaagccgacgatctctagctggtctgagaggatgaccagccacactggaactgagacacggtccagactcctacgggaggcagcagtggggaatattgcacaatgggggggaacctgatgcagccatgccgcgtgaatgaagaaggccttcgggttgtaaagttctttcggtagcgaggaaggtatcaaatttaatagatttggtaattgacgttaactacagaagaagcaccggctaactccgtgccagcagccgcggtaatacggagggtgcgagcgttaatcggaataactgggcgtaaagggcacgcaggcggtgtgattaagtgagatgtgaaagccccgggcttaacctgggattgcattacatactggtcaactagagtactttagggagggggagaattccacgtgtagcggtgaaatgcgtagagatgtggaggaataccgaaggcgaaggcagccccttgggaatgtactgacgctcatgtgcgaaagcgtggggagcaaacaggattagataccctggtagtccacgctgtaaacgctgtcgatttggggattggactgtgagtctggtgcccgaagctaacgtgataaatcgaccgcctggggagtacggccgcaaggttaaaactcaaatgaattgacgggggcccgcacaagcggtggagcatgtggtttaattcgatgcaacgcgaagaaccttacctactcttgacatccatggaatcttgtagagatacgagagtgccttcgggaaccatgagacaggtgctgcatggctgtcgtcagctcgtgttgtgaaatgttgggttaagtcccgcaacgagcgcaacccttatcctttgttgccagcgattaggtcgggaactcaaaggagactgccggtgataaaccggaggaaggtggggatgacgtcaagtcatcatggcccttacgagtagggctacacacgtgctacaatggcgtatacagagggaagcaagatggcgacatggagcaaatctcacaaagtacgtctaagtccggattggagtctgcaactcgactccatgaagtcggaatcgctagtaatcgcaaatcagaatgttgcggtgaatacgttcccgggccttgtacacaccgcccgtcacaccatgggagtgggttgtaccagaagtagatagcttaaccgaaaggggggcgtttaccacggtatgattcatgactggggtgaagtcgtaacaaggtaaccgtaggggaacctgcggttggatcacctc

SEQ ID NO: 47 - DNA, 1536 bp, Actinobacillus succinogenes
agagtttgatcatggctcagattgaacgctggcggcaggcttaacacatgcaagtcgaacggtaacgggtggaaagcttgctttccatgctgacgagtggcggacgggtgagtaatgcttggggatctggcttatggagggggataacgacgggaaactgtcgctaataccgcgtaatgtctaaggactaaagggtgggattttcggaccgcccgccataagatgagcccaagtgggattaggtagttggtggggtaaaggcctaccaagccgacgatctctagctggtctgagaggatgaccagccacactggaactgagacacggtccagactcctacgggaggcagcagtggggaatattgcgcaatgggggcaaccctgacgcagccatgccgcgtgaatgaagaaggccttcgggttgtaaagttctttcggtggtgaggaaggcgaataagttaacagcttattcgattgacgttagccacagaagaagcaccggctaactccgtgccagcagccgcggtaatacggagggtgcgagcgttaatcggaataactgggcgtaaagggcacgcaggcggctatttaagtgagatgtgaaatccccgggcttaacctgggaactgcatttcagactgggtagctagagtactttagggaggggtagaattccacgtgtagcggtgaaatgcgtagagatgtggaggaataccgaaggcgaaggcagccccttgggaacgtactgacgctcatgtgcgaaagcgtggggagcaaacaggattagataccctggtagtccacgctgtaaacgctgtcgatttggggattgggcgataagcctggtgcccgaagctaacgtgataaatcgaccgcctggggagtacggccgcaaggttaaaactcaaatgaattgacgggggcccgcacaagcggtggagcatgtggtttaattcgatgcaacgcgaagaaccttacctactcttgacatcctcagaatccggtagagatatcggagtgccttcgggaactgagagacaggtgctgcatggctgtcgtcagctcgtgttgtgaaatgttgggttaagtcccgcaacgagcgcaacccttatcctttgttgccagcatgtagagatgggaactcaaaggagactgccggtgataaaccggaggaaggtggggatgacgtcaagtcatcatggcccttacgagtagggctacacacgtgctacaatggcgtatacagagggaaacgagcctgcgagggggagtgaatctcagaaagtgcgtcgtagtccggattggagtctgcaactcgactccatgaagtcggaatcgctagtaatcgcgaatcagcatgtcgcggtgaatacgttcccgggccttgtacacaccgcccgtcacaccatgggagtgggttgtaccagaagtagatagcttaaccgaaagggggggcgtttaccacggtatgattcatgactggggtgaagtcgtaacaaggtaaccgtaggggaacctgcggttggatcacctcctt

SEQ ID NO: 48 - DNA, 1543 bp, Actinobacillus ureae
ttgaattgaagagtttgatcatggctcagattgaacgctggcggcaggcttaacacatgcaagtcgaacggtaacagggattagcttgctaatttgctgacgagtggcggacgggtgagtaatgcttgggaatttggctcatggagggggataactacgggaaactgtagctaataccgcgtaatatcttaggattaaagtgtgggaccgcaaggccacatgccatgagatgagcccaagtgggattaggtagttggtggggtaaaggcctaccaagccgacgatctctagctggtctgagaggatgatcagccacactggaactgagacacggtccagactcctacgggaggcagcagtggggaatattgcacaatgggggggaccctgatgcagccatgccgcgtgaatgaagaaggccttcgggttgtaaagttctttcggtagcgaggaaggtatcaaatttaatagatttggtaattgacgttaactacagaagaagcaccggctaactccgtgccagcagccgcggtaatacggagggtgcgagcgttaatcggaataactgggcgtaaagggcacgcaggcggttgattaagtgagatgtgaaagccctgggcttaacctgggaattgcatttcatactggtcaactagagtactttagggaggggtagaattccacgtgtagcggtgaaatgcgtagagatgtggaggaataccgaaggcgaaggcagccccttgggaatgtactgacgctcatgtgcgaaagcgtggggagcaaacaggattagataccctggtagtccacgctgtaaacgctgtcgatttggggattgggctttgagcttggtgcccgtagctaacgtgataaatcgaccgcctggggagtacggccgcaaggttaaaactcaaatgaattgacgggggcccgcacaagcggtggagcatgtggtttaattcgatgcaacgcgaagaaccttacctactcttgacatccatggaatcttgtagagatacgagagtgccttcgggaaccatgagacaggtgctgcatggctgtcgtcagctcgtgttgtgaaatgttgggttaagtcccgcaacgagcgcaacccttatcctttgttgccagcgatttggtcgggaactcaaaggagactgccagtgataaactggaggaaggtggggatgacgtcaagtcatcatggcccttacgagtagggctacacacgtgctacaatggcgtatacagagggaagcaatatggcgacatggagcaaatctcacaaagtacgtctaagtccggattggagtctgcaactcgactccatgaagtcggaatcgctagtaatcgcaaatcagaatgttgcggtgaatacgttcccgggccttgtacacaccgcccgtcacaccatgggagtgggttgtaccagaagtagatagcttaaccgcaaggggggcgtttaccacggtatgattcatgactggggtgaagtcgtaacaaggtaaccgtaggggaacctgcggttggatcacctccttac

SEQ ID NO: 49 - DNA, 1500 bp, Actinobaculum massiliae
agtttgatcctggctcaggacgaacgctggcggcgtgcttaacacatgcaagtcgaacggaaaggcccttccttttttggttgggtgctcgagtggcgaacgggtgagtattacgtgagtaacctgccctcaactgtgggataagcctgggaaactgggtctaatactgcatattcttctttcaccgcatggtgggggttggaaagttttttcggttggggatgggctcgcggcctatcagcttgttggtggggtgatggcctaccaaggcggtgacgggtagccggcctgagagggtggtcggccacattgggactgagatacggcccagactcctacgggaggcagcagtgggggatattgcacaatgggcgcaagcctgatgcagcgacgccgcgtgagggatgaaggctttcgggttgtaaacctctttcggtacagaacaaggcacgttttttgcgtgtggagggtatgtgcagaagaagcgccggctaactacgtgccagcagccgcggtaatacgtagggcgcgagcgttgtccggaattattgggcgtaaagggctcgtaggcggcttgttgcgcctgctgtgaaaacgcggggcttaactccgcgcgtgcagtgggtacgggcaggcttgagtgtggtaggggtgactggaattccrggtgtagcggtggaatgcgcagatatctggaggaacaccgatggcgaaggcaggtcactgggccattactgacgctgaggagcgaaagcgtgggtagcgaacaggattagataccctggtagtccacgctgtaaacgttgggaactaggtgtggggcccttttccggggttctgcgccgtagctaacgcattaagttccccgcctggggagtacggccgcaaggctaaaactcaaaggaattgacgggggcccgcacaagcggcggagcatgcggattaattcgatgcaacgcgaagaaccttaccaaggcttgacatacaccgggagcatgcagagatgtgtgtgcctttttggctggtgtacaggtggtgcatggttgtcgtcagctcgtgtcgtgagatgttgggttaagtcccgcaacgagcgcaacccttgtctcgtgttgccagcgcgttatggtggggactcacgagagactgccggggttaactcggaggaaggtggggatgacgtcaaatcatcatgccccttatgtcttgggcttcacgcatgctacaatggccggtacagtgggttgcgatactgtgaggtggagcgaatctctgaaagccggtctcagttcggatcggggtctgcaactcgacctcgtgaagtcggagtcgctagtaatcgcggatcagcattgccgcggtgaatacgttcccgggccttgtacacaccgcccgtcacgtcacgaaagttggcaacacccgaagcccgtggcctaaccttttggggggagcggtcgaaggtggggttggcgattgggacgaagtcgtaacaaggtagccgta

SEQ ID NO: 50 - DNA, 1487 bp, Actinobaculum schaalii
ggttcaggacgaacgctggcggcgtgcttaacacatgcaagtcgaacgatgaaacctagcaatctttggttgttgggtggattagtggcgaacgggtgagtaatacgtgggtaacctgccctcctttttgggataagccttggaaacggggtctaataccgaatattctggatgattcgcatggattgtttgggaaagcttttgtgaagggggatgggctcgcggcctatcagcttgttggtggggtgatggcctaccaaggcggtgacgggtagccggcctgagagggtgaccggccacattgggactgagatacggcccagactcctacgggaggcagcagtgggggatattgcacaatgggcgaaagcctgatgcagcgacgccgcgtgggggatgaaggctttcgggttgtaaacctctttcgctatcgaacaaggctcactatagggtgggttgagggtaggtggagaagaagcgccggctaactacgtgccagcagccgcggtaatacgtagggcgcgagcgttgtccggaattattgggcgtaaagggcttgtaggcggcttgttgcgcctgctgtgaaaacgcggggcttaacttcgcgcgtgcagtgggtacgggcaggcttgagtgtggtaggggtgactggaattccaggtgtagcggtggaatgcgcagatatctggaggaacaccgatggcgaaggcaggtcactgggccattactgacgctgaggagcgaaagcatgggtagcgaacaggattagataccctggtagtccatgctgtaaacgttgggaactaggtgtggggggcctttccaggttttctgcgccgtagctaacgcattaagttccccgcctggggagtacggccgcaaggctaaaactcaaaggaattgacgggggcccgcacaagcggcggagcatgcggattaattcgatgcaacgcgaagaaccttaccaaggcttgacatacaccgcggggctgcagagatgtggttgcatttggttggtggtgtacaggtggtgcatggttgtcgtcagctcgtgtcgtgagatgttgggttaagtcccgcaacgagcgcaacccttgtctcgtgttgccagcatgttgtggtggggactcacgagagactgccggggttaactcggaggaaggtggggatgacgtcaaatcatcatgccccttatgtcttgggcttcacgcatgctacaatggccggtacagagggttgcgatatcgtaaggtggagckaatcccttaaagctggtctcagttcggatcggggtctgcaactcgacctcgtgaagtcggagtcgctagtaatcgcggatcagcattgccgcggtgaatacgttcccgggccttgtacacaccgcccgtcacgtcacgaaagttggtaacacccgtagctcgtggcctaaccattttatgtggggggagcggtcgaaggtggggctggcgattgggacgaagtcgtaa

SEQ ID NO: 51 - DNA, 1283 bp, Actinobaculum sp.
  BM#101342
atggaaacggggtctaatactggatattcctgtctggtcgcatggctgggtggggaaagttttttcggtgggggatgggctcgcggcctatcagcttgttggtggggtgatggcctaccaaggcgtcgacgggtagccggcctgagagggtgaccggccacactgggactgagatacggcccagactcctacgggaggcagcagtgggggatattgcacaatgggcgcaagcctgatgcagcgacgccgcgtgggggatgacggctttcgggttgtaaacctctttcgtcgggggacaaggctctgcttggtggtggggttgagggtacccggtgaagaagcgccggctaactacgtgccagcagccgcggtaatacgtagggcgcgagcgttgtccggaattattgggcgtaaagggctcgtaggcggcttgtcgcgtctgctgtgaaaatgcggggcttaactccgtacgtgcagtgggtacgggcaggctagagtgcggtaggggtgactggaattcctggtgtagcggtggaatgcgcagatatcaggaggaacaccgatggcgaaggcaggtcactgggctgttactgacgctgaggagcgaaagcgtggggagcgaacaggattagataccctggtagtccatgctgtaaacgttgggaactaggtgtggggttctttccacggattctgcgccggagctaacgcattaagttccccgcctggggagtacggccgcaaggctaaaactcaaaggaattgacgggggcccgcacaagcggcggagcatgcggattaattcgatgcaacgcgaagaaccttaccaaggcttgacatacgctgggacggtgcagagatgtgctggcttttgctggtgtacaggtggtgcatggttgtcgtcagctcgtgtcgtgagatgttgggttaagtcccgcaacgagcgcaacccttgtctcgtgttgccagcaggttgggctggggactcacgggagactgccggggttaactcggaggaaggtggggatgacgtcaaatcatcatgccccttatgtcttgggcttcacgcatgctacaatggccggtacagagggttgcgatatcgtgaggtggagcgaatcccttaaagtcggtctcagttcggatcggggtctgcaactcgaccccgtgaagtcggagtcgctagtaatcgcggatcagcaacgccgcggtgaatacgttctcgggccttgtacacaccgcccgtcacgtcacgaaagttggcaacacccgaagctcgtggc

SEQ ID NO: 52 - DNA, 1313 bp, Actinobaculum sp.
  P2P_19 P1
gacgaacgctggcggcgtgcttaacacatgcaagtcgaacgagtggcgaacgggtgagtaatacgtgagtaacctgccctcttctttgggataagccttggaaacggggtctaatactggatattgaaagcggtgggggatgggctcgcggcctatcagcttgttggtggggtgatggcctaccaaggcgtcgacgggtagccggcctgagagggtgaccggccacactgggactgagatacggcccagactcctacgggaggcagcagtgggggatattgcacaatgggcgcaagcctgatgcagcgacgccgcgtgggggatgacggctttcgggttgtaaacctctttcgtcgggggacatgagggtacccggtgaagaagcgccggctaactacgtgccagcagccgcggtaatacgtagggcgcgagcgttgtccggaattattgggcgtaaagggctcgtaggcggcttgtcgcgtctgctgtgaaaatgcggggcttaactccgtacgtgcagtgggtacgggcaggctagagtgcggtaggggtgactggaattcctggtgtagcggtggaatgcgcagatatcaggaggaacaccgatggcgaaggcaggtcactgggctgactgacgctgaggagcgaaagcgtggggagcgaacaggattagataccctggtagtccatgctgtaaacgttgggaactaggtgtggggtattctgcgccggagctaacgcattaagttccccgcctggggagtacggccgcaaggctaaaactcaaagggattgacgggggcccgcacaagcggcggagcatgcggattaattcgatgcaacgcgaagaaccttaccaaggcttgacatatacaggtggtgcatggttgtcgtcagctcgtgtcgtgagatgttgggttaagtcccgcaacgagcgcaacccttgtctcgtgttgccagcagctggggactcacgggagactgccggggttaactcggaggaaggtggggatgacgtcaaatcatcatgccccttatgtcttgggcttcacgcatgctacaatggccggcagagggttgcgatatcgtgaggtggagcgaatccctttcggtctcagttcggacggggtctgcaactcgaccccggaagtcggagtcgctagtaatcgcggatcagcaacgccgcggtgaatacgttctcgggccttgtacacaccgcccgtcacgtcacgaaagttggcaacacccgaagctcgtgcctagggagcggtcgaaggtggggttggcgattgggacgaagtcgtaacaaggta

SEQ ID NO: 53 - DNA, 1526 bp, Actinomyces cardiffensis
gagtttgatcctggctcaggacgaacgctggcggcgtgcttaacacatgcaagtcgaacgatgatgcggtgcgtgcaccgttgattagtggcgaacgggtgagtaacacgtgagtaacctgccctcttctttgggataacggtctgaaagggctgctaatactgaatattcacatgtcttcgcatgggggtgtgtggaaagagatgcttttgggtgtttttggtgggggatgggctcgcggcctatcagcttgttggtggggtagtggcctaccaaggctttgacgggtaaccggcctgagagggtgaccggtcacattgggactgagatacggcccagactcctacgggaggcagcagtggggaattttgcacaatggacgcaagtctgatgcagcgacgccgcgtgagggatgtaggccttcgggttgtgaacctctttcgctcatggtcaagccgcagctttgggttgtggtgagggtagtgggtaaagaagcgccggctaactacgtgccagcagccgcggtaatacgtagggcgcgagcgttgtccggaattattgggcgtaaagggcttgtaggcggttggtcgcgtctgccgtgaaatcctctggcttaactgggggcgtgcggtgggtacgggctggcttgagtgcggtaggggagactggaattcctggtgtagcggtggaatgcgcagatatcaggaggaacaccggtggcgaaggcgggtctctgggccgttactgacgctgaggagcgaaagcgtggggagcgaacaggattagataccctggtagtccacgctgtaaacgttgggcactaggtgtgggggccacccgtggtttctgcgccgtagctaacgctttaagtgccccgcctggggagtacggccgcaaggctaaaactcaaaggaattgacgggggcccgcacaagcggcggagcatgcggattaattcgatgcaacgcgaagaaccttaccaaggcttgacatgcgccctgacgctgcagagatgtggtggcatttggttgggggtgtacaggtggtgcatggttgtcgtcagctcgtgtcgtgagatgttgggttaagtcccgcaacgagcgcaacccttgccctatgttgccagcacgttgtggtggggactcgtgggggactgccggggttaactcggaggaaggtggggatgacgtcaaatcatcatgccccttatgtcttgggcttcacgcatgctacaatggctggtacagagggttgcgatgtcgtaaggcggagcgaatcccttaaagctggtctcagttcggattggggtctgcaactcgaccccatgaaggtggagtcgctagtaatcgcagatcagcaacgctgcggtgaatacgttctcgggccttgtacacaccgcccgtcacgtcacgaaagttggtaacacccgaagctcatggcctaaccggtttgtctggggggagtggtcgaaggtgggattggcgattgggacgaagtcgtaacaaggtagccgtaccggaaggtgc

SEQ ID NO: 54 - DNA, 1410 bp, Actinomyces europaeus
  modified_base (318)..(318): a, c, t, g, unknown or other
  modified_base (325)..(325): a, c, t, g, unknown or other
cctggctcaggacgaacgctggcggcgtgcttaacacatgcaagtcgaacgggatccaaaggctttttgtttttggtgagagtggcgaacgggtgagtaacacgtgagtaacctgcccccttcttttggataaccgcatgaaagtgtggctaatacaggatattccaggctggtcgcatgattggtttgggaaatggtttggtctggtgggggatgggctcgcggcctatcagcttgttggtggggtgatggcctaccaaggcggtgacgggtagccggcctgagagggtgggcggtcacactgggactgagatacgncccagantcctacgggaggcagcagtgggggattttgcacaatgggcgcaagcctgatgcagcgacgccgcgtgagggatgaaggccttcgggttgtaaacctctttcgctgggttgaaaggccatgctttgggtgtggttgatttgaactggtaaagaagtaccggctaactacgtgccagcagccgcggtaatacgtagggtactagcgttgtccggatttattgggcgtaaagggcttgtaggtggtttgtcgcgtctgtcgtgaaatcctgtggcttaaccatgggcttgcggtgggtacgggcaggcttgagtgcggtaggggagactggaattcctggtgtagcggtggaatgcgcagatatcaggaggaacaccggtggcgaaggcgggtctctgggccgttactgacactgaggagcgaaagcgtggggagcgaacaggattagataccctggtagtccatgctgtaaacgttgggcactaggtgtgggggccgtgtggtttctgcgccgtagctaacgcattaagtgtcccgcctggggagtacggccgcaaggctaaaactcaaaggaattgacggggacccgcacaagcggcggagcatgcggattaattcgatgcaacgcgaagaaccttaccaaggcttgacatgcaccggtacagtgtagagatatgctggcctttttggctggtgtgcaggtggtgcatggttgtcgtcagctcgtgtcgtgagatgttgggttaagtcccgcaacgagcgcaacccttgtctcgtgttgccagcatttggttggggactctcgagagactgccggggttaactcggaggaaggtggggatgacgtcaaatcatcatgccccttatgtcttgggcttcacgcatgctacaatggatggtacagagggttgcgatactgtgaggtggagctaatcccttaaagctgttctcagttcggatcgtagtctgcaactcgactacgtgaaggtggagtcgctagtaatcgcagatcagcaacgctgcggtgaatacgttctcgggtcttgtacacaccgcccgtcacgtcacgaaagttggtaacacccgaa

SEQ ID NO: 55 - DNA, 1503 bp, Actinomyces funkei
atcatggctcaggacgaacgctggcggcgtgcttaacacatgcaagtcgaacggactggccttgagcttgcttggggttggtgagtggcgaacgggtgagtaacacgtgagtaacctgccctcttctttgggataacggtcggaaacggctgctaatactggatattcactcattggcgcatgttggtgggtggaaagatgcacttttggtgtttttggtgggggatgggctcgcggcctatcagcttgttggtggggtgatggcctaccaaggctttgacgggtaaccggcctgagagggtgaccggtcacattgggactgagatacggcccagactcctacgggaggcagcagtggggaattttgcacaatgggcgcaagcctgatgcagcgacgccgcgtgagggatggaggccttcgggttgtgaacctctttcgctcatggtcaagccgcgactttgggttgtggtgagggtagtgggtaaagaagcgccggctaactacgtgccagcagccgcggtaatacgtagggcgcgagcgttgtccggaattattgggcgtaaagggcttgtaggcggttggtcgcgtctgccgtgaaatcctctggcttaactgggggcgtgcggtgggtacgggtcgacttgagtgcggtaggggagactggaattcctggtgtagcggtggaatgcgcagatatcaggaggaacaccggtggcgaaggcgggtctctgggccgttactgacgctgaggagcgaaagcgtggggagcgaacaggattagataccctggtagtccacgctgtaaacgttgggcactaggtgtgggggccacccgtggtttctgcgccgtagctaacgctttaagtgccccgcctggggagtacggccgcaaggctaaaactcaaaggaattgacgggggcccgcacaagcggcggagcatgcggattaattcgatgcaacgcgaagaaccttaccaaggcttgacatgcatcctgagccttcagagatggaggtgcatttggttgggggtgtgcaggtggtgcatggttgtcgtcagctcgtgtcgtgagatgttgggttaagtcccgcaacgagcgcaacccttgccctatgttgccagcacgttgtggtggggactcgtgggggactgccggggttaactcggaggaaggtggggatgacgtcaaatcatcatgccccttatgtcttgggcttcacgcatgctacaatggctggtacagagggttgcgatgctgtgaggcggagcgaatcccttaaagccggtctcagttcggattggggtctgcaactcgaccccatgaaggtggagtcgctagtaatcgcagatcagcaacgctgcggtgaatacgttctcgggccttgtacacaccgcccgtcacgtcacgaaagttggtaacacccgaagctcatggcctaaccgcctttttggtggggggagtggtcgaaggtgggattggcgattgggacgaagtcgtaacaa

SEQ ID NO: 56 - DNA, 1326 bp, Actinomyces sp.
  C1
gacgaacgctggcggcgtgcttaacacatgcaagtcgaacgagtggcgaacgggtgagtatcacgtgagtaacctgcccttcggtcctggataaccgcttgaaagggcggctaatacggggtggtgatagtcggcgggggatgggctcgcggcctatcagcttgttggtggggtgatggcctaccaaggcggtgacgggtagccggcctgagagggtgggcggccacactgggactgagatacggcccagactcctgcgggaggcagcagtggggggtattgcacaatgggcggaagcctgatgcagcgacgtcgcgtgagggatggaggccttcgggttgtgaacctctgtttccggtggtgatgacggtagccggggatgaagcgccggctaactacgtgccagcagccgcggtaatacgtagggcgcgagcgttgtccggaattattgggcgtaaagggcttgtaggcggctggtcgcgtctgccgtgaaattctccggctcaaccgggggcttgcggtgggtacgggccagctggagtgcggtaggggaggctggaactcctggtgtagcggtggaatgcgcagatatcaggaggaacaccggtggcgaaggcgggtctctgggccgactgacgctgaggagcgaaagcgtggggagcgaacaggattagataccctggtagtccacgccgtaaacgttgggcactaggtgtgggccggtccgcgccgcagctaacgcattaagtgccccgcctggggagtacggccgcaaggctaaaactcaaaggaattgacgggggcccgcacaagcgacggagcatgcggattaattcgatgcaacgcgaagaaccttaccagggcttgacatgtgcaggtggtgcatggttgtcgtcagctcgtgtcgtgagatgttgggttaagtcccgcaacgagcgcaacccctgtcccgtgttgccagcgcgcggggactctcgggagactgccggggtcaactcggaggagggtggggacgacgtcaaatcatcatgcccctgacgtcctgggcttcacgcatgctacaatggccggcagagggttgcgatgccgtgaggcggggcgaatcccttccggtctcagttcggacggtgtctgcaactcgacaccggaagtcggagtcgctagtaatcgcagatcagcattgctgcggtgaatacgttctcgggccttgtacacaccgcccgtcacgtcatgaaagtcggtgacgcccgaagcccgtgcgagcggtcgaaggcggggccggtgattgggacgaagtcgtaacaaggtagccgtaccggaaggtgc

SEQ ID NO: 57 - DNA, 1331 bp, Actinomyces sp.
  C2
gacgaacgctggcggcgtgcttaacacatgyaagtcgaacgagtggcgaacgggtgagtaacacgtgagtaacctgcccccttctttgggataacgcccggaaacgggtgctaatactggatattgaaagctggtgggggatgggctcgcggcctatcagcttgttggtggggtgatggcctaccaaggctttgacgggtagccggcctgagagggtgaccggtcacattgggactgagatacggcccagactcctacgggaggcagcagtggggaatattgcacaatgggcgcaagcctgatgcagcgacgccgcgtgagggatggaggccttcgggttgtgaacctctttcgctcatggtcatgagggtagtgggtaaagaagcgccggctaactacgtgccagcagccgcggtaatacgtagggcgcgagcgttgtccggaattattgggcgtaaagggcttgtaggcggttggtcgcgtctgccgtgaaatcctctggcttaactgggggcgtgcggtgggtacgggctgacttgagtgcggtaggggagactggaactcctggtgtagcggtggaatgcgcagatatcaggaagaacaccggtggcgaaggcgggtctctgggccgactgacgctgaggagcgaaagcgtggggagcgaacaggattagataccctggtagtccacgctgtaaacgttgggcactaggtgtgggggtttctgcgccgtagctaacgctttaagtgccccgcctggggagtacggccgcaaggctaaaactcaaaggaattgacgggggcccgcacaagcggcggagcatgcggattaattcgatgcaacgcgaagaaccttaccaaggcttgacatgtgcaggtggtgcatggttgtcgtcagctcgtgtcgtgagatgttgggttaagtcccgcaacgagcgcaacccttgccctatgttgccagcacgtggggactcgtgggggactgccggggttaactcggaggaaggtggggatgacgtcaaatcatcatgccccttatgtcttgggcttcacgcatgctacaatggttggcagagggttgcgatactgtgaggtggagcgaatcccttccagtctcagttcggatggggtctgcaactcgaccccagaaggtggagtcgctagtaatcgcagatcagcaacgctgcggtgaatacgttctcgggccttgtacacaccgcccgtcacgtcacgaaagttggtaacacccgaagcccatgcctagggagtggtcgaaggtgggattggcgattgggacgaagtcgtaacaaggtagccgtaccggaaggtgc

SEQ ID NO: 58 - DNA, 1290 bp, Actinomyces sp.
  P1 oral clone MB6_C03
gacgaacgctggcggcgtgcttaacacatgcaagtcgaacgagtggcgaacgggtgagtatcacgtgagtaacctgccctcctctcctggataaccgcttgagagggcggctaatacggggtggtgatagtcggtgggggatgggctcgcggcctatcagcttgttggtggggtgatggcccaccaaggcggtgacgggtagccggcctgagagggtgggcggccacactgggactgagacacggcccagactcctgcgggaggcagcagtggggggtattgcacaatgggcggaagcctgatgcagcgacgtcgcgtgagggatggaggccttcgggttgtgaacctctgttcccggtggtgatgacggtagccgggtatgaagcgccggctaactacgtgccagcagccgcggtaatacgtagggcccaagcgttgtccggaattattgggcgtaaagggcttgtaggcggccggccgcgtccgtcgtgaaatcctccggctcaaccgggggcttgcggtgggtacgggtcggctggagtgcggcaggggaggctggaactcctggtgtagcggtggaatgcgcagatatcaggaggaacaccggtggcgaaggcgggtctctgggccgactgacgctgaggagcgaaagcgtggggagcgaacaggattagataccctggtagtccacgccgtaaacgttgggcactaggtgtggggcgctccgcgccgtagctaacgcattaagtgccccgcctggggagtacggccgcaaggctaaaactcaaaggaattgacgggggcccgcacaagcggcggagcatgcggattaattcgatgcaacgcgaagaaccttaccagggcttgacatgcgcaggtggtgcatggttgtcgtcagctcgtgtcgtgagatgttgggttaagtcccgcaacgagcgcaacccctgtcccgtgttgccagcgcgcggggactctcgggagactgccggggtcaactcggaggagggtggggacgacgtcaaatcatcatgcccctgacgtcctgggcttcacgcatgctacaatggccggcagagggttgcgatgccgcgaggcggggcgaatcccttccggtctcagttcggacggtgtctgcaactcgacaccggaagtcggagtcgccagtaatcgcagatcagcactgctgcggtgaatacgttctcgggccttgtacacaccgcccgtcacgtcatgaaagtcggcgacgcccgaagcccgtgcgagcggtcgaaggcggggccggtgattggg

SEQ ID NO: 59 - DNA, 1427 bp, Actinomyces georgiae
acacatgcagtcgaacgctgaagcctggctttgtgttgggtggatgagtggcgaacgggtgagtaacacgtgagtaacctgccctcttcttcgggataacggtctgaaagggctgctaataccgggtattcactggtcctcgcatgggggttggtggaaaggttttttctggtgggggatgggctcgcggcctatcagcttgttggtggggtgatggcctaccaaggctttgacgggtagccggcctgagagggtgaccggtcacattgggactgagatacggcccagactcctacgggaggcagcagtggggaatattgcacaatgggcggaagcctgatgcagcgacgccgcgtgagggatggaggccttcgggttgtgaacctctttcgcccgtggtcaagccgcaactgtgggttgtggtgagggtagtgggtaaagaagcgccggctaactacgtgccagcagccgcggtaatacgtagggcgcgagcgttgtccgggaattattgggcgtaaagggcttgtaggcggctggtcgcgtctgccgtgaaatcctctggctcaactgggggcgtgcggtgggtacgggctggcttgagtgcggtaggggaggctggaactcctggtgtagcggtggaatgcgcagatatcaggaagaacaccggtggcgaaggcgggtctctgggccgttactgacgctgaggagcgaaagcgtggggagcgaacaggattagataccctggtagtccacgctgtaaacgttgggcactaggtgtgggggccacccgtggtttccgcgccgtagctaacgctttaagtgccccgcctggggagtacggccgcaaggctaaaactcaaaggaattgacgggggcccgcacaagcggcggagcatgcggattaattcgatgcaacgcgaagaaccttaccaaggcttgacatgcgccccgggcgcgcggagacgcgcgcgcatttggttgggggtgtgcaggtggtgcatggttgtcgtcagctcgtgtcgtgagatgttgggttaagtcccgcaacgagcgcaacccttgccctatgttgccagcgcgttatggcggggactcgtgggggactgccggggttaactcggaggaaggtggggatgacgtcaaatcatcatgccccttatgtcttgggcttcacgcatgctacaatggctggtacagagggttgcgatgccgtgaggcggggcgaatcccttaaagccggtctcagttcggattggggtctgcaactcgaccccatgaaggtggagtcgctagtaatcgcagatcagcaacgctgcggtgaatacgttctcgggccttgtacacaccgcccgtcacgtcacgaaagttggtaacgcccgaagcccatggcccaaccggctcttgctggggggagtggtcgaaggtgg

SEQ ID NO: 60 - DNA, 1446 bp, Actinomyces israelii
cgtgcttaacacatgcaagtcgaacgggtctgccttgttttttgcggggtgggtcagtggcgaacgggtgagtaacacgtgagtaacctgcccctcacttctggataaccgcttgaaagggtggctaatacggggtgttctggctgtgccgcatggtgtggctgggaaagattcacttttgtggtgttttggtgggggatgggctcgcggcctatcagcttgttggtggggtgatggcctgccaaggctttgacgggtagccggcctgagagggtgggcggtcacactgggactgagatacggcccagactcctgcgggaggcagcagtggggggtattgcacaatgggcggaagcctgatgcagcgacgtcgcgtgagggatggaggccttcgggttgtgaacctctttcgccggtgaagaaggtcctgttctttgtggtggggctgacggtagccgggttatgaagcgccggctaactacgtgccagcagccgcggtaatacgtagggcgcgagcgttgtccggaattattgggcgtaaagggcttgtaggcggctggtcgcgtctgccgtgaaatcctctggctcagctgggggcgtgcggtgggtacgggctggcttgagtgcggtaggggaggctggaactcctggtgtagcggtggaatgcgcagatatcaggaggaacaccggtggcgaaggcgggtctctgggccgttactgacgctgaggagcgaaagcgtggggagcgaacaggattagataccctggtagtccatgctgtaaacgttgggcactaggtgtggggggtctttccgggtcctccgcgccgtagctaacgctttaagtgccccgcctggggagtacggccgcaaggctaaaactcaaaggaattgacgggggcccgcacaagcggcggagcatgcggattaattcgatgcaacgcgaagaaccttaccagggcttgacatgggccggctgctcctggagacgggggcctcccttttttgggccggttcacaggtggtgcatggttgtcgtcagctcgtgtcgtgagatgttgggttaagtcccgcaacgagcgcaacccctgtcccgtgttgccagcgtgttgtggcggggactcgcgggagactgccggggttaactcggaggagggtggggacgacgtcaaatcatcatgccccttatgtcctgggcttcacgcatgctacaatggccggtacagtgggttgcgatgtcgtgaggcggagcgaatcccttaaagccggtctcagttcggatcggtgtctgcaactcgacaccgtgaagctggagtcgctagtaatcgcagatcagcagtgctgcggtgaatacgttctcgggccttgtacacaccgcccgtcacgtcatgaaagccggcgacacccgaagcccgtggccctgtggggagcggtcgaaggtggggct

SEQ ID NO: 61 - DNA, 1520 bp, Actinomyces massiliensis
agagtttgatcctggctcaggacgaacgctggcggcgtgcttaacacatgcaagtcgaacgggccttgtccccttttttttgggggtggggttagtggcgaacgggtgagtaacacgtgagtaacctgcccctcacttctggataaccgcttgaaagggtggctaatacggggtgttctggcctgctcgcatgggtgggtttggaaagattcgaccggttttggttgttttggtgggggatgggctcgcggcctatcagcttgttggtggggtgatggcctgccaaggctttgacgggtagccggcctgagagggtgggcggtcacactgggactgagacacggcccagactcctacgggaggcagcagtggggaatattgcacaatgggcgcaagcctgatgcagcgacgccgcgtgagggatggaggccttcgggttgtgaacctctttcgccagtgaagaaggtcctgctctttgtggtggggttgacggtagctgggttaatgaagcgccggctaactacgtgccagcagccgcggtaatacgtagggcgcgagcgttgtccggaattattgggcgtaaagggcttgtaggcggctggtcgcgtctgccgtgaaatcctctggctcagctgggggcgtgcggtgggtacgggctggcttgagtgcggtaggggagactggaactcctggtgtagcggtggaatgcgcagatatcaggaggaacaccggtggcgaaggcgggtctctgggccgttactgacgctgaggagcgaaagcgtggggagcgaacaggattagataccctggtagtccacgctgtaaacgttgggcactaggtgtggggggccttttccgggttttccgcgccgtagctaacgcattaagtgccccgcctggggagtacggccgcaaggctaaaactcaaaggaattgacgggggcccgcacaagcggcggagcatgcggattaattcgatgcaacgcgaagaaccttaccaaggcttgacatgggctggattgcttcggagacggggtttcccttttttgggctggttcacaggtggtgcatggttgtcgtcagctcgtgtcgtgagatgttgggttaagtcccgcaacgagcgcaacccttgtctcgtgttgccagcacgttgtggtggggactcgcgggagactgccggggttaactcggaggaaggtggggatgacgtcaaatcatcatgccccttatgtcttgggcttcacgcatgctacaatggccggtacagtgggttgcgatgctgtgaggcggagcgaatccctgaaagccggtctcagttcggatcggtgtctgcaactcgacaccgtgaagttggagtcgctagtaatcgcagatcagcagcgctgcggtgaatacgttctcgggccttgtacacaccgcccgtcacgtcatgaaagctggcaacacccgaagcccgtggccttatggggagcggtcgaaggtggggctggtgattgggacgaagtcgtaacaaggtaacc

SEQ ID NO: 62 - DNA, 1411 bp, Actinomyces meyeri
attgccaagttcgaaacgctgaagcctagcttgctgggtggatgagtggcgaacgggtgagtaacacgtgagtaacctgccctcttctttgggataacgcccggaaatgggtgctaatactggatattcactggtcttcgcatgggggttggtggaaagggtttttctggtgggggatgggctcgcggcctatcagcttgttggtggggtgatggcctaccaaggctttgacgggtagccggcctgagagggtgaccggtcacattgggactgagatacggcccagactcctacgggaggcagcagtggggaatattgcacaatgggcgcaagcctgatgcagcgacgccgcgtgagggatggaggccttcgggttgtgaacctctttcgctcatggtcaagccgcaactgtgggttgtggtgagggtagtgggtaaagaagcgccggctaactacgtgccagcagccgcggtatacgtaggcgcgagcgttgtccgaattattgggcgtaaagggcttgtaggcggttggtcgcgtctgtcgtgaaatcctctggcttaactgggggcgtgcggtgggtacgggctggcttgagtgcggtaggagagactggaactcctggtgtagcggtggaatgcgcagatatcaggaagaacaccggtggcgaaggcgggtctctgggccgttactgacgctgaggagcgaaagcgtggggagcgaacaggattagataccctggtagtccacgctgtaaacgttgggcactaggtgtgggggccacccgtggtttctgcgccgtagctaacgctttaagtgccccgcctggggagtacggccgcaaggctaaaactcaaaggaattgacgggggcccgcacaagcggcggagcatgcggattaattcgatgcaacgcgaagaaccttaccaaggcttgacatgcgccctgggcgtgcggagacgtgcgtgcatttggttgggggtgtgcaggtggtgcatggttgtcgtcagctcgtgtcgtgagatgttgggttaagtcccgcaacgagcgcaacccttgccctatgttgccagcacgttgtggtggggactcgtgggggactgccggggttaactcggaggaaggtggggatgacgtcaaatcatcatgccccttatgtcttgggcttcacgcatgctacaatggttggtacagagggttgcgatatcgtgaggtggagcgaatcccttaaagccagtctcagttcggattggggtctgcaactcgaccccatgaaggtggagtcgctagtaatcgcagatcagcaacgctgcggtgaatacgttctcgggccttgtacacaccgcccgtcacgtcacgaaagttggtaacacccgaagcccatggcctaaccggtttttgctggggggggaag

SEQ ID NO: 63 - DNA, 1450 bp, Actinomyces naeslundii
tcctgactcaggacgaacgctgccggcgtacataacacatgcaagtcgaacggtgaaggggcctgcttttgtgggtcctggatgagtggcgaacgggtgagtaacacgtgagtaacctgcccccttcttctggataaccgcatgaaagtgtggctaatacgggatattctgggtctgtcgcatggtgggcctgggaaagattgcgccttttttggtgtttttggtgggggatgggctcgcggcctatcagcttgttggtggggtgatggcctgccaaggcggtgacgggtagccggcctgagagggtggacggtcacactgggactgagacacggcccagactcctacgggaggcagcagtggggaatattgcacaatgggcgcaagcctgatgcagcgacgccgcgtgagggatggaggccttcgggttgtgaacctctttcgccagtgaagcaggcctgcctcgtttgtgggtgggttgacggtagctggataagaagcgccggctaactacgtgccagcagccgcggtaatacgtagggcgcgagcgttgtccggaattattgggcgtaaagagctcgtaggcggctggtcgcgtctgtcgtgaaatcctctggcttaactgggggcttgcggtgggtacgggccggcttgagtgcggtaggggagactggaactcctggtgtagcggtggaatgcgcagatatcaggaagaacaccggtggcgaaggcgggtctctgggccgttactgacgctgaggagcgaaagcgtggggagcgaacaggattagataccctggtagtccacgccgtaaacgttgggcactaggtgtggggggccttttccgggtcttccgcgccgtagctaacgcattaagtgccccgcctggggagtacggccgcaaggctaaaactcaaaggaattgacgggggcccgcacaagcggcggagcatgcggattaattcgatgcaacgcgaagaaccttaccaaggcttgacatgtgccggtctgctccggagacggggtttcctcctttgtgggggctggttcacaggtggtgcatggttgtcgtcagctcgtgtcgtgagatgttgggttaagtcccgcaacgagcgcaacccttgtctcgtgttgccagcacgttgtggtggggactcgcgggagactgccggggtcaactcggaggaaggtggggatgacgtcaaatcatcatgccccttatgtcttgggcttcacgcatgctacaatggccggtacagagggctgcgataccgtgaggtggagcgaatcccttaaagccggtctcagttcggatcggtgtctgcaactcgacaccgtgaagttggagtcgctagtaatcgcagatcagcaacgctgcggtgaatacgttctcgggccttgtacacaccgcccgtcacgtcatgaaagtcggcaacacccgaagcccgt

SEQ ID NO: 64 - DNA, 1328 bp, Actinomyces nasicola
gacgaacgctggcggcgtgcttaacacatgcaagtcgaacgagtggcgaacgggtgagtaacacgtgagtaacctgcccccttctttgggataactgccggaaacggtggctaatactggatattgaaagctggtgggggatgggctcgcggcctatcagcttgttggtggggtgatggcctaccaaggctttgacgggtagccggcctgagagggtgaccggccacactgggactgagacacggcccagactcctacgggaggcagcagtggggaatattgcacaatgggggaaaccctgatgcagcgacgccgcgtgagggatgacggccttcgggttgtaaacctctttcagtagggaagaagacggtacctgcagaagaagcgccggctaactacgtgccagcagccgcggtaatacgtagggcgcaagcgttgtccggaattattgggcgtaaagagctcgtaggcggcttgtcgcgtctgtcgtgaaaacctgcagcttaactgtgggcttgcggtgggtacgggctggcttgagtgcagtaggggagactggaattcctggtgtagcggtggaatgcgcagatatcaggaggaacaccggtggcgaaggcgggtctctgggctgactgacgctgaggagcgaaagcatggggagcgaacaggattagataccctggtagtccatgccgtaaacgttgggcactaggtgtggggatttctgtgccgtagctaacgcattaagtgccccgcctggggagtacggccgcaaggctaaaactcaaaggaattgacgggggcccgcacaagcggcggagcatgcggattaattcgatgcaacgcgaagaaccttaccaaggcttgacatatacaggtggtgcatggttgtcgtcagctcgtgtcgtgagatgttgggttaagtcccgcaacgagcgcaacccttgtctcatgttgccagcacgtggggactcatgagagactgccggggttaactcggaggaaggtggggatgacgtcaaatcatcatgccccttatgtcttgggcttcacgcatgctacaatggccggcagtgggttgcgatctcgtgagggggagctaatccttgccggtctcagttcggatggggtctgcaactcgaccccagaagtcggagtcgctagtaatcgcagatcagcaacgctgcggtgaatacgttctcgggccttgtacacaccgcccgtcacgtcacgaaagttggtaacacccgaagctcatgcctagggagtggtcgaaggtgggactggcgattgggacgaagtcgtaacaaggtagccgtaccggaagg

SEQ ID NO: 65 - DNA, 1489 bp, Actinomyces neuii
  modified_base (159)..(159): a, c, t, g, unknown or other
cgaacgctggcggcgtgcttaacacatgcaagtcgaacgggatccattagcgcttttgtgtttttggtgagagtggcgaacgggtgagtaacacgtgagtaacctgcccttttctttgggataagcctgggaaactgggtctaatactggatgttccgncttcctcgcatggggttgttgggaaaggttttttctggattgggatgggctcgcggcttatcagcttgttggtggggtgatggcttaccaaggctttgacgggtagccggcctgagagggtggtcggtcacactgggactgagatacggcccagactcctacgggaggcagcagtgggggatattgcacaatggacggaagtctgatgcaccgacgtcgtgtgggggatgaaggccttcgggttgtaaactcctttcgcccgcggaaaaggcagggttttggccttgttgatggtagtgggtaaagaagcgccggctcactacgtgccagcagccgcggtaatacgtagggcgcgagcgttgtccggaattattgggcgtaaagggctcgtaggcggtttgtcgcgtctagcgtttaaggctcgggcttaacccgggtttgcgttgggtacgggcaggcttgagtgcggtaggggtaactggaattcctggtgtagcggtggaatgcgcagatatcaggaggaacaccggtggcgaaggcgggttactgggccgttactgacgctgaggagcgagagcgtggggagcgaacaggattagataccctggtagtccatgctgtaaacgttgggcactaggtgtgggggctggtttcatggttccgcgccgtagctaacgcattaagtgccccgcctggggagtacggccgcaaggctaaaactcaaaggaattgacgggggcccgcacaagcggcggagcatgcggattaattcgatgcaacgcgaagaaccttaccaaggcttgacatgcaccgcgagactgcagagatgtggttgccttcggggtggtgtgcaggtggtgcatggttgtcgtcagctcgtgtcgtgagatgttggttaagtcccgcaacgagcgcaacccttgtctcatgttgccagcacgttatggtggggactcgtgagagactgccggggttaactcggaggaaggtggggatgacgtcaaatcatgatgccccatatgtcttgggcttcacgcatgctacagtggtgtctacagagggttgctattccgtgaggttgagcgaatctcttaaagggcatcttggttcggatcgcagtctgcaactcgactgcgtgaaggtggagtcgctagtaatcgcagatgagcattgctgcggtgaatacgttctcgggccttgtacacaccgcccgtcacgtcacgaaagttggtaacacccgaagcctgtggcctaacctttttggggggagtggtcgaaggtggggctagcgattgggacgaagtcgtaacaaggtagccgtaccggaagg

SEQ ID NO: 66 - DNA, 1548 bp, Actinomyces odontolyticus
tttgttcggagagtttgatcctggctcaggacgaacgctggcggcgtgcttaacacatgcaagtcgaacgctgaagcctagcttgctgggtggatgagtggcgaacgggtgagtaacacgtgagtaacctgcccccttctttgggataacgcccggaaacgggtgctaatactggatattcactggtcttcgcatgggggttggtggaaaggtttgttctggtgggggatgggctcgcggcctatcagcttgttggtggggtgatggcctaccaaggctttgacgggtagccggcctgagagggtgaccggtcacattgggactgagatacggcccagactcctacgggaggcagcagtggggaatattgcacaatgggcgaaagcctgatgcagcgacgccgcgtgagggatggaggccttcgggttgtaaacctctttcgctcatggtcaagccgcaacattggttgtggtgagggtagtgggtaaagaagcgccggctaactacgtgccagcagccgcggtaatacgtagggcgcgagcgttgtccggaattattgggcgtaaagggcttgtaggcggttggtcgcgtctgccgtgaaatcctctggcttaactgggggcgtgcggtgggtacgggctgacttgagtgcggtaggggagactggaactcctggtgtagcggtggaatgcgcagatatcaggaagaacaccggtggcgaaggcgggtctctgggccgttactgacgctgaggagcgaaagcgtggggagcgaacaggattagataccctggtagtccacgctgtaaacgttgggcactaggtgtgggggccacccgtggtttctgcgccgtagctaacgctttaagtgccccgcctggggagtacggccgcaaggctaaaactcaaaggaattgacgggggcccgcacaagcggcggagcatgcggattaattcgatgcaacgcgaagaaccttaccaaggcttgacatgcacggcggcactgcagagatgtggtggcatttagttggtcgtgtgcaggtggtgcatggttgtcgtcagctcgtgtcgtgagatgttgggttaagtcccgcaacgagcgcaacccttgccctatgttgccagcacgtgatggtggggactcgtgggggactgccggggttaactcggaggaaggtggggatgacgtcaaatcatcatgccccttatgtcttgggcttcacgcatgctacaatggttggtacagagggttgcgaaatcgtgaggtggagcgaatcccttaaagccagtctcagttcggattggggtctgcaactcgaccccatgaaggtggagtcgctagtaatcgcagatcagcaacgctgcggtgaatacgttctcgggccttgtacacaccgcccgtcacgtcacgaaagttggtaacacccgaagcccatggcctaaccgctttgtgtggggggagtggtcgaaggtgggattggcgattgggacgaagtcgtaacaaggtagccgtaccggaaggtgcggctggatcacctcctttctaggg

SEQ ID NO: 67 - DNA, 1508 bp, Actinomyces oricola
  modified_base (32)..(32): a, c, t, g, unknown or other
gacgaacgctggcggcgtgcttaacacatgcnagtcgaacgggccggccccttgttttttggggggttggttgagtggcgaacgggtgagtaacacgtgagtaacctgccctcttcttctggataaccgcatgaaagtgtggctaatacgggatattctggtctgcctgcatgggtgggttgggaaagattcactttggtgttttggtgggggatgggctcgcggcctatcagcttgttggtggggtgatggcctaccaaggcggtgacgggtagccggcctgagagggtgggcggtcacactgggactgagatacggcccagactcctacgggaggcagcagtgggggatattgcacaatgggcggaagcctgatgcagcgacgtcgcgtgagggatggaggccttcgggttgtgaacctctttcgccagtgaagtaggtctgctcctgtgtgggtgggttgacggtagctgggtttttaagaagcgccggctaactacgtgccagcagccgcggtgatacgtagggcgcgagcgttgtccggaattattgggcgtaaagggcttgtaggcggctggtcgcgtctgccgtgaaatcctctggcttaactgggggtgtgcggtgggtacgggtcggcttgagtgcggtaggggaggctggaactcctggtgtagcggtggaatgcgcagatatcaggaagaacaccggtggcgaaggcgggtctctgggccgttactgacgctgaggagcgaaagcgtggggagcgaacaggattagataccctggtagtccatgctgtaaacgttgggcactaggtgtggggggcctttccgggttttccgcgccgtagctaacgctttaagtgccccgcctggggagtacggccgcaaggctaaaactcaaaggaattgacgggggcccgcacaagcggcggagcatgcggattaattcgatgcaacgcgaagaaccttaccaaggcttgacatgggctggtttggtctggagacaggccgtccctttttttggggctggttcacaggtggtgcatggttgtcgtcagctcgtgtcgtgagatgttgggttaagtcccgcaacgagcgcaacccttgtctcgtgttgccagcatgttgtggtggggactcgcgggagactgccggggttaactcggaggaaggtggggatgacgtcaaatcatcatgccccttatgtcttgggcttcacgcatgctacaatggccggtacagtgggttgcgatgtcgtgaggcggagcgaatcccttaaagccggtctcagttcggatcggtgtctgcaactcgacaccgtgaagttggagtcgctagtaatcgcagatcagcaacgctgcggtgaatacgttctcgggccttgtacacaccgcccgtcacgtcatgaaagtcggcaacacccgaagcccgtggccttatggggagcggtcgaaggtggggctggtgattgggacgaagtcgtaacaaggtagccgtaccggaagg

SEQ ID NO: 68 - DNA, 1517 bp, Actinomyces orihominis
tcaggacgaacgctggcggcgtgcttaacacatgcaagtcgaacgggcccgcccctgtttttgggggtgggttgagtggcgaacgggtgagtatcacgtgagtaacctgccccctgctcctggataactgcttgaaagggcggctaatacggggtgtgccggctggtccgcatgggcctggtcgggatagtttcatcttcgggtgtttcggtgggggatgggctcgcggcctatcagcttgttggtggggtgatggcccaccaaggcggtgacgggtagccggcctgagagggtgggcggccacactgggactgagacacggcccagactcctgcgggaggcagcagtggggggtattgcacaatgggcggaagcctgatgcagcgacgtcgcgtgagggatggaggccttcgggttgtgaacctctttctccggtggtgaaggccctgtccgttgcggcggggttgacggtagccgggtatgaagcgccggctaactacgtgccagcagccgcggtaatacgtagggcgcgagcgttgtccggaattattgggcgtgaagggcttgtaggcggccggtcgcgtccgccgtgaaattctccggctcaaccgggggcttgcggtgggtacgggccggctggagtgcggtaggggaggctggaactcctggtgtagcggtggaatgcgcagatatcaggaggaacaccggtggcgaaggcgggtctctgggccgttactgacgctgaggagcgaaagcgtggggagcgaacaggattagataccctggtagtccacgccgtaaacgttgggcactaggtgtggggccccgctcggcgggggtccgcgccgcagctaacgcattaagtgccccgcctggggagtacggccgcaaggctaaaactcaaaggaattgacgggggcccgcacaagcggcggagcatgcggattaattcgatgcaacgcgaagaaccttaccagggcttgacatgggggcggcggcgccggagacggcgcctccctttttcgggcgcccccgcaggtggtgcatggttgtcgtcagctcgtgtcgtgagatgttgggttaagtcccgcaacgagcgcaacccctgtcccgtgttgccagcgcgtcgtggcggggactctcgggagactgccggggtcaactcggaggagggtggggacgacgtcaaatcatcatgcccctgacgtcctgggcttcacgcatgctacaatggccggtacagagggttgcgatgccgtgaggcggggcgaatcccttaaagccggtctcagttcggatcggtgtctgcaactcgacaccgtgaagtcggagtcgctagtaatcgcagatcagcattgctgcggtgaatacgttctcgggccttgtacacaccgcccgtcacgtcatgaaagtcggcgacgcccgaagcccgtggccccatggggagcggtcgaaggcggggccggtgattgggacgaagtcgtaacaaggtagccgtaccggaaggtgcggctgga

SEQ ID NO: 69 - DNA, 1535 bp, Actinomyces oris
agagtttgatcctggctcaggacgaacgctggcggcgtgcttaacacatgcaagtcgaacggtgaagggatcagcttgctggttctggatgagtggcgaacgggtgagtaacacgtgagtaacctgcccccttcttctggataaccgcatgaaagtgtggctaatacgggatattctgggtctgtcgcatgacgggtctgggaaagatgcgcctttgggtgtttttggtgggggatgggctcgcggcctatcagcttgttggtggggtgatggcctaccaaggcggtgacgggtagccggcctgagagggtggacggtcacactgggactgagacacggcccagactcctacgggaggcagcagtggggaatattgcacaatgggcgcaagcctgatgcagcgacgccgcgtgagggatggaggccttcgggttgtgaacctctttcgccagtgaagcaggcccgcctcttttgtgggtgggttgacggtagctggataagaagcgccggctaactacgtgccagcagccgcggtaatacgtagggcgcgagcgttgtccggaattattgggcgtaaagagctcgtaggcggctggtcgcgtctgtcgtgaaatcctctggcttaactgggggcttgcggtgggtacgggccggcttgagtgcggtaggggagactggaactcctggtgtagcggtggaatgcgcagatatcaggaagaacaccggtggcgaaggcgggtctctgggccgttactgacgctgaggagcgaaagcgtggggagcgaacaggattagataccctggtagtccacgccgtaaacgttgggcactaggtgtgggggggccttttccgggtcttccgcgccgtagctaacgcattaagtgccccgcctggggagtacggccgcaaggctaaaactcaaaggaattgacgggggcccgcacaagcggcggagcatgcggattaattcgatgcaacgcgaagaaccttaccaaggcttgacatgtgccggtcggctccggagacggggtttcctccttgtggggccggttcacaggtggtgcatggttgtcgtcagctcgtgtcgtgagatgttgggttaagtcccgcaacgagcgcaacccttgtcccgtgttgccagcacgttgtggtggggactcgcgggagactgccggggtcaactcggaggaaggtggggatgacgtcaaatcatcatgccccttatgtcttgggcttcacgcatgctacaatggccggtacagagggctgcgataccgtgaggtggagcgaatcccttaaagccggtctcagttcggatcggtgtctgcaactcgacaccgtgaagttggagtcgctagtaatcgcagatcagcaacgctgcggtgaatacgttctcgggccttgtacacaccgcccgtcacgtcatgaaagtcggcaacacccgaagcccgtggccctacggggagcggtcgaaggtggggctggtgattgggacgaagtcgtaacaaggtagccgtaccggaaggtgcggctg

SEQ ID NO: 70 - DNA, 1464 bp, Actinomyces sp.
  7400942
gacgaacgctggcggcgtgcttaacacatgcaagtcgaacggtgaagctcctggcttttgttgggggtggatgagtggcgaacgggtgagtaacacgtgagtaacctgcccctttcttctggataccgccacgaaagtggtgttaatacgggatattctggcyctgtcgcatggkggggttgggaaaggtcttttctggtgggggatgggctcgcggcctatcagcttgttggtggggtgatggcctaccaaggcgttgacgggtagccggcctgagagggtggacggccacactgggactgagacacggcccagactcctacgggaggcagcagtggggaatattgcacaatgggcggaagcctgatgcagcgacgccgcgtgagggatggaggccttcgggttgtgaacctctttcgccagtgaagcaggcccgctccttgtgggtgggttgacggtagctggataagaagcgccggctaactacgtgccagcagccgcggtaatacgtagggcgcgagcgttgtccggaattattgggcgtaaagggcttgtaggcggctggtcgcgtctgccgtgaaatcccctggcttaactgggggcgtgcggtgggtacgggccggcttgagtgcggtaggggagactggaattcctggtgtagcggtggaatgcgcagatatcaggaggaacaccggtggcgaaggcgggtctctgggccgttactgacgctgaggagcgaaagcgtggggagcgaacaggattagataccctggtagtccacgccgtaaacgttgggcactaggtgtggggggcctttccgggtcctccgcgccgcagctaacgcattaagtgccccgcctggggagtacggccgcaaggctaaaactcaaaggaattgacgggggcccgcacaagcggcggagcatgcggattaattcgatgcaacgcgaagaaccttaccaaggcttgacatgtcggcgattcccgcggagacgcggtctccccctcgtggggcgccgtcacaggtggtgcatggttgtcgtcagctcgtgtcgtgagatgttgggttaagtcccgcaacgagcgcaacccctgtcccgtgttgccagcacgtcgtggtggggactcgcgggagactgccggggtcaactcggaggagggtggggatgacgtcaaatcatcatgccccttatgtcttgggcttcacgcatgctacaatggccggtacagagggttgcgatgccgcgaggcggggcgaatcccttaaagccggtctcagttcggatcggtgtctgcaactcgacaccgtgaagttggagtcgctagtaatcgcggatcagcaacgccgcggtgaatacgttctcgggccttgtacacaccgcccgtcacgtcatgaaagtcggcaacacccgaagcccgtggccccatggggagcggtcgaaggtggggccggtgattgggacg

SEQ ID NO: 71 - DNA, 1367 bp, Actinomyces sp.
  CCUG 37290
  modified_base (671)..(671): a, c, t, g, unknown or other
  modified_base (1259)..(1259): a, c, t, g, unknown or other
acgaacgctggcggcgtgcttaacacatgcaagtcgaacgctgaagacctggcttttgttgggttggatgagtggcgaacgggtgagtaacacgtgagtaacctgccctcttctttgggataacgcccggaaacgggtgctaatactggatattcactggccttcgcatgggggttggtggaaaggtttgttctggtgggggatgggctcgcggcctatcagcttgttggtggggtgatggcctaccaaggctttgacgggtagccggcctgagagggtgaccggtcacattgggactgagatacggcccagactcctacgggaggcagcagtggggaatattgcacaatgggcgaaagcctgatgcagcgacgccgcgtgagggatggaggccttcgggttgtaaacctctttcgctcatggtcaagccgcaactgtgggttgtggtgagggtagtgggtaaagaagcgccggctaactacgtgccagcagccgcggtaatacgtagggcgcgagcgttgtccggaattattgggcgtaaagggcttgtaggcggttggtcgcgtctgccgtgaaattctctggcttaactgggggcgtgcggtgggtacgggctgacttgagtgcggtaggggagactggaactcctggtgtagcggtggaatgcgcanatatcaggaagaacaccggtggcgaaggcgggtctctgggccgttactgacgctgaggagcgaaagcgtggggagcgaacaggattagataccctggtagtccacgctgtaaacgttgggcactaggtgtgggggccacccgtggtttctgcgccgtagctaacgctttaagtgccccgcctggggagtacggccgcaaggctaaaactcaaaggaattgacgggggcccgcacaagcggcggagcatgcggattaattcgatgcaacgcgaagaaccttaccaaggcttgacatgcacggcggcactgcagagatgtggtggcatttggttggtcgtgtgcaggtggtgcatggttgtcgtcagctcgtgtcgtgagatgttgggttaagtcccgcaacgagcgcaacccttgccctatgttgccagcacgtgatggtggggactcgtgggggactgccggggttaactcggaggaaggtggggatgacgtcaaatcatcatgccccttatgtcttgggcttcacgcatgctacaatggttggtacagagggttgcgatactgtgaggtggagcgaatcccttaaanccagtctcagttcggattggggtctgcaactcgaccccatgaaggtggagtcgctagtaatcgcagatcagcaacgctgcggtgaatacgttctcgggccttgtacac

SEQ ID NO: 72 - DNA, 1501 bp, Actinomyces sp.
  ChDC B197
agagtttgatcctggctcagacgaacgctggcggcgtgcttaacacatgcaagtcgaacggtgaagggaccagcttgctggttctggatgagtggcgaacgggtgagtaacacgtgagtaacctgcccccttcttctggataaccgcatgaaagtgtggctaatacgggatattctgggtctgtcgcatgacgggcccgggaaagatattgcttcggtgggggatgggctcgcggcctatcagcttgttggtggggtgatggcctaccaaggcggtgacgggtagccggcctgagagggtggacggtcacactgggactgagacacggcccagactcctacgggaggcagcagtggggaatattgcacaatgggcgcaagcctgatgcagcgacgccgcgtgagggatggaggccttcgggttgtaaacctctttcgccagtgaagcaggcctgctccttgtgggtgggttgacggtagctggataagaagcgccggctaactacgtgccagcagccgcggtaatacgtagggcgcgagcgttgtccggaattattgggcgtaaagagctcgtaggcggctggtcgcgtctgtcgtgaaatcctctggcttaactgggggcttgcggtgggtacgggccggcttgagtgcggtaggggagactggaactcctggtgtagcggtggaatgcgcagatatcaggaagaacaccggtggcgaaggcgggtctctgggccgttactgacgctgaggagcgaaagcgtggggagcgaacaggattagataccctggtagtccacgccgtaaacgttgggcactagtgtggggggccttttccgggtcttccgcgccgtagctaacgcattaagtgccccgcctggggagtacggccgcaaggctaaaactcaaaggaattgacgggggcccgcacaagcggcggagcatgcggattaattcgatgcaacgcgaagaaccttaccaaggcttgacatgtgccggtcggctccggagacggggcttcctccttgtggggccggttcacaggtggtgcatggttgtcgtcagctcgtgtcgtgagatgttgggttaagtcccgcaacgagcgcaacccttgtcccgtgttgccagcacgttgtggtggggactcgcgggagactgccggggtcaactcggaggaaggtggggatgacgtcaaatcatcatgccccttatgtcttgggcttcacgcatgctacaatggccggtacagagggctgcgataccgtgaggtggagcgaatcccttaaagccggtctcagttcggatcggtgtctgcaactcgacaccgtgaagctggagtcgctagtaatcgcagatcagcaacgctgcggtgaatacgttctcgggccttgtacacaccgcccgtcacgtcatgaaagtcggcaacacccgaagcccgtggccctacggggagcggtcgaaggtggggctggtgattgggacgaagtcgtaacaaggtaacc

SEQ ID NO: 73 - DNA, 1274 bp, Actinomyces sp.
  GEJ15
  modified_base (398)..(400): a, c, t, g, unknown or other
  modified_base (450)..(450): a, c, t, g, unknown or other
taacctgccctcttcttctggataacctcatgaaagtggggctaatacggggtattccgggtctgtcgcatggcgggtttgggaaagattgcgcctttgggtgttttcggtgggggatgggctcgcggcctatcagcttgttggtggggtgatggcctaccaaggcggtgacgggtagccggcctgagagggtggacggccacactgggactgagacacggcccagactcctgcgggaggcagcagtggggaatattgcacaatgggcgcaagcctgatgcagcgacgccgcgtgagggatggaggccttcgggttgtgaacctctttcgccagtgaagcaggcctgctcgttgtcgtggtgacgtagctgatagagcgcgctactacgtgcagcagnnngtatacgtaggcgcgagcgtgtcagtaagtatgggcgtaaagagctcgtngcgctggtcgcgtctgtcgtgaaatcatctggcttaactgggggcttgcggtgggtacgggccggcttgagtgcggtaggggaggctggaactcctggtgtagcggtggaatgcgcagatatcaggaagaacaccggtggcgaaggcgggtctctgggccgttactgacgctgaggagcgaaagcgtggggagcgaacaggattagataccctggtagtccacgccgtaaacgttgggcactaggtgtggggggccttttccgggttcttccgcgccgtagctaacgcattaagtgccccgcctggggagtacggccgcaaggctaaaactcaaaggaattgacgggggcccgcacaagcggcggagcatgcggattaattcgatgcaacgcgaagaaccttaccaaggcttgacatgtgccggtcggctccggagacggggtttccctcctttgtgggggccggttcacaggtggtgcatggttgtcgtcagctcgtgtcgtgagatgttgggttaagtcccgcaacgagcgcaacccctgtcccgtgttgccagcacgttgtggtggggactcgcgggagactgccggggtcaactcggaggagggtggggatgacgtcaaatcatcatgccccttatgtcttgggcttcacgcatgctacaatggccggtacagagggctgcgatgccgtgaggtggagcgaatcccttaaagccggtctcagttcggatcggtgtctgcaactcgacaccgtgaagttggagtcgctagtaatcgcagatcagccaacgctgcggtgaatacgttcctcgggccttgtac

SEQ ID NO: 74 - DNA, 1320 bp, Actinomyces sp.
  HKU31
acggactgctcttcagcttgctggggggtggtgagtggcgaacgggtgagtaacacgtgagtaacctgccctcttctttgggataactgccggaaacggttgctaataccgggtattcactggtctccgcatgggggttggtggaaaggggcctcttttggggtttctggtgggggatgggctcgcggcttatcagcttgttggtggggtgatggcctaccaaggctttgacgggtagccggcctgagagggtgaccggtcacattgggactgagatacggcccagactcctacgggaggcagcagtggggaattttgcacaatgggcgcaagcctgatgcagcgacgccgcgtgagggatggaggccttcgggttgtaaacctctttcgctcatggtcaagccgcaactgtggttgtggtgagggtagtgggtaaagaagcgccggctaactacgtgccagcagccgcggtaatacgtagggcgcgagcgttgtccggaattattgggcgtaaagggcttgtaggcggtttgtcgcgtctgccgtgaaattccctggcttaactgggggcgtgcggtgggtacgggcaggcttgagtgcggtaggggagactggaattcctggtgtagcggtggaatgcgcagatatcaggaggaacaccggtggcgaaggcgggtctctgggccgttactgacgctgaggagcgaaagcatggggagcgaacaggattagataccctggtagtccatgctgtaaacgttgggcactaggtgtggggaccgtccttggtttctgcgccgtagctaacgctttaagtgccccgcctggggagtacggccgcaaggctaaaactcaaaggaattgacgggggcccgcacaagcggcggagcatgcggattaattcgatgcaacgcgaagaaccttaccaaggcttgacatgcaccgcgacactgcagagatgtggtggccttcggggtggtgtgcaggtggtgcatggttgtcgtcagctcgtgtcgtgagatgttgggttaagtcccgcaacgagcgcaacccttgccctatgttgccagcacgttgtggtggggactcgtgggggactgccggggttaactcggaggaaggtggggatgacgtcaaatcatcatgccccttatgtcttgggcttcacgcatgctacaatggtcggtacagagggttgcgataccgyraggtggagcgaatcccttaaagccggtctcagttcggattggggtctgcaactcgaccccatgaaggtggagtcgctagtaatcgcagatcagcaacgctgcggtgaatacg

SEQ ID NO: 75 - DNA, 1265 bp, Actinomyces sp.
  ICM34
acgaacgctggcggcgtgcttaacacatgcaagtcgaacgagtggcgaacgggtgagtaacacgtgagtaacctgccctcttctttgggataacgcccggaaacgggtgctaatactggatattgaaagctggtgggggatgggctcgcggcctatcagcttgttggtggggtgatggcctaccaaggctttgacgggtagccggcctgagagggtgaccggtcacattgggactgagatacggcccagactcctacgggaggcagcagtggggaatattgcacaatgggcgaaagcctgatgcagcgacgccgcgtgagggatggaggccttcgggttgtaaacctctttcgctcatggtcatgagggtagtgggtaaagaagcgccggctaactacgtgccagcagccgcggtaatacgtagggcgcgagcgttgtccggaattattgggcgtaaagggcttgtaggcggttggtcgcgtctgccgtgaaattctctggcttaactgggggcgtgcggtgggtacgggctgacttgagtgcggtaggggagactggaactcctggtgtagcggtggaatgcgcagatatcaggaagaacaccggtggcgaaggcgggtctctgggccgactgacgctgaggagcgaaagcgtggggagcgaacaggattagataccctggtagtccacgctgtaaacgttgggcactaggtgtgggggtttctgcgccgtagctaacgctttaagtgccccgcctggggagtacggccgcaaggctaaaactcaaaggaattgacgggggcccgcacaagcggcggagcatgcggattaattcgatgcaacgcgaagaaccttaccaaggcttgacatgtgcaggtggtgcatggttgtcgtcagctcgtgtcgtgagatgttgggttaagtcccgcaacgagcgcaacccttgccctatgttgccagcacgtggggactcgtgggggactgccggggttaactcggaggaaggtggggatgacgtcaaatcatcatgccccttatgtcttgggcttcacgcatgctacaatggttggcagagggttgcgatactgtgaggtggagcgaatcccttccagtctcagttcggatggggtctgcaactcgaccccagaaggtggagtcgctagtaatcgcagatcagcaacgctgcggtgaatacgttctcgggccttgtacacaccgcccgtcacgtcacgaaagttggtaacacccgaagcccatgcctaggg

SEQ ID NO: 76 - DNA, 1331 bp, Actinomyces sp.
  ICM41
tcttctttgggataacgcccggaaacgggtgctaatactggatattcactgatcttcgcatgggggttggtggaaaggttttttctggtgggggatgggctcgcggcctatcagcttgttggtggggtgatggcctaccaaggctttgacgggtagccggcctgagagggtgaccggtcacattgggactgagatacggcccagactcctacgggaggcagcagtggggaatattgcacaatgggcgaaagcctgatgcagcgacgccgcgtgagggatggaggccttcgggttgtaaacctctttcgctcatggtcaagccgcaacttagggttgtggtgagggtagtgggtaaagaagcgccggctaactacgtgccagcagccgcggtaatacgtagggcgcgagcgttgtccggaattattgggcgtaaagggcttgtaggcggttggtcgcgtctgccgtgaaatcctctggcttaactgggggcgtgcggtgggtacgggctgacttgagtgcggtaggggagactggaactcctggtgtagcggtggaatgcgcagatatcaggaagaacaccggtggcgaaggcgggtctctgggccgttactgacgctgaggagcgaaagcgtggggagcgaacaggattagataccctggtagtccacgctgtaaacgttgggcactaggtgtgggggccacccgtggtttctgcgccgtagctaacgctttaagtgccccgcctggggagtacggccgcaaggctaaaactcaaaggaattgacgggggcccgcacaagcggcggagcatgcggattaattcgatgcaacgcgaagaaccttaccaaggcttgacatgcacggcggcactgcagagatgtggtggcatttagttggtcgtgtgcaggtggtgcatggttgtcgtcagctcgtgtcgtgagatgttgggttaagtcccgcaacgagcgcaacccttgccctatgttgccagcacgtgatggtggggactcgtgggggactgccggggttaactcggaggaaggtggggatgacgtcaaatcatcatgccccttatgtcttgggcttcacgcatgctacaatggttggtacagagggttgcgatatcgtgaggtggagcgaatcccttaaagccagtctcagttcggattggggtctgcaactcgaccccatgaaggtggagtcgctagtaatcgcagatcagcaacgctgcggtgaatacgttctcgggccttgtacacaccgcccgtcacgtcacgaaagttggtaacacccgaagcccatggcctaaccgcgtttgcggggggagtggt

SEQ ID NO: 77 - DNA, 1281 bp, Actinomyces sp.
  ICM47
gctcaggacgaacgctggcggcgtgcttaacacatgcaagtcgaacgagtggcgaacgggtgagtaacacgtgagtaacctgccctcttctttgggataacgcccggaaacgggtgctaatactggatattgaaagctggtgggggatgggctcgcggcctatcagcttgttggtggggtgatggcctaccaaggctttgacgggtagccggcctgagagggtgaccggtcacattgggactgagatacggcccagactcctacgggaggcagcagtggggaatattgcacaatgggcgaaagcctgatgcagcgacgccgcgtgagggatggaggccttcgggttgtaaacctctttcgctcatggtcatgagggtagtgggtaaagaagcgccggctaactacgtgccagcagccgcggtaatacgtagggcgcgagcgttgtccggaattattgggcgtaaagggcttgtaggcggttggtcgcgtctgccgtgaaattctctggcttaactgggggcgtgcggtgggtacgggctgacttgagtgcggtaggggagactggaactcctggtgtagcggtggaatgcgcagatatcaggaagaacaccggtggcgaaggcgggtctctgggccgactgacgctgaggagcgaaagcgtggggagcgaacaggattagataccctggtagtccacgctgtaaacgttgggcactaggtgtgggggtttctgcgccgtagctaacgctttaagtgccccgcctggggagtacggccgcaaggctaaaactcaaaggaattgacgggggcccgcacaagcggcggagcatgcggattaattcgatgcaacgcgaagaaccttaccaaggcttgacatgtgcaggtggtgcatggttgtcgtcagctcgtgtcgtgagatgttgggttaagtcccgcaacgagcgcaacccttgccctatgttgccagcacgtggggactcgtgggggactgccggggttaactcggaggaaggtggggatgacgtcaaatcatcatgccccttatgtcttgggcttcacgcatgctacaatggttggcagagggttgcgatactgtgaggtggagcgaatcccttccagtctcagttcggatggggtctgcaactcgaccccagaaggtggagtcgctagtaatcgcagatcagcaacgctgcggtgaatacgttctcgggccttgtacacaccgcccgtcacgtcacgaaagttggtaacacccgaagcccatgcctagggagtggtcga

SEQ ID NO: 78 - DNA, 1260 bp, Actinomyces sp.
  ICM54
gaacgctggcggcgtgcttaacacatgcaagtcgaacgagtggcgaacgggtgagtaacacgtgagtaacctgcccccttctttgggataacgcccggaaacgggtgctaatactggatattgaaagctggtgggggatgggctcgcggcctatcagcttgttggtggggtgatggcctaccaaggctttgacgggtagccggcctgagagggtgaccggtcacattgggactgagatacggcccagactcctacgggaggcagcagtggggaatattgcacaatgggcgaaagcctgatgcagcgacgccgcgtgagggatgacggccttcgggttgtaaacctctttcgctcatggtcatgagggtagtgggtaaagaagcgccggctaactacgtgccagcagccgcggtaatacgtagggcgcgagcgttgtccggaattattgggcgtaaagggcttgtaggcggttggtcgcgtctgccgtgaaatcctctggcttaactgggggcgtgcggtgggtacgggctgacttgagtgcggtaggggagactggaactcctggtgtagcggtggaatgcgcagatatcaggaagaacaccggtggcgaaggcgggtctctgggccgactgacgctgaggagcgaaagcgtggggagcgaacaggattagataccctggtagtccacgctgtaaacgttgggcactaggtgtgggggtttctgcgccgtagctaacgctttaagtgccccgcctggggagtacggccgcaaggctaaaactcaaaggaattgacgggggcccgcacaagcggcggagcatgcggattaattcgatgcaacgcgaagaaccttaccaaggcttgacatgtgcaggtggtgcatggttgtcgtcagctcgtgtcgtgagatgttgggttaagtcccgcaacgagcgcaacccttgccctatgttgccagcacgtggggactcgtgggggactgccggggttaactcggaggaaggtggggatgacgtcaaatcatcatgccccttatgtcttgggcttcacgcatgctacaatggttggcagagggttgcgatactgtgaggtggagcgaatcccttccagtctcagttcggatggggtctgcaactcgaccccagaaggtggagtcgctagtaatcgcagatcagcaacgctgcggtgaatacgttctcgggccttgtacacaccgcccgtcacgtcacgaaagttggtaacacccgaagcccatgccta

SEQ ID NO: 79 - DNA, 1484 bp, Actinomyces sp.
  M2231/94/1
  modified_base (770)..(770): a, c, t, g, unknown or other
  modified_base (772)..(772): a, c, t, g, unknown or other
  modified_base (878)..(878): a, c, t, g, unknown or other
  modified_base (939)..(939): a, c, t, g, unknown or other
ttgatcctggctcaggacgaacgctgacggcgtgcttaacacatgcaagtcgaacggtgaagcccctttttttggggtggatgagtggcgaacgggtgagtaacacgtgagtaacctgcccctgactcctggataactgcttgaaagggtggctaatacgggdgtgtcctggcctgggcgcatgtctgggtttggaaagattccatgtttttggttttggttggggatgggctcgcggcctatcagcttgttggtggggtgatggcctaccaaggcgttgacgggtagccggcctgagagggtggacggtcacactgggactgagacacggcccagactcctacgggaggcagcagtggggaatattgcacaatgggcgcaagcctgatgcagcgacgccgcgtgagggatgacggccttcgggttgtaaacctctttcgccagtgaggaaggcctgctcctttttgtgggtgggttgacggtagctggataagaagcgccggctaactacgtgccagcagccgcggtaatacgtagggcgcgagcgttgtccggaattattgggcgtaaagagctcgtaggcggctggtcgcgtctgccgtgaaatcccctggcttaactgggggcgtgcggtgggtacgggccggcttgagtgcggtaggggaggctggaactcctggtgtagcggtggaatgcgcagatatcaggaggaacaccggtggcgaaggcgggtctctgggccgttactgacgctgaggagcgaaagcgtngngagcgaacaggattagataccctggtagtccacgccgtaaacgttgggcactaggtgtggggggtctttccgggtcctccgcgccgtagctaacgcattaagtgcnccgcctggggagtacggccgcaaggctaaaactcaaaggaattgacgggggcccgcacaancggcggagcatgcggattaattcgatgcaacgcgaagaaccttaccaaggcttgacatgtcagcgctggctgcagagatgtggtctcctcacttgtggggcgctgtcacaggtggtgcatggttgtcgtcagctcgtgtcgtgagatgttgggttaagtcccgcaacgagcgcaacccttgtcccgtgttgccagcacgtcgtggtggggactcgcgggagactgccggggtcaactcggaggaaggtggggatgacgtcaaatcatcatgccccttatgtcttgggcttcacgcatgctacaatggccggtacagagggctgcgatgccgtgaggcggagcgaatcccttaaagccggtctcagttcggatcggtgtctgcaactcgacaccgtgaagttggagtcgctagtaatcgcagatcagcaacgctgcggtgaatacgtcctcgggccttgtacacaccgcccgtcacgtcatgaaagctggcaacacccgaagcccgtggccctacggggagcggtcgaaggtggggctggtgattg

SEQ ID NO: 80 - DNA, 1419 bp, Actinomyces sp.
  TeJ5
  modified_base (500)..(500): a, c, t, g, unknown or other
  modified_base (503)..(503): a, c, t, g, unknown or other
gcttacacatgcagtcgaacgatgatgcggcgcttgcgccgttgattagtggcgaacgggtgagtaacacgtgagtaacctgcccccttcttcgggataacggtctgaaagggctgctaataccgggtattcactggtctccgcatgggggctggtggaaagggttttttctggtgggggatgggctcgcggcctatcagcttgttggtggggtgatggcccaccaaggctttgacgggtagccggcctgagagggtgaccggtcacattgggactgagatacggcccagactcctacgggaggcagcagtggggaatattgcacaatgggcgcaagcctgatgcagcgacgccgcgtgagggatggaggccttcgggttgtgaacctctttcgcccgtggtcaagccgcgacgtgggtcgtggtgagggtagtgggtaaagaagcgccggctaactacgtgccagcagccgcggtaatacgtagggcgcgagcgtgtcnganatgggcgtaaagggctgtaggcgctggtcgcgtctgccgtgaaatcctctggctcaactgggagcgtgcggtgggtacgggctggcttgagtgcggtaggggaggctggaactctggtgtagcggtggaatgcgcagatatcaggaagaacaccggtggcgaaggcgggtctctgggccgttactgacgctgaggagcgaaagcgtggggagcgaacaggattagataccctggtagtccacgctgtaaacgttgggcactaggtgtgggggccacccgtggttcccgcgccgtagctaacgctttaagtgccccgcctggggagtacggccgcaaggctaaaactcaaaggaattgacgggggcccgcacaagcggcggagcatgcggattaattcgatgcaacgcgaagaaccttaccaaggcttgacatgcgccccgggcgcgcggagacgcgcgcgcatttggttgggggtgtgcaggtggtgcatggttgtcgtcagctcgtgtcgtgagatgttgggttaagtcccgcaacgagcgcaacccttgccctatgttgccagcgcgttgtggcggggactcgtgggggactgccggggttaactcggaggaaggtggggatgacgtcaaatcatcatgccccttatgtcttgggcttcacgcatgctacaatggccggtacagagggttgcgatgccgtgaggcggggcgaatcccttaaagccggtctcagttcggattggggtctgcaactcgaccccatgaaggtggagtcgctagtaatcgcagatcagcaacgctgcggtgaatacgttctcgggccttgtacacaccgcccgtcacgtcacgaaagttggtaacgcccgaagcccatggcccaaccggctcttgctggggggagtggtcgaaggtgg

SEQ ID NO: 81 - DNA, 1443 bp, Actinomyces sp.
  c109
gccccacacatgcaagtggagcgacgaaccggggcttgccccggggcagagccgcgaacgggtgagtaacacgtgggttacctgccccgatgactgggacaacccgtcgaaagacgggctaataccggatgtgccccttgggggaaaggaagcttcggcctccgcatcgggatgggcccgcggcgcattagcttgttggtggggtaatggcttaccaaggcgacgatgcgtagctggtctgagaggacgatcagccacactgggactgagacacggcccagactcctacgggaggcagcagtggggaatcttgcacaatgcgcgaaagcgtgatgcagcaacgccgcgtgcgggaagaaggccctagggttgtaaaccgctttcagttgggacgaagcttcagtcgttaatagcggtttggagtgacggtaccttcagaagaagcgccggctaactacgtgccagcagccgcggtaatacgtagggcgcgagcgttgtccggaatcattgggcgtaaagcgcgtgtaggcggctgagtaagtctgctgtgaaagtccagggctcaaccctggaatgtcggcggatactgctcagctggagtacgggaggggcgagtggaattcctggtgtagcggtggaatgcgcagatatcaggaggaacacctatggcgaaggcagctcgctggaacgttactgacgctgagacgcgaaagcgtggggagcaaacaggattagataccctggtagtccacgctgtaaacgatggatactaggtgtggggggtgtcaactccctccgtgccgaagctaacgcattaagtatcccgcctggggagtacggccgcaaggctaaaactcaaaggaattgacgggggcccgcacaagcagcggagcatgtggtttaattcgacgcaacgcgaagaaccttacctgggcttgacatgttcttgatcggcgtggaaacacgtcttccctcacgggcaagatcacaggtggtgcatggctgtcgtcagctcgtgtcgtgagatgttgggttaagtcccgcaacgagcgcaacccccgtcgtatgttgccagcatttagttggggactcatgcgagactgccggtggcaaaccggaggaaggtggggatgacgtcaagtcatcatgccccttatgtccagggctacacacgtgctacattggcgtatacaaagggtagcgataccgcgaggtggagcgaatctcacaaagtacgtctcggttcggattgcaggctgaaactcgcctgcatgaaggtggagttgctagtaatcgtggatcagcaatgccgcggtgaatacgttcccgggccttgtacacaccgcccgtcacaccacgggagtgagcaacacccgaagccggtggcctaacccgcaagggagggagccgtcgaaggtggggctcgtgactggggtgaagtcg

SEQ ID NO: 82 - DNA, 1547 bp, Actinomyces sp.
  oral clone GU009
gagtttgattctggctcaggacgaacgctggcggcgtgcttaacacatgcaagtcgaacgggcccgcaccttttttgggggcgggttgagtggcgaacgggtgagtatcacgtgagtaacctgccctcctctcctggataaccgcttgaaagggcggctaatacggggtggtccggttggtccgcatgggccggtcgggatagtttcatcttcgggtgtttcggtgggggatgggctcgcggcctatcagcttgttggtggggtgatggcccaccaaggcggtgacgggtagccggcctgagagggtgggcggccacactgggactgagacacggcccagactcctgcgggaggcagcagtggggggtattgcacaatgggcggaagcctgatgcagcgacgtcgcgtgagggatggaggccttcgggttgtgaacctctgtttccggtggtgaaggccccgcccctggtggtggggttgacggtagccgggtatgaagcgccggctaactacgtgccagcagccgcggtaatacgtagggcgcgagcgttgtccggaattattgggcgtaaagggcttgtaggcggccggccgcgtccgtcgtgaaatcctccggctcaaccgggggcttgcggtgggtacgggtcggctggagtgcggcaggggaggctggaactcctggtgtagcggtggaatgcgcagatatcaggaagaacaccggtggcgaaggcgggtctctgggccgttactgacgctgaggagcgaaagcgtggggagcgaacaggattagataccctggtagtccacgctgtaaacgttgggcactaggtgtgggggccacccgtggtttctgcgccgtagctaacgctttaagtgccccgcctggggagtacggccgcaaggctaaaactcaaaggaattgacgggggcccgcacaagcggcggagcatgcggattaattcgatgcaacgcgaagaaccttaccaaggcttgacatgcacggcggcactgcagagatgtggtggcatttagttggtcgtgtgcaggtggtgcatggttgtcgtcagctcgtgtcgtgagatgttgggttaagtcccgcaacgagcgcaacccttgccctatgttgccagcacgtgatggtggggactcgtgggggactgccggggttaactcggaggaaggtggggatgacgtcaaatcatcatgccccttatgtcttgggcttcacgcatgctacaatggttggtacagagggttgcgatatcgtgaggtggagcgaatcccttaaagccagtctcagttcggattggggtctgcaactcgaccccatgaaggtggagtcgctagtaatcgcagatcagcaacgctgcggtgaatacgttctcgggccttgtacacaccgcccgtcacgtcacgaaagttggtaacacccgaagcccatggcctaaccggtttgccggggggagtggtcgaaggtgggattggcgattgggacgaagtcgtaacaaggtagccgtaccggaaggtgcggctggaacacctccttc

SEQ ID NO: 83 - DNA, 1366 bp, Actinomyces sp.
  oral clone GU067
gagtttgatcctggctcaggacgaacgctggcggcgtgcttaacacatgcaagtcgaacgagtggcgaacgggtgagtaacacgtgagtaacctgcccccttcttctggataaccgcatgaaagtgtggctaatacgggatattgaaagtcggtgggggatgggctcgcggcctatcagcttgttggtggggtgatggcctaccaaggcggtgacgggtagccggcctgagagggtggacggtcacactgggactgagacacggcccagactcctacgggaggcagcagtggggaatattgcacaatgggcgcaagcctgatgcagcgacgccgcgtgagggatggaggccttcgggttgtaaacctctttcgccagtgaagctgacggtagctggataagaagcgccggctaactacgtgccagcagccgcggtaatacgtagggcgcgagcgttgtccggaattattgggcgtaaagagctcgtaggcggctggtcgcgtctgtcgtgaaatcctctggcttaactgggggcttgcggtgggtacgggccggcttgagtgcggtaggggagactggaactcctggtgtagcggtggaatgcgcagatatcaggaagaacaccggtggcgaaggcgggtctctgggccgactgacgctgaggagcgaaagcgtggggagcgaacaggattagataccctggtagtccacgccgtaaacgttgggcactaggtgtgggggcttccgcgccgtagctaacgcattaagtgccccgcccggggagtacggccgcaaggctaaaactcaaaggaattgacgggggcccgcacaagcggcggagcatgcggattaattcgatgcaacgcgaagaaccttaccaaggcttgacatgcacaggtggtgcatggttgtcgtcagctcgtgtcgtgagatgttgggttaagtcccgcaacgagcgcaacccttgtctcgtgttgccagcacgtggggactcgcgggagactgccggggttaactcggaggaaggtggggatgacgtcaaatcatcatgccccttatgtcttgggcttcacgcatgctacaatggccggcagtgggttgcgatgctgtgaggcggagcgaatccctgccggtctcagttcggacggtgtctgcaactcgacaccggaagttggagtcgctagtaatcgcagatcagcaacgctgcggtgaatacgttctcgggccttgtacacaccgcccgtcacgtcatgaaagctggcaacacccgaagcccgtgcctgggagcggtcgaaggtggggctggtgattgggacgaagtcgtaacaaggtagccgtaccggaaggtgcggctggaacacctcctt

SEQ ID NO: 84 - DNA, 1532 bp, Actinomyces sp.
  oral clone IO076
gagtttgattctggctcaggacgaacgctggcggcgtgcttaacacatgcaagtcgaacgatgaagcgctgtctttttggcggtgtggattagtggcgaacgggtgagtaatacgcgggcaacctgcccctctgcttcgggataagctttggaaacggggtctaataccggatgtgcctgtctggtcgcatggctgggcggggaaagatgtttttcggcgggggatgggctcgcggcctatcagcttgttggtggggtgacggcctaccaaggcgtcgacgggtagccggcctgagagggtggtcggccacactgggactgagatacggcccagactcctacgggaggcagcagtgggggatattgcacaatgggcgcaagcctgatgcagcgacgccgcgtgggggatggaggctttcgggttgtaaacccctttcggcgcgggacaaggctccgtttggcggggttgagggtacgcgtcaaagaagcgccggctaactacgtgccagcagccgcggtaatacgtagggcgcgagcgttgtccggaattattgggcgtaaagggctcgtaggcggcttgtcgcgtctgctgtgaaaacgcggggctcaactccgcgcgtgcagtgggtacgggcaggctggagtgcggcaggggtggctggaattcctggtgtagcggtggaatgcgcagatatcaggaagaacaccgatggcgaaggcaggccactgggccgtcactgacgctggggagcgaaagcgtggggagcgaacaggattagataccctggtagtccacgccgtaaacgttgggcactaggtgtggggggccttttccgggtcttccgcgccgtagctaacgcattaagtgccccgcctggggagtacggtcgcaaggctaaaactcaaaggaattgacgggggcccgcacaagcggcggagcatgcggattaattcgatgcaacgcgaagaaccttaccaaggcttgacatgtgccggtcggctccggagacgggagcgtcccctttttgtgggctggttcacaggtggtgcatggttgtcgtcagctcgtgtcgtgagatgttgggttaagtcccgcaacgagcgcaacccttgtctcgtgttgccagcacgttgtggtggggactcgcgggagactgccggggtcaactcggaggagggtggggatgacgtcaaatcatcatgccccttatgtcttgggcttcacgcatgctacaatggccggtacagtgggttgcgatgtcgtgaggcggagcgaatccctgaaagccggtctcagttcggatcggtgtctgcaactcgacaccgtgaagttggagtcgctagtaatcgcagatcagcaacgctgcggtgaatacgttctcgggccttgtacacaccgcccgtcacgtcatgaaagtcggcaacacccgaagcccgtggccttatggggagcggtcgaaggtggggctggtgattgggacgaagtcgtaacaaggtagccgtaccggaaggtgcggctggaacacctcctt

SEQ ID NO: 85 - DNA, 1544 bp, Actinomyces sp.
  oral clone IO077
gagtttgatcctggctcaggacgaacgctggcggcgtgcttaacacatgcaagtcgaacggtgaagggatcagcttgctggttctggatgagtggcgaacgggtgagtaacacgtgagtaacctgcccccttcttctggataaccgcatgaaagtgtggctaatacgggatattctgggtctgtcgcatggcgggtctgggaaagatgcgcctttgggtgtttttggtgggggatgggctcgcggcctatcagcttgttggtggggtgatggcctaccaaggcggtgacgggtagccggcctgagagggtggacggtcacactgggactgagacacggcccagactcctacgggaggcagcagtggggaatattgcacaatgggcgcaagcctgatgcagcgacgccgcgtgagggatggaggccttcgggttgtaaacctctttcgccagtgaagcaggcctgctccttgtgggtgggttgacggtagctggataagaagcgccggctaactacgtgccagcagccgcggtaatacgtagggcgcgagcgttgtccggaattattgggcgtaaagagctcgtaggcggctggtcgcgtctgtcgtgaaatcctctggcttaactgggggcgtgcggtgggtacgggccggcttgagtgcggtaggggaggctggaattcctggtgtagcggtggaatgcgcagatatcaggaggaacaccggtggcgaaggcgggtctctgggccgtgtactgacgctgagagcgaaagcgtggggagcgaacaggattagataccctggtagtccatgctgtaaacgttgggcactaggtgtggggggtctttccgggtcttccgcgccgtagctaacgcattaagtgccccgcctggggagtacggccgcaaggctaaaactcaaaggaattgacgggggcccgcacaagcggcggagcatgcggattaattcgatgcaacgcgaagaaccttaccaaggcttgacatgggccggtggttcccggagacgggagcgtcccctttttgtgggctggttcacaggtggtgcatggttgtcgtcagctcgtgtcgtgagatgttgggttaagtcccgcaacgagcgcaacccttgtctcgtgttgccagcacgttgtggtggggactcgcgggagactgccggggtcaactcggaggagggtggggatgacgtcaaatcatcatgccccttatgtcttgggcttcacgcatgctacaatggccggtacagtgggttgcgatgtcgtgaggcggagcgaatccctgaaagccggtctcagttcggatcggtgtctgcaactcgacaccgtgaagttggagtcgctagtaatcgcagatcagcaacgctgcggtgaatacgttctcgggccctgtacacaccgcccgtcacgtcatgaaagtcggcaacacccgaagcccgtggccttatggggagcggtcgaaggtggggctggtgattgggacgaagtcgtaacaaggtagccgtaccggaaggtgcggttggatcacctcctt

SEQ ID NO: 86 - DNA, 1362 bp, Actinomyces sp.
  oral clone IP073
gagtttgattctggctcaggacgaacgctggcggcgtgcttaacacatgcaagtcgaacgagtggcgaacgggtgagtaacacgtgagtaacctgccctcttctcttggataactgcttgaaagggcggctaatacgggatgttgaaagttggtgggggatgggctcgcggcttatcagcttgttggtggggtgatggcctaccaaggcggtgacgggtagccggcctgagagggtggacggtcacactgggactgagacacggcccagactcctgcgggaggcagcagtgggggattttgcacaatgggcgcaagcctgatgcagcgacgccgcgtgagggatggaggccttcgggttgtgaacctctgtcgccggtgatgttgacggtagccgggtatgaagtgccggctaactacgtgccagcagccgcggtaatacgtagggcgcgagcgttgtccggaattattgggcgtaaagagctcgtaggcggctggtcgcgtctgtcgtgaaatcctctggcttaactgggggcgtgcggtgggtacgggccggcttgagtgcggtaggggaggctggaattcctggtgtagcggtggaatgcgcagatatcaggaggaacaccggtggcgaaggcgggtctctgggccgactgacgctgaggagcgaaagcgtggggagcgaacaggattagataccctggtagtccatgctgtaaacgttgggcactaggtgtgggggcttccgcgccgtagctaacgcattaagtgccccgcctggggagtacggccgcaaggctaaaactcaaaggaattgacgggggcccgcacaagcggcggagcatgcggattaattcgatgcaacgcgaagaaccttaccaaggcttgacatgcacaggtggtgcatggttgtcgtcagctcgtgtcgtgagatgttgggttaagtcccgcaacgagcgcaacccttgtctcgtgttgccagcacgtggggactcgcgggagactgccggggtcaactcggaggagggtggggatgacgtcaaatcatcatgccccttatgtcttgggcttcacgcatgctacaatggccggcagagggctgcgataccgtgaggtggagcgaatcccttccggtctcagttcggacggtgtctgcaactcgacaccggaagttggagtcgctagtaatcgcagatcagcaacgctgcggtgaatacgttctcgggccttgtacacaccgcccgtcacgtcatgaaagtcggcaacacccgaagcccgtgcgagcggtcgaaggtggggctggtgattgggacgaagtcgtaacaaggtagccgtaccggaaggtgcggctggatcacctcctt

SEQ ID NO: 87 - DNA, 1543 bp, Actinomyces sp.
  oral clone IP081
gagtttgattctggctcaggacgaacgctggcggcgtgcttaacacatgcaagtcgaacgggcccgctctcttttttgggggtgggttgagtggcgaacgggtgagtatcacgtgagtaacctgccccctgctcctggataactgcttgaaagggcggctaatacggggtgtgccggctggtccgcatgggcctggtcgggatagtttcatcttcgggtgtttcggtgggggatgggctcgcggcctatcagcttgttggtggggtgatggcccaccaaggcggtgacgggtagccggcctgagagggtgggcggccacactgggactgagacacggcccagactcctgcgggaggcagcagtggggggtattgcacaatgggcggaagcctgatgcagcgacgtcgcgtgagggatggaggccttcgggttgtgaacctctttctccggtggtgaaggccctgtccgttgcggcggggttgacggtagccgggtatgaagcgccggctaactacgtgccagcagccgcggtaatacgtagggcgcgagcgttgtccggaattattgggcgtgaagggcttgtaggcggccggtcgcgtccgccgtgaaattctccggctcaaccgggggcttgcggtgggtacgggccggctggagtgcggtaggggaggctggaactcctggtgtagcggtggaatgcgcagatatcaggaggaacaccggtggcgaaggcgggtctctgggccgttactgacgctgaggagcgaaagcgtggggagcgaacaggattagataccctggtagtccacgccgtaaacgttgggcactaggtgtggggggccttttccgggtcttccgcgccgtagctaacgcattaagtgccccgcctggggagtacggtcgcaaggctaaaactcaaaggaattgacgggggcccgcacaagcggcggagcatgcggattaattcgatgcaacgcgaagaaccttaccaaggcttgacatgtgccggtcggctccggagacggggtttcctccttgtggggccggttcacaggtggtgcatggttgtcgtcagctcgtgtcgtgagatgttgggttaagtcccgcaacgagcgcaacccttgtctcgtgttgccagcacgttgtggtggggactcgcgggagactgccggggtcaactcggaggagggtggggatgacgtcaaatcatcatgccccttatgtcttgggcttcacgcatgctacaatggccggtacagtgggttgcgatgtcgtgaggcggagcgaatccctgaaagccggtctcagttcggatcggtgtctgcaactcgacaccgtgaagttggagtcgctagtaatcgcagatcagcaacgctgcggtgaatacgttctcgggccttgtacacaccgcccgtcacgtcatgaaagtcggcaacacccgaagcccgtggccttatggggagcggtcgaaggtggggctggtgattgggacgaagtcgtaacaaggtagccgtaccggaaggtgcggctggatcacctcctt

SEQ ID NO: 88 - DNA, 1366 bp, Actinomyces sp.
  oral clone JA063
gagtttgatcctggctcaggacgaacgctggcggcgtgcttaacacatgcaagtcgaacgagtggcgaacgggtgagtaacacgtgagtaacctgcccccttcttctggataaccgcatgaaagtgtggctaatacgggatattgaaagttggtgggggatgggctcgcggcctatcagcttgttggtggggtgatggcctaccaaggcggtgacgggtagccggcctgagagggtggacggtcacactgggactgagacacggcccagactcctacgggaggcagcagtggggaatattgcacaatgggcgcaagcctgatgcagcgacgccgcgtgagggatggaggccttcgggttgtgaacctctttcgccagtgaagctgacggtagctggataagaagcgccggctaactacgtgccagcagccgtggtaatacgtagggcgcgagcgttgtccggaattattgggcgtaaagagctcgtaggcggctggtcgcgtctgtcgtgaaatcctctggcttaactgggggcttgcggtgggtacgggccggcttgagtgcggtaggggaggctggaactcctggtgtagcggtggaatgcgcagatatcaggaagaacaccggtggcgaaggcgggtctctgggccgactgacgctgaggagcgaaagcgtggggagcgaacaggattagataccctggtagtccacgccgtaaacgttgggcactaggtgtgggggtttccgcgccgtagctaacgcattaagtgccccgcctggggagtacggccgcaaggctaaaactcaaaggaattgacgggggcccgcacaagcggcggagcatgcggattaattcgatgcaacgcgaagaaccttaccaaggcttgacatgcacaggtggtgcatggttgtcgtcagctcgtgtcgtgagatgttgggttaagtcccgcaacgagcgcaacccttgtctcgtgttgccagcacgtggggactcgcgggagactgccggggtcaactcggaggaaggtggggatgacgtcaaatcatcatgccccttatgtcttgggcttcacgcatgctacaatggccggcagagggctgcgataccgtgaggtggagcgaatcccttccggtctcagttcggacggtgtctgcaactcgacaccggaagttggagtcgctagtaatcgcagatcagcaacgctgcggtgaatacgttctcgggccttgtacacaccgcccgtcacgtcatgaaagtcggcaacacccgaagcccgtgcctgggagcggtcgaaggtggggctggtgattgggacgaagtcgtaacaaggtagccgtaccggaaggtgcggctggaacacctcctt

SEQ ID NO: 89 - DNA, 1563 bp, Actinomyces sp.
  oral taxon 170
tttgtttggagagtttgatcctggctcaggacgaacgctggcggcgtgcttaacacatgcaagtcgaacggtgaagcgccttcctttgtggtgggtgtggatgagtggcgaacgggtgagtaacacgtgagtaacctgcccccttcttctggataaccgcatgaaagtgtggctaatacgggatattctgtgcctgctgcatggtgggtgtgggaaagattgcgcctttgggtgtttttggtgggggatgggctcgcggcctatcagcttgttggtggggtgatggcctaccaaggcggtgacgggtagccggcctgagagggtggacggtcacactgggactgagacacggcccagactcctacgggaggcagcagtggggaatattgcacaatgggcgcaagcctgatgcagcgacgccgcgtgagggatggaggccttcgggttgtgaacctctttcgccagtgaagcaggcctgtccctgtgtgggtgggttgacggtagctggataagaagcgccggctaactacgtgccagcagccgcggtaatacgtagggcgcgagcgttgtccggaattattgggcgtaaagagctcgtaggcggctggtcgcgtctgtcgtgaaatcctctggcttaactgggggcttgcggtgggtacgggccggcttgagtgcggtaggggaggctggaactcctggtgtagcggtggaatgcgcagatatcaggaagaacaccggtggcgaaggcgggtctctgggccgttactgacgctgaggagcgaaagcgtggggagcgaacaggattagataccctggtagtccacgccgtaaacgttgggcactaggtgtggggggccttttccgggttttccgcgccgtagctaacgcattaagtgccccgcctggggagtacggccgcaaggctaaaactcaaaggaattgacgggggcccgcacaagcggcggagcatgcggattaattcgatgcaacgcgaagaaccttaccaaggcttgacatgtgccggtttgcttcggagacggggtttcctcctttgtgggggctggttcacaggtggtgcatggttgtcgtcagctcgtgtcgtgagatgttgggttaagtcccgcaacgagcgcaacccttgtctcgtgttgccagcacgttgtggtggggactcgcgggagactgccggggtcaactcggaggaaggtggggatgacgtcaaatcatcatgccccttatgtcttgggcttcacgcatgctacaatggccggtacagagggctgcgataccgtgaggtggagcgaatcccttaaagccggtctcagttcggatcggtgtctgcaactcgacaccgtgaagttggagtcgctagtaatcgcagatcagcaacgctgcggtgaatacgttctcgggccttgtacacaccgcccgtcacgtcatgaaagtcggcaacacccgaagcccgtggccctatggggagcggtcgaaggtggggctggtgattgggacgaagtcgtaacaaggtagccgtaccggaaggtgcggctggatcacctcctttct

SEQ ID NO: 90 - DNA, 1561 bp, Actinomyces sp.
  oral taxon 171
tttgtttggagagtttgatcctggctcaggacgaacgctggcggcgtgcttaacacatgcaagtcgaacggtgaaggggcctgcttttgtgggtcctggatgagtggcgaacgggtgagtaacacgtgagtaacctgcccccttcttctggataaccgcatgaaagtgtggctaatacgggatattctgtgcctgctgcatggtgggtgtgggaaagattgtgcctttgggtgttttcggtgggggatgggctcgcggcctatcagcttgttggtggggtgatggcctaccaaggcggtgacgggtagccggcctgagagggtggacggtcacactgggactgagacacggcccagactcctacgggaggcagcagtggggaatattgcacaatgggcgcaagcctgatgcagcgacgccgcgtgagggatggaggccttcgggttgtgaacctctttcgccagtgaagcaggcctgtcccttttgtgggtgggttgacggtagctggataagaagcgccggctaactacgtgccagcagccgcggtaatacgtagggcgcgagcgttgtccggaattattgggcgtaaagagctcgtaggcggctggtcgcgtctgtcgtgaaatcctctggcttaactgggggcttgcggtgggtacgggccggcttgagtgcggtaggggagactggaactcctggtgtagcggtggaatgcgcagatatcaggaagaacaccggtggcgaaggcgggtctctgggccgttactgacgctgaggagcgaaagcgtggggagcgaacaggattagataccctggtagtccacgccgtaaacgttgggcactaggtgtggggggccttttccgggtcttccgcgccgtagctaacgcattaagtgccccgcctggggagtacggccgcaaggctaaaactcaaaggaattgacgggggcccgcacaagcggcggagcatgcggattaattcgatgcaacgcgaagaaccttaccaaggcttgacatgtgccggtcggctccggagacggggtttcctccttgtggggccggttcacaggtggtgcatggttgtcgtcagctcgtgtcgtgagatgttgggttaagtcccgcaacgagcgcaacccttgtcccgtgttgccagcacgttgtggtggggactcgcgggagactgccggggtcaactcggaggaaggtggggatgacgtcaaatcatcatgccccttatgtcttgggcttcacgcatgctacaatggccggtacagagggctgcgataccgtgaggtggagcgaatcccttaaagccggtctcagttcggatcggtgtctgcaactcgacaccgtgaagttggagtcgctagtaatcgcagatcagcaacgctgcggtgaatacgttctcgggccttgtacacaccgcccgtcacgtcatgaaagtcggcaacacccgaagcccgtggccctacggggagcggtcgaaggtggggctggtgattgggacgaagtcgtaacaaggtagccgtaccggaaggtgcggctggatcacctcctttct

SEQ ID NO: 91 - DNA, 1551 bp, Actinomyces sp.
  oral taxon 178
tttgttcggagagtttgatcctggctcaggacgaacgctggcggcgtgcttaacacatgcaagtcgaacgcgcctgtcctctggttttccggggggtgggtgagtggcgaacgggtgagtaacacgtgagtaacctgcccccttcttcgggataacggtctgaaagggctgctaataccgggtattcactggtctccgcatggggtctggtggaaaggttttttctggtgggggatgggctcgcggcctatcagcttgttggtggggtgatggcccaccaaggctttgacgggtagccggcctgagagggtgaccggtcacattgggactgagatacggcccagactcctacgggaggcagcagtggggaatattgcacaatgggcgcaagcctgatgcagcgacgccgcgtgagggatggaggccttcgggttgtgaacctctttcgcccgtggtcaagccgcgacgtgggtcgtggtgagggtagtgggtaaagaagcgccggctaactacgtgccagcagccgcggtaatacgtagggcgcgagcgttgtccggaattattgggcgtaaagggcttgtaggcggctggtcgcgtctgccgtgaaatcctctggctcaactgggggcgtgcggtgggtacgggctggcttgagtgcggtaggggaggctggaactcctggtgtagcggtggaatgcgcagatatcaggaagaacaccggtggcgaaggcgggtctctgggccgttactgacgctgaggagcgaaagcgtggggagcgaacaggattagataccctggtagtccacgctgtaaacgttgggcactaggtgtgggggccacccgtggttcccgcgccgtagctaacgctttaagtgccccgcctggggagtacggccgcaaggctaaaactcaaaggaattgacgggggcccgcacaagcggcggagcatgcggattaattcgatgcaacgcgaagaaccttaccaaggcttgacatgcgccccgggcgcgcggagacgcgcgcgcatttggttgggggtgtgcaggtggtgcatggttgtcgtcagctcgtgtcgtgagatgttgggttaagtcccgcaacgagcgcaacccttgccctatgttgccagcgcgttgtggcggggactcgtgggggactgccggggttaactcggaggaaggtggggatgacgtcaaatcatcatgccccttatgtcttgggcttcacgcatgctacaatggccggtacagagggttgcgatgccgtgaggcggggcgaatcccttaaagccggtctcagttcggattggggtctgcaactcgaccccatgaaggtggagtcgctagtaatcgcagatcagcaacgctgcggtgaatacgttctcgggccttgtacacaccgcccgtcacgtcacgaaagttggtaacgcccgaagcccatggcccaaccggctcttgctggggggagtggtcgaaggtgggatcggcgattgggacgaagtcgtaacaaggtagccgtaccggaaggtgcggctggatcacctcctttct

SEQ ID NO: 92 - DNA, 1545 bp, Actinomyces sp.
  oral taxon 180
tttgttcggagagtttgatcctggctcaggacgaacgctggcggcgtgcttaacacatgcaagtcgaacgctgaagctcagcttttgttgggtggatgagtggcgaacgggtgagtaacacgtgagtaacctgcccccttctttgggataacgcccggaaacgggtgctaatactggatattcactggtcttcgcatgggggttggtggaaagggtttttctggtgggggatgggctcgcggcctatcagcttgttggtggggtgatggcctaccaaggctttgacgggtagccggcctgagagggtgaccggtcacattgggactgagatacggcccagactcctacgggaggcagcagtggggaatattgcacaatgggcgcaagcctgatgcagcgacgccgcgtgagggatggaggccttcgggttgtgaacctctttcgctcatggtcaagccgcaacaatggttgtggtgagggtagtgggtaaagaagcgccggctaactacgtgccagcagccgcggtaatacgtagggcgcgagcgttgtccggaattattgggcgtaaagggcttgtaggcggttggtcgcgtctgccgtgaaatcctctggcttaactgggggcgtgcggtgggtacgggctgacttgagtgcggtaggggagactggaactcctggtgtagcggtggaatgcgcagatatcaggaagaacaccggtggcgaaggcgggtctctgggccgttactgacgctgaggagcgaaagcgtggggagcgaacaggattagataccctggtagtccacgctgtaaacgttgggcactaggtgtgggggccacccgtggtttctgcgccgtagctaacgctttaagtgccccgcctggggagtacggccgcaaggctaaaactcaaaggaattgacgggggcccgcacaagcggcggagcatgcggattaattcgatgcaacgcgaagaaccttaccaaggcttgacatgcacggcggcactgcagagatgtggtggcatttagttggtcgtgtgcaggtggtgcatggttgtcgtcagctcgtgtcgtgagatgttgggttaagtcccgcaacgagcgcaacccttgccctatgttgccagcacgtgatggtggggactcgtgggggactgccggggttaactcggaggaaggtggggatgacgtcaaatcatcatgccccttatgtcttgggcttcacgcatgctacaatggttggtacagagggttgcgatactgtgaggtggagcgaatcccttaaagccagtctcagttcggattggggtctgcaactcgaccccatgaaggtggagtcgctagtaatcgcagatcagcaacgctgcggtgaatacgttctcgggccttgtacacaccgcccgtcacgtcacgaaagttggtaacacccgaagcccatggcctaaccgcttttgcggggggagtggtcgaaggtgggattggcgattgggacgaagtcgtaacaaggtagccgtaccggaaggtgcggctggatcacctcctttct

SEQ ID NO: 93 - DNA, 1548 bp, Actinomyces sp.
  oral taxon 848
tttttgtggagagtttgatcctggctcaggacgaacgctggcggcgtgcttaacacatgcaagtcgaacgatgaagcgctgtctttttgatggtgtggattagtggcgaacgggtgagtaatacgcgggcaacctgcccctctgcttcgggataagctttggaaacggggtctaataccggatgtgcctgtctggtcgcatggctgggcggggaaagatgtttttcggcgggggatgggctcgcggcctatcagcttgttggtggggtgacggcctaccaaggcgtcgacgggtagccggcctgagagggtggtcggccacactgggactgagatacggcccagactcctacgggaggcagcagtgggggatattgcacaatgggcgcaagcctgatgcagcgacgccgcgtgggggatggaggctttcgggttgtaaacccctttcggcgcgggacaaggctccgtttggcggggttgagggtacgcgtcaaagaagcgccggctaactacgtgccagcagccgcggtaatacgtagggcgcgagcgttgtccggaattattgggcgtaaagggctcgtaggcggcttgtcgcgtctgctgtgaaaacgcggggctcaactccgcgcgtgcagtgggtacgggcaggctggagtgcggcaggggtggctggaattcctggtgtagcggtggaatgcgcagatatcaggaagaacaccgatggcgaaggcaggccactgggccgtcactgacgctgaggagcgaaagcgtggggagcgaacaggattagataccctggtagtccacgctgtaaacgttgggaactaggtgtggggtctgttccacggattctgcgccggagctaacgcgttaagttccccgcctggggagtacggccgcaaggctaaaactcaaaggaattgacgggggcccgcacaagcggcggagcatgcggattaattcgatgcaacgcgaagaaccttaccaaggcttgacatgtgccgggagggcgcggagacgcgtctgccttcgggccggttcacaggtggtgcatggttgtcgtcagctcgtgtcgtgagatgttgggttaagtcccgcaacgagcgcaacccttgtcccgtgttgccagcgcgttgtggcggggactcacgggggactgccggggtcaactcggaggaaggtggggacgacgtcaaatcatcatgccccttatgccttgggcttcacgcatgctacaatggccggtacagagggtggcgatgccgtgaggcggagcgaatcttgtaaagccggtctcagttcggatcggggtctgcaactcgggcccgtgaagtcggagtcgctagtaatcgcagatcagcaacgctgcggtgaatacgttctcgggccttgtacacaccgcccgtcacgtcacgaaagtcggcgacgcccgaagcccgtggctctgcttgtgcggggagcggtcgaaggcggggttggcgattgggacgaagtcgtaacaaggtagccgtaccggaaggtgcggctggatcacctcctttctagggag

SEQ ID NO: 94 - DNA, 1505 bp, Actinomyces sp.
  oral taxon C55
agagtttgatcctggctcaggacgaacgctggcggcgtgcttaacacatgcaagtcggacggactgcttgggggcttgctcctgggtggtgagtggcgaacgggtgagtaacacgtgagtaacctgccctcttcttcgggataacggttggaaacggctgctaataccgggtattcactggtcctcgcatgggggttggtggaaaggggtttttctggtgggggatgggctcgcggcttatcagcttgttggtggggtgatggcttaccaaggctttgacgggtagccggcctgagagggtgaccggtcacattgggactgagatacggcccagactcctacgggaggcagcagtggggaattttgcacaatgggcgcaagcctgatgcagcgacgccgcgtgagggatggaggccttcgggttgtgaacctctttcgctcatggtcaagccgcagttttgtctgtggtgagggtagtgggtaaagaagcgccggctaactacgtgccagcagccgcggtaatacgtagggcgcgagcgttgtccggaattattgggcgtaaagggcttgtaggcggcttgtcgcgtctgccgtgaaatcctctggcttaactgggggcgtgcggtgggtacgggctggcttgagtgcggtaggggagactggaattcctggtgtagcggtggaatgcgcagatatcaggaggaacaccggtggcgaaggcgggtctctgggccgttactgacgctgaggaacgaaagcatggggagcgaacaggattagataccctggtagtccatgctgtaaacgttgggcactaggtgtgggggccgtccttggtttctgcgccgtagctaacgctttaagtgccccgcctggggagtacggccgcaaggctaaaactcaaaggaattgacgggggcccgcacaagcggcggagcatgcggattaattcgatgcaacgcgaagaaccttaccaaggcttgacatgcaccgcgacactgcagagatgtggtggccttcggggtggtgtgcaggtggtgcatggttgtcgtcagctcgtgtcgtgagatgttgggttaagtcccgcaacgagcgcaacccttgccctatgttgccagcacgttgtggtggggactcgtgggggactgccggggttaactcggaggaaggtggggatgacgtcaaatcatcatgccccttatgtcttgggcttcacgcatgctacaatggcaggtacagagggttgcgatgccgtgaggtggagcgaatcccttaaagcttgtctcagttcggattggggtctgcaactcgaccccatgaaggtggagtcgctagtaatcgcagatcagcaacgctggggtgaatacgttctcgggccttgtacacaccgcccgtcacgtcacgaaagttggtaacacccgaagcccatggcccaaccatttcggtggggggagtggtcgaaggtgggattggcgattgggacgaagtcgtaacaaggtagccgt

SEQ ID NO: 95 - DNA, 1543 bp, Actinomyces urogenitalis
tttgtttggagagtttgatcctggctcaggacgaacgctggcggcgtgcttaacacatgcaagtcgaacggtgaagctccagcttgctggggtggatgagtggcgaacgggtgagtaacacgtgagtaacctgcccccttcttctggataactgcttgaaagggtagctaatacgggatattctggcctgctcgcatgggtgggtttggaaaggttttttctggtgggggatgggctcgcggcctatcagcttgttggtggggtgatggcctaccaaggcggtgacgggtagccggcctgagagggtggacggccacactgggactgagacacggcccagactcctacgggaggcagcagtggggaatattgcacaatgggcgcaagcctgatgcagcgacgccgcgtgagggatggaggccttcgggttgtaaacctctttcgccagtgaagcaggccatcttctttgtggggtggttgacggtagctggataagaagcgccggctaactacgtgccagcagccgcggtaatacgtagggcgcgagcgttgtccggaattattgggcgtaaagagctcgtaggcggctggtcgcgtctgtcgtgaaatcccctggcttaactgggggcttgcggtgggtacgggccggcttgagtgcggtaggggagactggaattcctggtgtagcggtggaatgcgcagatatcaggaggaacaccggtggcgaaggcgggtctctgggccgttactgacgctgaggagcgaaagcgtggggagcgaacaggattagataccctggtagtccacgccgtaaacgttgggcactaggtgtgggggctctttccggggtttccgcgccgtagctaacgcattaagtgccccgcctggggagtacggccgcaaggctaaaactcaaaggaattgacgggggcccgcacaagcggcggagcatgcggattaattcgatgcaacgcgaagaaccttaccaaggcttgacatgtgagcgtctgcctcagagatggggtttcctccttgtggggcgctttcacaggtggtgcatggttgtcgtcagctcgtgtcgtgagatgttgggttaagtcccgcaacgagcgcaacccttgtcccgtgttgccagcacgttgtggtggggactcgcgggagactgccggggtcaactcggaggaaggtggggatgacgtcaaatcatcatgccccttatgtcttgggcttcacgcatgctacaatggccggtacagagggttgcgatgtcgtgaggcggagcgaatcccttaaagccggtctcagttcggatcggtgtctgcaactcgacaccgtgaagttggagtcgctagtaatcgcagatcagcaacgctgcggtgaatacgttctcgggccttgtacacaccgcccgtcacgtcatgaaagtcggcaacacccgaagcccgtggccttacggggagcggtcgaaggtggggctggtgattgggacgaagtcgtaacaaggtagccgtaccggaaggtgcggctggatcacctcctttct

SEQ ID NO: 96 - DNA, 1556 bp, Actinomyces viscosus
tttgtttggagagtttgatcctggctcaggacgaacgctggcggcgtgcttaacacatgcaagtcgaacggtgaagggatcagcttgctggttctggatgagtggcgaacgggtgagtaacacgtgagtaacctgcccccttcttctggataaccgcatgaaagtgtggctaatacgggatattctgggtctgtcgcatggcgggcctgggaaagatgcgcctttgggtgtttttggtgggggatgggctcgcggcctatcagcttgttggtggggtgatggcctaccaaggcggtgacgggtagccggcctgagagggtggacggtcacactgggactgagacacggcccagactcctacgggaggcagcagtggggaatattgcacaatgggcgcaagcctgatgcagcgacgccgcgtgagggatggaggccttcgggttgtaaacctctttcgccagtgaagcaggcctgtcccttgtgggtgggttgacggtagctggataagaagcgccggctaactacgtgccagcagccgcggtaatacgtagggcgcgagcgttgtccggaattattgggcgtaaagagctcgtaggcggctggtcgcgtctgtcgtgaaatcctctggcttaactgggggcttgcggtgggtacgggccggcttgagtgcggtaggggagactggaactcctggtgtagcggtggaatgcgcagatatcaggaagaacaccggtggcgaaggcgggtctctgggccgttactgacgctgaggagcgaaagcgtggggagcgaacaggattagataccctggtagtccacgccgtaaacgttgggcactaggtgtggggggccttttccgggtcttccgcgccgtagctaacgcattaagtgccccgcctggggagtacggccgcaaggctaaaactcaaaggaattgacgggggcccgcacaagcggcggagcatgcggattaattcgatgcaacgcgaagaaccttaccaaggcttgacatgtgccggtcggctccggagacggggtttcctccttgtggggccggttcacaggtggtgcatggttgtcgtcagctcgtgtcgtgagatgttgggttaagtcccgcaacgagcgcaacccttgtcccgtgttgccagcacgttgtggtggggactcgcgggagactgccggggtcaactcggaggaaggtggggatgacgtcaaatcatcatgccccttatgtcttgggcttcacgcatgctacaatggccggtacagagggctgcgataccgtgaggtggagcgaatcccttaaagccggtctcagttcggatcggtgtctgcaactcgacaccgtgaagttggagtcgctagtaatcgcagatcagcaacgctgcggtgaatacgttctcgggccttgtacacaccgcccgtcacgtcatgaaagtcggcaacacccgaagcccgtggccctacggggagcggtcgaaggtggggctggtgattgggacgaagtcgtaacaaggtagccgtaccggaaggtgcggctggatcacctcctttct

SEQ ID NO: 97 - DNA, 1331 bp, Adlercreutzia equolifaciens
gagtttgatcctggctcaggatgaacgctggcggcgtgcttaacacatgcaagtcgaacgagtggcgaacgggtgagtaacacgtgaccaacctgccccgcgctccgggacaaccgctggaaacggcggctaataccggatgctgaaagcggcgcgggatggggtcgcggcccattaggtagacggcggggtaacggcccaccgtgcccgcgatgggtagccggactgagaggtcgaccggccacattgggactgagatacggcccagactcctacgggaggcagcagtggggaattttgcgcaatgggggcaaccctgacgcagcaacgccgcgtgcgggacgaaggccttcgggttgtaaaccgctttcagcagggaagaagacggtacctgcagaagaagctccggctaactacgtgccagcagccgcggtaatacgtagggggcgagcgttatccggattcattgggcgtaaagcgcgcgtaggcggccgcctaagcggaacctctaatcccggggctcaacctcgggccgggttccggactgggcggctcgagtgcggtagaggcaggcggaattcccggtgtagcggtggaatgcgcagatatcgggaagaacaccgatggcgaaggcagcctgctgggccgactgacgctgaggcgcgaaagctgggggagcgaacaggattagataccctggtagtcccagccgtaaacgatggacgctaggtgtgggggcccccgtgccgcagccaacgcattaagcgtcccgcctggggagtacggccgcaaggctaaaactcaaaggaattgacgggggcccgcacaagcagcggagcatgtggcttaattcgaagcaacgcgaagaaccttaccagggcttgacatgcgcaggtggtgcatggctgtcgtcagctcgtgtcgtgagatgttgggttaagtcccgcaacgagcgcaacccccgtcccgtgttgccagcatggggactcgcgggagactgccggcgtcaagccggaggaaggtggggacgacgtcaagtcatcatgccccttatgccctgggctgcacacgtgctacaatggccggcagagggttgccaccccgcgagggggagcggatcccggccggtcccagttcggacgcaggctgcaacccgcctgcggaagtcggagttgctagtaatcgcggatcagcatgccgcggtgaatacgttcccgggccttgtacacaccgcccgtcacaccacccgagtcgtctgcacccgaagccgccgccgacggaggcgtcgaaggtgtggagggtaaggggggtgaagtcgtaacaaggtaacc

SEQ ID NO: 98 - DNA, 1488 bp, Aerococcus sanguinicola
ctcaggacgaacgctggcggcatgcctaatacatgcaagtcgagcgaaccgacgaagtgcttgcacttctgacgttagcggcggacgggtgagtaacacgtaaggaacctacctatgagcgggggacaacatccggaaacgggtgctaataccgcatagtaatttgtcaggcatctgacaaattggaaagacggcttttgctgtcactcatagatggtcttgcggtgcattagctagttggtgggataaaagcttaccaaggccatgatgcatagccgacctgagagggtaatcggccacactgggactgagacacggcccagactcctacgggaggcagcagtagggaatcttccgcaatgggcgcaagcctgacggagcaatgccgcgtgagtgaagaaggttttcggatcgtaaaactctgttgtaagagaagaacaaattgtagagtaactgctacagtcttgacggtatcttaccagaaagccacggctaactacgtgccagcagccgcggtaatacgtaggtggcaagcgttgtccggatttattgggcgtaaagggagcgcaggtggtttcttaagtctgatgtgaaagcccacggcttaaccgtggagggtcattggaaactgggaaacttgagtgcagaagaggaaagtggaactccatgtgtagcggtggaatgcgtagatatatggaagaacaccagtggcgaaggcgactttctggtctgtaactgacactgaggctcgaaagcgtgggtagcaaacaggattagataccctggtagtccacgccgtaaacgatgagtgctaggtgttggagggtttccgcccttcagtgccgcagttaacgcattaagcactccgcctggggagtacggccgcaaggctgaaactcaaaggaattgacggggacccgcacaagcggtggagcatgtggtttaattcgaagcaacgcgaagaaccttaccaagtcttgacatcctttgaccactctagagatagagctttcccttcggggacaaagtgacaggtggtgcatggttgtcgtcagctcgtgtcgtgagatgttgggttaagtcccgcaacgagcgcaacccttattgttagttgccagcatttagttgggcactctagcgagactgccggtgacaaaccggaggaaggcggggatgacgtcaaatcatcatgccccttatgacttgggctacacacgtgctacaatggatggtacaacgggctgcgaactcgcgagagtcagcgaatcccttaaagccattctcagttcggattgcaggctgcaactcgcctgcatgaagccggaatcgctagtaatcgcggatcagcacgccgcggtgaatacgttcccgggtcttgtacacaccgcccgtcacaccacgagagtttgtaacacccgaagtcggtgaggtaaccttttggagccagccgccgaaggtgggacagatgattggggtgaagtcgtaaca

SEQ ID NO: 99 - DNA, 1546 bp, Aerococcus urinae
atgagagtttgatcctggctcaggacgaacgctggcggcgtgcctaatacatgcaagtcgagcgaaccgaagaagtgcttgcacttctgacgttagcggcggacgggtgagtaacacgtaaggaacctaccgataagcgggggacaacatccggaaacgggtgctaataccgcataggaaacaccacctcatggtggtgtttggaaagacggctttgctgtcacttatcgatggccttgcggtgcattagctcgttggtggggtaacggcctaccaaggcaatgatgcatagccgacctgagagggtaatcggccacattgggactgagacacggcccaaactcctacgggaggcagcagtagggaatcttccgcaatgggcgcaagcctgacggagcaacgccgcgtgagtgaagaaggttttcggatcgtaaagctctgttgtaagagaagaacaaattggagagtaactgctccagtcttgacggtatcttaccagaaagccacggctaactacgtgccagcagccgcggtaatacgtaggtggcaagcgttgtccggatttattgggcgtaaagggggcgcaggcggtttcttaagtctgatgtgaaagcccacggcttaaccgtggaagtgcattggaaactggggaacttgagtacagaagaggaaagtggaactccatgtgtagcggtggaatgcgtagatatatggaagaacaccagtggcgaaggcgactttctggtctgtcactgacgctgaggcccgaaagcgtgggtagcaaacaggattagataccctggtagtccacgccgtaaacgatgagtgctaggtgttggagggtttccacccttcagtgccggagttaacgcattaagcactccgcctggggagtacggccgcaaggctgaaactcaaaggaattgacggggacccgcacaagcggtggagcatgtggtttaattcgaagcaacgcgaagaaccttaccaagtcttgacatcctttgaccactctagagatagagctttcccttcggggacaaagtgacaggtggtgcatggttgtcgtcagctcgtgtcgtgagatgttgggttaagtcccgcaacgagcgcaacccttattgttagttgccagcattgagttgggcactctagcgagactgccggtgacaaaccggaggaaggcggggatgacgtcaaatcatcatgccccttatgacttgggctacacacgtgctacaatggatggtacaacgagcagcgaccttgtgaaagcaagcgaatctcttaaagccattctcagttcggattgtagtctgcaactcgactacatgaagccggaatcgctagtaatcgcggatcagcacgccgcggtgaatacgttcccgggtcttgtacacaccgcccgtcacaccacgagagtttgtaacacctgaagtcggtgaggtaacctttggagccagccgccgaaggtgggacagatgattggggtgaagtcgtaacaaggtagccgtaggtgaacctgcggctggatcacctcctttct

SEQ ID NO: 100 - DNA, 1419 bp, Aerococcus urinaeequi
  modified_base (1092)..(1092): a, c, t, g, unknown or other
acatgcaagtcgagcgaacagatgaagtgcttgcacttctgacgttagcggcgaacgggtgagtaacacgtaaggaatctacctataagcgggggataacattcggaaacgggtgctaataccgcataatatcttcttccgcatggaaggagattgaaagacggctctgctgtcacttatagatgaccttgcggtgcattagttagttggtggggtaacggcctaccaagacgatgatgcatagccgacctgagagggtgatcggccacattgggactgagacacggcccaaactcctacgggaggcagcagtagggaatcttccgcaatgggcgaaagcctgacggagcaatgccgcgtgagtgaagaaggccttcgggtcgtaaaactctgttataagagaagaacaaattgtagagtaactgctacagtcttgacggtatcttatcagaaagccacggctaactacgtgccagcagccgcggtaatacgtaggtggcaagcgttgtccggatttattgggcgtaaagggagcgcaggtggtttcttaagtctgatgtgaaagcccacggcttaaccgtggagggtcattggaaactgggaaacttgagtacagaagaggaatgtggaactccatgtgtagcggtggaatgcgtagatatatggaagaacaccagtggcgaaggcgacattctggtctgttactgacactgaggctcgaaagcgtggggagcaaacaggattagataccctggtagtccacgccgtaaacgatgagtgctaggtgttggagggtttccgcccttcagtgccgcagttaacgcattaagcactccgcctggggagtacgaccgcaaggttgaaactcaaaggaattgacggggacccgcacaagcggtggagcatgtggtttaattcgaagcaacgcgaagaaccttaccaagtcttgacatcctttgaccaccctagagatagggctttcccttcggggacaaagtgacaggtggtgcatggttgtcgtcagctcgtgtcgtgagatgttgggttaagtcccgcaacgagcgcaacccctattattagttgccagcattnagttgggcactctaatgagactgccggtgacaaaccggaggaaggtggggatgacgtcaaatcagcatgccccttatgacttgggctacacacgtgctacaatggatggtacaacgagtcgcaaacccgcgagggcaagcaaatctcttaaagccattctcagttcggattgcaggctgcaactcgcctgcatgaagccggaatcgctagtaatcgtggatcagcacgccacggtgaatacgttcccgggtcttgtacacaccgcccgtcacaccacgagagtttgtaacacccgaagtcggtgaggtaacctttatggagccagcc

SEQ ID NO: 101 - DNA, 1548 bp, Aerococcus viridans
atgagagtttgatcctggctcaggacgaacgctggcggcatgcctaatacatgcaagtcgagcgaacagatgaagtgcttgcacttctgacgttagcggcgaacgggtgagtaacacgtaaggaatctacctataagcgggggataacattcggaaacgggtgctaataccgcataatattttcttccgcatggaagaagattgaaagacggctctgctgtcacttatagatgaccttgcggtgcattagttagttggtggggtaatggcctaccaagacgatgatgcatagccgacctgagagggtgatcggccacattgggactgagacacggcccaaactcctacgggaggcagcagtagggaatcttccgcaatgggcgaaagcctgacggagcaatgccgcgtgagtgaagaaggccttcgggtcgtaaaactctgttataagagaagaacaaattgtagagtaactgctacagtcttgacggtatcttatcagaaagccacggctaactacgtgccagcagccgcggtaatacgtaggtggcaagcgttgtccggatttattgggcgtaaagggagcgcaggtggtttcttaagtctgatgtgaaagcccacggcttaaccgtggagggtcattggaaactgggaaacttgagtacagaagaggaatgtggaactccatgtgtagcggtggaatgcgtagatatatggaagaacaccagtggcgaaggcgacattctggtctgttactgacactgaggctcgaaagcgtggggagcaaacaggattagataccctggtagtccacgccgtaaacgatgagtgctaggtgttggagggtttccgcccttcagtgccgcagttaacgcattaagcactccgcctggggagtacgaccgcaaggttgaaactcaaaggaattgacggggacccgcacaagcggtggagcatgtggtttaattcgaagcaacgcgaagaaccttaccaagtcttgacatcctttgaccaccctagagatagggctttcccttcggggacaaagtgacaggtggtgcatggttgtcgtcagctcgtgtcgtgagatgttgggttaagtcccgcaacgagcgcaacccctattattagttgccagcatttagttgggcactctaatgagactgccggtgacaaaccggaggaaggtggggatgacgtcaaatcagcatgccccttatgacttgggctacacacgtgctacaatggatggtacaacgagtcgcaaacccgcgagggcaagcaaatctcttaaagccattctcagttcggattgcaggctgcaactcgcctgcatgaagccggaatcgctagtaatcgtggatcagcacgccacggtgaatacgttcccgggtcttgtacacaccgcccgtcacaccacgagagtttgtaacacccgaagtcggtgaggtaacctttatggagccagccgccgaaggtgggacagatgattggggtgaagtcgtaacaaggtagccgtatcggaaggtgcggctggatcacctcctttct

SEQ ID NO: 102 - DNA, 1357 bp, Aeromicrobium marinum
aagtygagcggtaaggctccttcgggagtacacgagcggcgaacgggtgagtaacacgtgagcaatctgcccttctcttcggaataaccattggaaacgatggctaatgccgaatacgacctcggatcacatgttctgaggtggaaagctccggcggagaaggatgagctcgcggcctatcagctagttggtgaggtaacggctcaccaaggcattgacgggtagccggcctgagagggtgaccggccacactgggactgagacacggcccagactcctacgggaggcagcagtggggaatattggacaatgggcgaaaccttgatccagcaacgccgcgtgagggatgacggccttcgggttgtaaacctctttcagcggggacgaagcgaaagtgacggtacccgcagaagaaggacckgccaactacgtgccagcagccgcggtaatacgtagggtccgagcgttgtccggaattattgggcgtaaagggctcgtaggcggtttgtcgcgtcgggagtgaaaactcagggctcaaccctgagcgtgcttccgatacgggcagactagaggtatgcaggggagaacggaattcctggtgtagcggtggaatgcgcagatatcaggaggaacaccggtggcgaaggcggttctctgggcattacctgacgctgaggagcgaaagcatggggagcgaacaggattagataccctggtagtccatgccgtaaacgttgggcgctaggtgtggggaccttccacggtctccgtgccgcagctaacgcattaagcgccccgcctggggagtacggccgcaaggctaaaactcaaaggaattgacgggggcccgcacaagcggcggagcatgctgattaattcgatgcaacgcgaagaaccttacctgggtttgacatataccggaaagctgcagagatgtagccccccttgtggtcggtatacaggtggtgcatggctgtcgtcagctcgtgtcgtgagatgttgggttaagtcccgcaacgagcgcaaccctcgttctatgttgccagcacgtaatggtggggactcataggagactgccggggtcaactcggaggaaggtggggatgacgtcaagtcttcatgccccttatgtccagggcttcaagcatgctacaatggccggtacaaagggctgcgaaaccgcaaggtggagcgaatcccaaaaagccggtctcagttcggattggggtctgcaactcgaccccatgaagtcggagtcgctagtaatcgcagatcagcaacgctgcggtgaatacgttcccgggccttgtacacaccgcccgtcacgtcatgaaagtcgcaacacccgaagccagtg

SEQ ID NO: 103 - DNA, 1468 bp, Aeromicrobium sp.
  JC14
ctggctcaggacgaacgctggcggcgtgcttaacacatgcaagtcgagcggtaaggccctttcgggggtacacgagcggcgaacgggtgagtaacacgtgagcaatctgcccctgtctctgggataaccactggaaacggtggctaataccggatatgacctccttctgcatggttggtggtggaaaagtccgctggacagggatgagctcgcggcctatcagcttgttggtggggtaatggcctaccaaggcgacgacgggtagccggcctgagagggtgaccggccacactgggactgagacacggcccagactcctacgggaggcagcagtggggaatattggacaatgggcgaaagcctgatccagcaacgccgcgtgagggatgacggccttcgggttgtaaacctctttcagcagggacgaagcgaaagtgacggtacctgcagaagaaggaccggccaactacgtgccagcagccgcggtaatacgtagggtccgagcgttgtccggaattattgggcgtaaagggctcgtaggcggtttgtcacgtcgggagtgaaaactcagggcttaaccctgagcgtgcttccgatacgggctgactagagggatgcaggggagaacggaattcctggtgtagcggtggaatgcgcagatatcaggaggaacaccggtggcgaaggcggttctctgggcatttcctgacgctgaggagcgaaagcatggggagcgaacaggattagataccctggtagtccatgccgtaaacgttgggcgctaggtgtggggaccttccacggtttccgtgccgcagctaacgcattaagcgccccgcctggggagtacggccgcaaggctaaaactcaaaggaattgacgggggcccgcacaagcggcggagcatgctgattaattcgatgcaacgcgaagaaccttacctgggtttgacatatgccggaaagcgccagagatggtgcccctttttgtcggtatacaggtggtgcatggctgtcgtcagctcgtgtcgtgagatgttgggttaagtcccgcaacgagcgcaaccctcgtcctatgttgccagcacgttatggtggggactcataggagactgccggggtcaactcggaggaaggtggggatgacgtcaagtcatcatgccccttatgtccagggcttcaagcatgctacaatggccggtacaatgggctgcgataccgcgaggtggagcgaatcccaaaaagccggtctcagttcggattggggtctgcaactcgaccccatgaagtcggagtcgctagtaatcgcagatcagcaacgctgcggtgaatacgttcccgggccttgtacacaccgcccgtcacgtcatgaaagtcggcaacacccgaagccggtggcctaacccttgtggagggagccgtcgaaggtggggctggcgattgggacgaagtcgtaacaagtagccgta

SEQ ID NO: 104 - DNA, 1503 bp, Aeromonas allosaccharophila
gagtttgatcatggctcagattgaacgctggcggcaggcctaacacatgcaagtcgagcggcagcgggaaagtagcttgctacttttgccggcgagcggcggacgggtgagtaatgcctggggatctgcccagtcgagggggataacagttggaaacgactgctaataccgcatacgccctacgggggaaagcaggggaccttcgggccttgcgcgattggatgaacccaggtgggattagctagttggtgaggtaatggctcaccaaggcgacgatccctagctggtctgagaggatgatcagccacactggaactgagacacggtccagactcctacgggaggcagcagtggggaatattgcacaatgggggaaaccctgatgcagccatgccgcgtgtgtgaagaaggccttcgggttgtaaagcactttcagcgaggaggaaaggttggtagcgaataactgccagctgtgacgttactcgcagaagaagcaccggctaactccgtgccagcagccgcggtaatacggagggtgcaagcgttaatcggaattactgggcgtaaagcgcacgcaggcggttggataagttagatgtgaaagccccgggctcaacctgggaattgcatttaaaactgtccagctagagtcttgtagaggggggtagaattccaggtgtagcggtgaaatgcgtagagatctggaggaataccggtggcgaaggcggccccctggacaaagactgacgctcaggtgcgaaagcgtggggagcaaacaggattagataccctggtagtccacgccgtaaacgatgtcgatttggaggctgtgtccttgagacgtggcttccggagctaacgcgttaaatcgaccgcctggggagtacggccgcaaggttaaaactcaaatgaattgacgggggcccgcacaagcggtggagcatgtggtttaattcgatgcaacgcgaagaaccttacctggccttgacatgtctggaatccctaagagattggggagtgccttcgggaatcagaacacaggtgctgcatggctgtcgtcagctcgtgtcgtgagatgttgggttaagtcccgcaacgagcgcaacccctgtcctttgttgccagcacgtaatggtgggaactcaagggagactgccggtgataaaccggaggaaggtggggatgacgtcaagtcatcatggcccttacggccagggctacacacgtgctacaatggcgcgtacagagggctgcaagctagcgatagtgagcgaatcccaaaaagcgcgtcgtagtccggatcggagtctgcaactcgactccgtgaagtcggaatcgctagtaatcgcaaatcagaatgttgcggtgaatacgttcccgggccttgtacacaccgcccgtcacaccatgggagtgggttgcaccagaagtagatagcttaaccttcgggagggcgtttaccacggtgtgattcatgactggggtgaagtcgtaacaaggtaa

SEQ ID NO: 105 - DNA, 1490 bp, Aeromonas enteropelogenes
  modified_base (187)..(187): a, c, t, g, unknown or other
  modified_base (197)..(197): a, c, t, g, unknown or other
  modified_base (212)..(212): a, c, t, g, unknown or other
  modified_base (662)..(664): a, c, t, g, unknown or other
  modified_base (677)..(677): a, c, t, g, unknown or other
  modified_base (1009)..(1009): a, c, t, g, unknown or other
  modified_base (1107)..(1107): a, c, t, g, unknown or other
  modified_base (1115)..(1115): a, c, t, g, unknown or other
  modified_base (1329)..(1329): a, c, t, g, unknown or other
agtttgatcatggctcagattgaacgctggcggcaggcctaacacatgcaagtcgagcggcagcgggaaagtagcttgctacttttgccggcgagcggcggacgggtgagtaatgcctgggaaattgcccagtcgagggggataacagttggaaacgactgctaataccgcatacgcctacgggggnaagcaggggnccttcgggccttgcncgattggatatgcccaggtgggattagctagttggtgaggtaatggctcaccaaggcgacgatccctagctggtctgagaggatgatcagccacactggaactgagacacggtccagactcctacgggaggcagcagtggggaatattgcacaatgggggaaaccctgatgcagccatgccgcgtgtgtgaagaaggccttcgggttgtaaagcactttcagcgaggaggaaaggtcagtagctaatatctgctggctgtgacgttactcgcagaagaagcaccggctaactccgtgccagcagccgcggtaatacggagggtgcaagcgttaatcggaattactgggcgtaaagcgcacgcaggcggttggataagttagatgtgaaagccccgggctcaacctgggaattgcatttaaaactgtccggctagagtcttgtagaggggnnnagaattccaggtntagcggtgaaatgcgtagagatctggaggaataccggtggcgaaggcggccccctggacaaagactgacgctcaggtgcgaaagcgtggggagcaaacaggattagataccctggtagtccacgccgtaaacgatgtcgatttggaggctgtgtccttgagacgtggcttccggagctaacgcgttaaatcgaccgcctggggagtacggccgcaaggttaaaactcaaatgaattgacgggggccgcacaagcggtggagcatgtggtttaattcgatgcaacgcgaagaaccttacctggccttgacatgtctggaatcctgcagagatncgggagtgccttcgggaatcagaacacaggtgctgcatggctgtcgtcagctcgtgtcgtgagatgttgggttaagtcccgcaacgagcgcaaccccngtcctttnttgccagcacgtaatggtgggaactcaagggagactgccggtgataaaccggaggaaggtggggatgacgtcaagtcatcatggcccttacggccagggctacacacgtgctacaatggcgcgtacagagggctgcaagctagcgatagtgagcgaatcccaaaaagcgcgtcgtagtccggattggagtctgcaactcgactccatgaagtcngaatcgctagtaatcgcaaatcagaatgttgcggtgaatacgttcccgggccttgtacacaccgcccgtcacaccatgggagtgggttgcaccagaagtagatagcttaaccttcgggagggcgtttaccacggtgtgattcatgactggggtgaagtcgt

SEQ ID NO: 106 - DNA, 1547 bp, Aeromonas hydrophila
taaattgaagagtttgatcatggctcagattgaacgctggcggcaggcctaacacatgcaagtcgagcggcagcgggaaagtagcttgctacttttgccggcgagcggcggacgggtgagtaatgcctgggaaattgcccagtcgagggggataacagttggaaacgactgctaataccgcatacgccctacgggggaaagcaggggaccttcgggccttgcgcgattggatatgcccaggtgggattagctagttggtgaggtaatggctcaccaaggcgacgatccctagctggtctgagaggatgatcagccacactggaactgagacacggtccagactcctacgggaggcagcagtggggaatattgcacaatgggggaaaccctgatgcagccatgccgcgtgtgtgaagaaggccttcgggttgtaaagcactttcagcgaggaggaaaggttgatgcctaatacgtatcaactgtgacgttactcgcagaagaagcaccggctaactccgtgccagcagccgcggtaatacggagggtgcaagcgttaatcggaattactgggcgtaaagcgcacgcaggcggttggataagttagatgtgaaagccccgggctcaacctgggaattgcatttaaaactgtccagctagagtcttgtagaggggggtagaattccaggtgtagcggtgaaatgcgtagagatctggaggaataccggtggcgaaggcggccccctggacaaagactgacgctcaggtgcgaaagcgtggggagcaaacaggattagataccctggtagtccacgccgtaaacgatgtcgatttggaggctgtgtccttgagacgtggcttccggagctaacgcgttaaatcgaccgcctggggagtacggccgcaaggttaaaactcaaatgaattgacgggggcccgcacaagcggtggagcatgtggtttaattcgatgcaacgcgaagaaccttacctggccttgacatgtctggaatcctgcagagatgcgggagtgccttcgggaatcagaacacaggtgctgcatggctgtcgtcagctcgtgtcgtgagatgttgggttaagtcccgcaacgagcgcaacccctgtcctttgttgccagcacgtaatggtgggaactcaagggagactgccggtgataaaccggaggaaggtggggatgacgtcaagtcatcatggcccttacggccagggctacacacgtgctacaatggcgcgtacagagggctgcaagctagcgatagtgagcgaatcccaaaaagcgcgtcgtagtccggatcggagtctgcaactcgactccgtgaagtcggaatcgctagtaatcgcaaatcagaatgttgcggtgaatacgttcccgggccttgtacacaccgcccgtcacaccatgggagtgggttgcaccagaagtagatagcttaaccttcgggagggcgtttaccacggtgtgattcatgactggggtgaagtcgtaacaaggtaaccctaggggaacctggggttggatcacctccttac

SEQ ID NO: 107 - DNA, 1503 bp, Aeromonas jandaei
gagtttgatcatggctcagattgaacgctggcggcaggcctaacacatgcaagtcgagcggcagcgggaaagtagcttgctacttttgccggcgagcggcggacgggtgagtaatgcctggggatctgcccagtcgagggggataactactggaaacggtagctaataccgcatacgccctacgggggaaagcaggggaccttcgggccttgcgcgattggatgaacccaggtgggattagctagttggtgaggtaacggctcaccaaggcgacgatccctagctggtctgagaggatgatcagccacactggaactgagacacggtccagactcctacgggaggcagcagtggggaatattgcacaatgggggaaaccctgatgcagccatgccgcgtgtgtgaagaaggccttcgggttgtaaagcactttcagcgaggaggaaaggtcagtagctaatatctgctggctgtgacgttactcgcagaagaagcaccggctaactccgtgccagcagccgcggtaatacggagggtgcaagcgttaatcggaattactgggcgtaaagcgcacgcaggcggttggataagttagatgtgaaagccccgggctcaacctgggaattgcatttaaaactgtccagctagagtcttgtagaggggggtagaattccaggtgtagcggtgaaatgcgtagagatctggaggaataccggtggcgaaggcggccccctggacaaagactgacgctcaggtgcgaaagcgtggggagcaaacaggattagataccctggtagtccacgccgtaaacgatgtcgatttggaggctgtgtccttgagacgtggcttccggagctaacgcgttaaatcgaccgcctggggagtacggccgcaaggttaaaactcaaatgaattgacgggggcccgcacaagcggtggagcatgtggtttaattcgatgcaacgcgaagaaccttacctggccttgacatgtctggaatcctgcagagatgcgggagtgccttcgggaatcagaacacaggtgctgcatggctgtcgtcagctcgtgtcgtgagatgttgggttaagtcccgcaacgagcgcaacccctgtcctttgttgccagcacgtaatggtgggaactcaagggagactgccggtgataaaccggaggaaggtggggatgacgtcaagtcatcatggcccttacggccagggctacacacgtgctacaatggcgcgtacagagggctgcaagctagcgatagtgagcgaatcccaaaaagcgcgtcgtagtccggatcggagtctgcaactcgactccgtgaagtcggaatcgctagtaatcgcaaatcagaatgttgcggtgaatacgttcccgggccttgtacacaccgcccgtcacaccatgggagtgggttgcaccagaagtagatagcttaaccttcgggagggcgtttaccacggtgtgattcatgactggggtgaagtcgtaacaaggtaa

SEQ ID NO: 108 - DNA, 1546 bp, Aeromonas salmonicida
aaattgaagagtttgatcatggctcagattgaacgctggcggcaggcctaacacatgcaagtcgagcggcagcgggaaagtagcttgctacttttgccggcgagcggcggacgggtgagtaatgcctggggatctgcccagtcgagggggataacagttggaaacgactgctaataccgcatacgccctacgggggaaaggaggggaccttcgggcctttcgcgattggatgaacccaggtgggattagctagttggtggggtaatggctcaccaaggcgacgatccctagctggtctgagaggatgatcagccacactggaactgagacacggtccagactcctacgggaggcagcagtggggaatattgcacaatgggggaaaccctgatgcagccatgccgcgtgtgtgaagaaggccttcgggttgtaaagcactttcagcgaggaggaaaggttggcgcctaatacgtgtcaactgtgacgttactcgcagaagaagcaccggctaactccgtgccagcagccgcggtaatacggagggtgcaagcgttaatcggaattactgggcgtaaagcgcacgcaggcggttggataagttagatgtgaaagccccgggctcaacctgggaattgcatttaaaactgtccagctagagtcttgtagaggggggtagaattccaggtgtagcggtgaaatgcgtagagatctggaggaataccggtggcgaaggcggccccctggacaaagactgacgctcaggtgcgaaagcgtggggagcaaacaggattagataccctggtagtccacgccgtaaacgatgtcgatttggaggctgtgtccttgagacgtggcttccggagctaacgcgttaaatcgaccgcctggggagtacggccgcaaggttaaaactcaaatgaattgacgggggcccgcacaagcggtggagcatgtggtttaattcgatgcaacgcgaagaaccttacctggccttgacatgtctggaatcctgtagagatacgggagtgccttcgggaatcagaacacaggtgctgcatggctgtcgtcagctcgtgtcgtgagatgttgggttaagtcccgcaacgagcgcaacccctgtcctttgttgccagcacgtaatggtgggaactcaagggagactgccggtgataaaccggaggaaggtggggatgacgtcaagtcatcatggcccttacggccagggctacacacgtgctacaatggcgcgtacagagggctgcaagctagcgatagtgagcgaatcccaaaaagcgcgtcgtagtccggatcggagtctgcaactcgactccgtgaagtcggaatcgctagtaatcgcgaatcagaatgtcgcggtgaatacgttcccgggccttgtacacaccgcccgtcacaccatgggagtgggttgcaccagaagtagatagcttaaccttcgggagggcgtttaccacggtgtgattcatgactggggtgaagtcgtaacaaggtaaccctaggggaacctggggttggatcacctccttac

SEQ ID NO: 109 - DNA, 1503 bp, Aeromonas trota
gagtttgatcatggctcagattgaacgctggcggcaggcctaacacatgcaagtcgagcggcagcgggaaagtagcttgctacttttgccggcgagcggcggacgggtgagtaatgcctgggaaattgcccagtcgagggggataacagttggaaacgactgctaataccgcatacgccctacgggggaaagcaggggaccttcgggccttgcgcgattggatatgcccaggtgggattagctagttggtgaggtaatggctcaccaaggcgacgatccctagctggtctgagaggatgatcagccacactggaactgagacacggtccagactcctacgggaggcagcagtggggaatattgcacaatgggggaaaccctgatgcagccatgccgcgtgtgtgaagaaggccttcgggttgtaaagcactttcagcgaggaggaaaggtcagtagctaatatctgctggctgtgacgttactcgcagaagaagcaccggctaactccgtgccagcagccgcggtaatacggagggtgcaagcgttaatcggaattactgggcgtaaagcgcacgcaggcggttggataagttagatgtgaaagccccgggctcaacctgggaattgcatttaaaactgtccggctagagtcttgtagaggggggtagaattccaggtgtagcggtgaaatgcgtagagatctggaggaataccggtggcgaaggcggccccctggacaaagactgacgctcaggtgcgaaagcgtggggagcaaacaggattagataccctggtagtccacgccgtaaacgatgtcgatttggaggctgtgtccttgagacgtggcttccggagctaacgcgttaaatcgaccgcctggggagtacggccgcaaggttaaaactcaaatgaattgacgggggcccgcacaagcggtggagcatgtggtttaattcgatgcaacgcgaagaaccttacctggccttgacatgtctggaatcctgcagagatgcgggagtgccttcgggaatcagaacacaggtgctgcatggctgtcgtcagctcgtgtcgtgagatgttgggttaagtcccgcaacgagcgcaacccctgtcctttgttgccagcacgtaatggtgggaactcaagggagactgccggtgataaaccggaggaaggtggggatgacgtcaagtcatcatggcccttacggccagggctacacacgtgctacaatggcgcgtacagagggctgcaagctagcgatagtgagcgaatcccaaaaagcgcgtcgtagtccggattggagtctgcaactcgactccatgaagtcggaatcgctagtaatcgcaaatcagaatgttgcggtgaatacgttcccgggccttgtacacaccgcccgtcacaccatgggagtgggttgcaccagaagtagatagcttaaccttcgggagggcgtttaccacggtgtgattcatgactggggtgaagtcgtaacaaggtaa

SEQ ID NO: 110 - DNA, 1532 bp, Aeromonas veronii
  modified_base (1495)..(1496): a, c, t, g, unknown or other
  modified_base (1510)..(1510): a, c, t, g, unknown or other
gagtttgatcatggctcagattgaacgctggcggcaggcctaacacatgcaagtcgagcggcagcgggaaagtagcttgctacttttgccggcgagcggcggacgggtgagtaatgcctggggatctgcccagtcgagggggataactactggaaacggtagctaataccgcatacgcctacgggggaaagcaggggaccttcgggccttgcgcgattggatgaacccaggtgggattagctagttggtgaggtaatggctcaccaaggcgacgatccctagctggtctgagaggatgatcagccacactggaactgagacacggtccagactcctacgggaggcagcagtggggaatattgcacaatgggggaaaccctgatgcagccatgccgcgtgtgtgaagaaggccttcgggttgtaaagcactttcagcgaggaggaaaggttggtagctaataactgccagctgtgacgttactcgcagaagaagcaccggctaactccgtgccagcagccgcggtaatacggagggtgcaagcgttaatcggaattactgggcgtaaagcgcacgcaggcggttggataagttagatgtgaaagccccgggctcaacctgggaattgcatttaaaactgtccagctagagtcttgtagaggggggtagaattccaggtgtagcggtgaaatgcgtagagatctggaggaataccggtggcgaaggcggccccctggacaaagactgacgctcaggtgcgaaagcgtggggagcaaacaggattagataccctggtagtccacgccgtaaacgatgtcgatttggaggctgtgtccttgagacgtggcttccggagctaacgcgttaaatcgaccgcctggggagtacggccgcaaggttaaaactcaaatgaattgacgggggccgcacaagcggtggagcatgtggtttaattcgatgcaacgcgaagaaccttacctggccttgacatgtctggaatcctgtagagatacgggagtgccttcgggaatcagaacacaggtgctgcatggctgtcgtcagctcgtgtcgtgagatgttgggttaagtcccgcaacgagcgcaacccctgtcctttgttgccagcacgtaatggtgggaactcaagggagactgccggtgataaaccggaggaaggtggggatgacgtcaagtcatcatggcccttacggccagggctacacacgtgctacaatggcgcgtacagagggctgcaagctagcgatagtgagcgaatcccaaaaagcgcgtcgtagtccggatcggagtctgcaactcgactccgtgaagtcggaatcgctagtaatcgcaaatcagaatgttgcggtgaatacgttcccgggccttgtacacaccgcccgtcacaccatgggagtgggttgcaccagaagtagatagcttaaccttcgggagggcgtttaccacggtgtgattcatgactggggtgaagtcgtaacnnggtaaccctagggnaacctgcggctggatcacctcc

SEQ ID NO: 111 - DNA, 1420 bp, Afipia sp.
  4
tggctcagagcgaacgctggcggcaggcttaacacatgcaagtcgaacgggcgtagcaatacgtcagtggcagacgggtgagtaacgcgtgggaacgtaccttttggttcggaacaactgagggaaacttcagctaataccggataagcccttacggggaaagatttatcgccgaaagatcggcccgcgtctgattagctagttggtgaggtaatggctcaccaaggcgacgatcagtagctggtctgagaggatgatcagccacattgggactgagacacggcccaaactcctacgggaggcagcagtggggaatattggacaatgggcgaaagcctgatccagccatgccgcgtgagtgatgaaggccctagggttgtaaagctcttttgtgcgggaagataatgacggtaccgcaagaataagccccggctaacttcgtgccagcagccgcggtaatacgaagggggctagcgttgctcggaatcactgggcgtaaagggtgcgtaggcgggtctttaagtcagaggtgaaagcctggagctcaactccagaactgcctttgatactgaggatcttgagtatgggagaggtgagtggaactgcgagtgtagaggtgaaattcgtagatattcgcaagaacaccagtggcgaaggcggctcactggcccataactgacgctgaggcacgaaagcgtggggagcaaacaggattagataccctggtagtccacgccgtaaacgatgaatgccagccgttagtgggtttactcactagtggcgcagctaacgctttaagcattccgcctggggagtacggtcgcaagattaaaactcaaaggaattgacgggggcccgcacaagcggtggagcatgtggtttaattcgacgcaacgcgcagaaccttaccagcccttgacatgtccaggaccggtcgcagagatgtgaccttctcttcggagcctggagcacaggtgctgcatggctgtcgtcagctcgtgtcgtgagatgttgggttaagtcccgcaacgagcgcaacccccgtccttagttgctaccatttagttgagcactctaaggagactgccggtgataagccgcgaggaaggtggggatgacgtcaagtcctcatggcccttacgggctgggctacacacgtgctacaatggcggtgacaatgggatgctaaggggcgacccctcgcaaatctcaaaaagccgtctcagttcggattgggctctgcaactcgagcccatgaagttggaatcgctagtaatcgtggatcagcatgccacggtgaatacgttcccgggccttgtacacaccgcccgtcacaccatgggagttggttttacctgaagacggtgcgctaaccgcaaggaggcagccggccacggtagggtcagcgactgggggaagt

SEQ ID NO: 112 - DNA, 1540 bp, Aggregatibacter actinomycetemcomitans
aattgaagagtttgatcatggctcagattgaacgctggcggcaggcttaacacatgcaagtcggacggtagcaggtaagtacttgtacttatgctgacgagtggcggacgggtgagtaatgcttgggaatctgtcttatggagggggataacgacgggaaactgtcgctaataccgcgtagaatcgggagatgaaagtgtgggaccttcgggccacatgccataggatgagcccaagtgtgattaggtagttggtggggtaaaggcctaccaagccgacgatcgctagctggtctgagaggatggccagccacaccgggactgagacacggcccggactcctacgggaggcagcagtggggaatattgcgcaatgggggcaaccctgacgcagccatgccgcgtgaatgaagaaggccttcgggttgtaaagttctttcggtgatgaggaaggttggtgtgttaatagcatgccaaattgacgttaaatacagaagaagcaccggctaactccgtgccagcagccgcggtaatacggggggtgcgagcgttaatcggaataactgggcgtaaagggcacgtaggcggacctttaagtgaggtgtgaaatccccgggcttaacctgggaattgcatttcatactgggggtctggagtactttagggaggggtagaattccacgtgtagcggtgaaatgcgtagagatgtggaggaataccgaaggcgaaggcagccccttggggatgtactgacgctgatgtgcgaaagcgtggggagcaaacaggattagataccctggtagtccacgctgtaaacggtgtcgatttggggattggggtttagccctggtgcccgaagctaacgtgataaatcgaccgcctggggagtacggccgcaaggttaaaactcaaatgaattgacgggggcccgcacaagcggtggagcatgtggtttaattcgatgcaacgcgaagaaccttacctactcttgacatccgaagaagaactcagagatgggtttgtgccttagggagctttgagacaggtgctgcatggctgtcgtcagctcgtgttgtgaaatgttgggttaagtcccgcaacgagcgcaacccttatcctttgttgccagcgacttggtcgggaactcaaaggagactgccggtgataaaccggaggaaggtggggatgacgtcaagtcatcatggcccttacgagtagggctacacacgtgctacaatggcgtatacagagggtaaccaaccagcgatggggagtgaatctcagaaagtacgtctaagtccggattggagtctgcaactcgactccatgaagtcggaatcgctagtaatcgcgaatcagaatgttgcggtgaatacgttcccgggccttgtacacaccgcccgtcacaccatgggagtgggttgtaccagaagtagatagcttaaccgagaggggggcgtttaccacggtatgattcatgactggggtgaagtcgtaacaaggtaaccgtaggggaacctgcggttggatcacctccttac

SEQ ID NO: 113 - DNA, 1539 bp, Aggregatibacter aphrophilus
aattgaagagtttgatcatggctcagattgaacgctggcggcaggcttaacacatgcaagtcgaacggtagcaggtaagtacttgtacttatgctgacgagtggcggacgggtgagtaatgcttggggatctggcttatggagggggataacgacgggaaactgtcgctaataccgcgtagaatcgggagatgaaagtgtgggaccttcgggccacatgccataggatgagcccaagtgggattaggtagttggtggggtaatggcctaccaagccgacgatctctagctggtctgagaggatgaccagccacaccgggactgagacacggcccggactcctacgggaggcagcagtggggaatattgcgcaatgggggcaaccctgacgcagccatgccgcgtgaatgaagaaggccttcgggttgtaaagttctttcggtgacgaggaaggttgttgtgttaatagcgcaacaaattgacgttaatcacagaagaagcaccggctaactccgtgccagcagccgcggtaatacggagggtgcgagcgttaatcggaataactgggcgtaaagggcacgcaggcggacttttaagtgaggtgtgaaatccccgggcttaacctgggaattgcatttcagactgggggtctagagtactttagggaggggtagaattccacgtgtagcggtgaaatgcgtagagatgtggaggaataccgaaggcgaaggcagccccttgggaatgtactgacgctcatgtgcgaaagcgtggggagcaaacaggattagataccctggtagtccacgctgtaaacggtgtcgatttggggattgtgctttgagcttggtgcccgtagctaacgtgataaatcgaccgcctggggagtacggccgcaaggttaaaactcaaatgaattgacgggggcccgcacaagcggtggagcatgtggtttaattcgatgcaacgcgaagaaccttacctactcttgacatccatggaatcttgtagagatatgagagtgccttcgggaaccatgagacaggtgctgcatggctgtcgtcagctcgtgttgtgaaatgttgggttaagtcccgcaacgagcgcaacccttatcctttgttgccagcgatttggtcgggaactcaaaggagactgccggtgataaaccggaggaaggtggggatgacgtcaagtcatcatggcccttacgagtagggctacacacgtgctacaatggcgtatacagagggcgacgaagccgcgaggtggagtgaatctcagaaagtacgtctaagtccggattggagtctgcaactcgactccatgaagtcggaatcgctagtaatcgcgaatcagaatgtcgcggtgaatacgttcccgggccttgtacacaccgcccgtcacaccatgggagtgggttgtaccagaagtagatagcttaaccttcggggggcgtttaccacggtatgattcatgactggggtgaagtcgtaacaaggtaaccgtaggggaacctgcggttggatcacctccttac

SEQ ID NO: 114 - DNA, 1543 bp, Aggregatibacter segnis
ttgaactgaagagtttgatcatggctcagattgaacgctggcggcaggcttaacacatgcaagtcgaacggtaacaggagagagcttgctttcttgctgacgagtggcggacgggtgagtaatgcttgggaatctggcttatggagggggataacgacgggaaactgtcgctaataccgcgtagagtcgagagacgaaagtgcgggaccgcaaggccgcatgccataggatgagcccaagtgggattaggtagttggtggggtaatggcctaccaagccgacgatctctagctggtctgagaggatgaccagccacaccgggactgagacacggcccggactcctacgggaggcagcagtggggaatattgcgcaatgggggcaaccctgacgcagccatgccgcgtgaatgaagaaggccttcgggttgtaaagttctttcggtgacgaggaaggcgtgatgtttaataggcatcacgattgacgttaatcacagaagaagcaccggctaactccgtgccagcagccgcggtaatacggagggtgcgagcgttaatcggaataactgggcgtaaagggcacgcaggcggctatttaagtgaggtgtgaaatccccgggcttaacctgggaattgcatttcagactgggtagctagagtactttagggaggggtagaattccacgtgtagcggtgaaatgcgtagagatgtggaggaataccgaaggcgaaggcagccccttgggaatgtactgacgctcatgtgcgaaagcgtggggagcaaacaggattagataccctggtagtccacgctgtaaacgctgtcgatttggggattgggccttgagcttggtgcccgaagctaacgtgataaatcgaccgcctggggagtacggccgcaaggttaaaactcaaatgaattgacgggggcccgcacaagcggtggagcatgtggtttaattcgatgcaacgcgaagaaccttacctactcttgacatccatggaatcttgtagagatatgagagtgccttcgggaaccatgagacaggtgctgcatggctgtcgtcagctcgtgttgtgaaatgttgggttaagtcccgcaacgagcgcaacccttatcctttgttgccagcgattcggtcgggaactcaaaggagactgccggtgataaaccggaggaaggtggggatgacgtcaagtcatcatggcccttacgagtagggctacacacgtgctacaatggcgtatacagagggcgacgaagccgcgaggtggagtgaatctcacaaagtacgtctaagtccggattggagtctgcaactcgactccatgaagtcggaatcgctagtaatcgcgaatcagaatgtcgcggtgaatacgttcccgggccttgtacacaccgcccgtcacaccatgggagtgggttgtaccagaagtagatagcttaaccttcgggagggcgtttaccacggtatgattcatgactggggtgaagtcgtaacaaggtaaccgtaggggaacctgcggttggatcacctccttac

SEQ ID NO: 115 - DNA, 1492 bp, Agrobacterium radiobacter
ctcaacatgagagtttgatcctggctcagaacgaacgctggcggcaggcttaacacatgcaagtcgagcgccccgcaaggggagcggcagacgggtgagtaacgcgtgggaatctacccttttctacggaataacgcagggaaacttgtgctaataccgtatgtgtccttcgggagaaagatttatcgggaaaggatgagcccgcgttggattagctagttggtggggtaaaggcctaccaaggcgacgatccatagctggtctgagaggatgatcagccacattgggactgagacacggcccaaactcctacgggaggcagcagtggggaatattggacaatgggcgcaagcctgatccagccatgccgcgtgagtgatgaaggccctagggttgtaaagctctttcaccggagaagataatgacggtatccggagaagaagccccggctaacttcgtgccagcagccgcggtaatacgaagggggctagcgttgttcggaattactgggcgtaaagcgcacgtaggcggatcgatcagtcaggggtgaaatcccagggctcaaccctggaactgcctttgatactgtcgatctggagtatggaagaggtgagtggaattccgagtgtagaggtgaaattcgtagatattcggaggaacaccagtggcgaaggcggctcactggtccattactgacgctgaggtgcgaaagcgtggggagcaaacaggattagataccctggtagtccacgccgtaaacgatgaatgttagccgtcgggcagtatactgttcggtggcgcagctaacgcattaaacattccgcctggggagtacggtcgcaagattaaaactcaaaggaattgacgggggcccgcacaagcggtggagcatgtggtttaattcgaagcaacgcgcagaaccttaccagcccttgacatcctgtgttacccgtagagatatggggtccacttcggtggcgcagagacaggtgctgcatggctgtcgtcagctcgtgtcgtgagatgttgggttaagtcccgcaacgagcgcaaccctcgcccttagttgccagcattcagttgggcactctaaggggactgccggtgataagccgagaggaaggtggggatgacgtcaagtcctcatggcccttacgggctgggctacacacgtgctacaatggtggtgacagtgggcagcgagcacgcgagtgtgagctaatctccaaaagccatctcagttcggattgcactctgcaactcgagtgcatgaagttggaatcgctagtaatcgcggatcagcatgccgcggtgaatacgttcccgggccttgtacacaccgcccgtcacaccatgggagttggttttacccgaaggtagtgcgctaaccgcaaggaggcagctaaccacggtagggtcagcgactggggtgaagtcgtaacaaggtagccgtaggggaacctgcggctggatcacctcctttctaaggaag

SEQ ID NO: 116 - DNA, 1437 bp, Agrobacterium tumefaciens
aacgaacgctggcggcaggcttaacacatgcaagtcgaacgccccgcaaggggagtggcagacgggtgagtaacgcgtgggaacataccctttcctgcggaatagctccgggaaactggaattaataccgcatacgccctacgggggaaagatttatcggggaaggattggcccgcgttggattagctagttggtggggtaaaggcctaccaaggcgacgatccatagctggtctgagaggatgatcagccacattgggactgagacacggcccaaactcctacgggaggcagcagtggggaatattggacaatgggcgcaagcctgatccagccatgccgcgtgagtgatgaaggccttagggttgtaaagctctttcaccggagaagataatgacggtatccggagaagaagccccggctaacttcgtgccagcagccgcggtaatacgaagggggctagcgttgttcggaattactgggcgtaaagcgcacgtaggcggatatttaagtcaggggtgaaatcccagagctcaactctggaactgcctttgatactgggtatcttgagtatggaagaggtaagtggaattccgagtgtagaggtgaaattcgtagatattcggaggaacaccagtggcgaaggcggcttactggtccattactgacgctgaggtgcgaaagcgtggggagcaaacaggattagataccctggtagtccacgccgtaaacgatgaatgttagccgtcgggcagtatactgttcggtggcgcagctaacgcattaaacattccgcctggggagtacggtcgcaagattaaaactcaaaggaattgacgggggcccgcacaagcggtggagcatgtggtttaattcgaagcaacgcgcagaaccttaccagctcttgacattcggggtttgggcagtggagacattgtccttcagttaggctggccccagaacaggtgctgcatggctgtcgtcagctcgtgtcgtgagatgttgggttaagtcccgcaacgagcgcaaccctcgcccttagttgccagcatttagttgggcactctaaggggactgccggtgataagccgagaggaaggtggggatgacgtcaagtcctcatggcccttacgggctgggctacacacgtgctacaatggtggtgacagtgggcagcgagacagcgatgtcgagctaatctccaaaagccatctcagttcggattgcactctgcaactcgagtgcatgaagttggaatcgctagtaatcgcagatcagcatgctgcggtgaatacgttcccgggccttgtacacaccgcccgtcacaccatgggagttggttttacccgaaggtagtgcgctaaccgcaaggaggcagctaaccacggtagggtcagcgactggggtgaagtcgtaacaaggtagccgtaggggaacc

SEQ ID NO: 117 - DNA, 1473 bp, Agrococcus jenensis
gacgaacgctggcggcgtgcttaacacatgcaagtcgaacgatgaaggaggagcttgctcctccggattagtggcgaacgggtgagtaatacgtgagcaatgtgcccttgactctgggataagcgctggaaacggcgtctaataccggatacgacgaccggaggcatctcctggtcgtggaaagaacttcggtcaaggatcagctcacggcctatcagctagttggtgaggtaacggctcaccaaggcgacgacgggtagccggcctgagagggtgaccggccacactgggactgagacacggcccagactcctacgggaggcagcagtggggaatattgcacaatgggcgcaagcctgatgcagcaacgccgcgtgagggacgaaggccttcgggttgtaaacctcttttagcagggaagaagcgaaagtgacggtacctgcagaaaaagcaccggctaactacgtgccagcagccgcggtaatacgtagggtgcaagcgttgtccggaattattgggcgtaaagagctcgtaggcggtttgtcacgtctgctgtgaaaacccgaggctcaacctcgggcttgcagtgggtacgggcagactagagtgcggtaggggagattggaattcctggtgtagcggtggaatgcgcagatatcaggaggaacaccgatggcgaaggcagatctctgggccgtaactgacgctgaggagcgaaagcatggggagcaaacaggcttagataccctggtagtccatgccgtaaacgttgggaactagatgtggggaccattccacggtctccgtgtcgtagctaacgcattaagttccccgcctggggagtacggccgcaaggctaaaactcaaaggaattgacgggggcccgcacaagcggcggagcatgcggattaattcgatgcaacgcgaagaaccttaccaaggcttgacatatacgagaacgcactggagacagtgaactctttggacactcgtatacaggtggtgcatggttgtcgtcagctcgtgtcgtgagatgttgggttaagtcccgcaacgagcgcaaccctcgtcctatgttgccagcacgtaatggtgggaactcatgggatactgccggggtcaactcggaggaaggtggggatgaggtcaaatcatcatgccccttatgtcttgggcttcacgcatgctacaatggccggtacaatgggctgcgataccgcaaggtggagcgaatcccaaaaagccggtctcagttcggattgaggtctgcaactcgacctcatgaagtcggagtcgctagtaatcgtagatcagcaacgctacggtgaatacgttcccgggccttgtacacaccgcccgtcaagtcatgaaagtcggtaacacccgaagccagtggcctaaccttttggagggagctgtcgaaggtgggatcggtgattaggactaagtcgtaacaaggtagccgtaccggaa

SEQ ID NO: 118 - DNA, 1368 bp, Akkermansia muciniphila
tcgaacgagagaattgctagcttgctaataattctctagtggcgcacgggtgagtaacacgtgagtaacctgcccccgagagcgggatagccctgggaaactgggattaataccgcatagtatcgaaagattaaagcagcaatgcgcttggggatgggctcgcggcctattagttagttggtgaggtaacggctcaccaaggcgatgacgggtagccggtctgagaggatgtccggccacactggaactgagacacggtccagacacctacgggtggcagcagtcgagaatcattcacaatgggggaaaccctgatggtgcgacgccgcgtgggggaatgaaggtcttcggattgtaaacccctgtcatgtgggagcaaattaaaaagatagtacccaagaggaagagacggctaactctgtgccagcagccgcggtaatacagaggtctcaagcgttgttcggaatcactgggcgtaaagcgtgcgtaggctgtttcgtaagtcgtgtgtgaaaggcgcgggctcaacccgcggacggcacatgatactgcgagactagagtaatggagggggaaccggaattctcggtgtagcagtgaaatgcgtagatatcgagaggaacactcgtggcgaaggcgggttcctggacattaactgacgctgaggcacgaaggccaggggagcgaaagggattagatacccctgtagtcctggcagtaaacggtgcacgcttggtgtgcggggaatcgaccccctgcgtgccggagctaacgcgttaagcgtgccgcctggggagtacggtcgcaagattaaaactcaaagaaattgacggggacccgcacaagcggtggagtatgtggcttaattcgatgcaacgcgaagaaccttacctgggcttgacatgtaatgaacaacatgtgaaagcatgcgactcttcggaggcgttacacaggtgctgcatggcggtcgtcagctcatgtcctgagatgtttggttaagtccagcaacgagcgcaacccctgttgccagttaccagcacgtgaaggtggggactctggcgagactgcccagatcaactgggaggaaggtggggacgacgtcaggtcagtatggcccttatgcccagggctgcacacgtactacaatgcccagtacagagggggccgaagccgcgaggcggaggaaatcctgaaaactgggcccagttcggactgtaggctgcaacccgcctacacgaagccggaatcgctagtaatggcgcatcagctacggcgccgtgaatacgttcccgggtcttgtacacaccgcccgtcacatcatggaagccggtcgcacccgaagtatctgaagccaaccgcaaggaggca

SEQ ID NO: 119 - DNA, 1462 bp, Alcaligenes faecalis
  modified_base (432)..(432): a, c, t, g, unknown or other
  modified_base (446)..(446): a, c, t, g, unknown or other
attgaacgctagcgggatgctttacacatgcaagtcgaacggcagcgcgagagagcttgctctcttggcggcgagtggcggacgggtgagtaatatatcggaacgtgcccagtagcgggggataactactcgaaagagtggctaataccgcatacgccctacgggggaaagggggggatcgcaagacctctcactattggagcggccgatatcggattagctagttggtggggtaaaggctcaccaaggcaacgatccgtagctggtttgagaggacgaccagccacactgggactgagacacggcccagactcctacgggaggcagcagtggggaattttggacaatgggggaaaccctgatccagccatcccgcgtgtatgatgaaggccttcgggttgtaaagtacttttggcagagaagaaaaggtanctcctaatacgagntactgctgacggtatctgcagaataagcaccggctaactacgtgccagcagccgcggtaatacgtagggtgcaagcgttaatcggaattactgggcgtaaagcgtgtgtaggcggttcggaaagaaagatgtgaaatcccagggctcaaccttggaactgcatttttaactgccgagctagagtatgtcagaggggggtagaattccacgtgtagcagtgaaatgcgtagatatgtggaggaataccgatggcgaaggcagccccctgggataatactgacgctcagacacgaaagcgtggggagcaaacaggattagataccctggtagtccacgccctaaacgatgtcaactagctgttggggccgttaggccttagtagcgcagctaacgcgtgaagttgaccgcctggggagtacggtcgcaagattaaaactcaaaggaattgacggggacccgcacaagcggtggatgatgtggattaattcgatgcaacgcgaaaaaccttacctacccttgacatgtctggaaagccgaagagatttggccgtgctcgcaagagaaccggaacacaggtgctgcatggctgtcgtcagctcgtgtcgtgagatgttgggttaagtcccgcaacgagcgcaacccttgtcattagttgctacgcaagagcactctaatgagactgccggtgacaaaccggaggaaggtggggatgacgtcaagtcctcatggcccttatgggtagggcttcacacgtcatacaatggtcgggacagagggtcgccaacccgcgagggggagccaatctcagaaacccgatcgtagtccggatcgcagtctgcaactcgactgcgtgaagtcggaatcgctagtaatcgcggatcagaatgtcgcggtgaatacgttcccgggtcttgtacacaccgcccgtcacaccatgggagtgggtttcaccagaagtaggtagcctaaccgtaaggagggcgcttaccacggtgggattcatgactggggtgaag

SEQ ID NO: 120 - DNA, 1499 bp, Alcaligenes sp.
  CO14
gagtttgatcctggctcagattgaacgctagcgggatgctttacacatgcaagtcgaacggcagcgcgagagagcttgctctcttggcggcgagtggcggacgggtgagtaatatatcggaacgtgcccagtagcgggggataactactcgaaagagtggctaataccgcatacgccctacgggggaaagggggggatcgcaagacctctcactattggagcggccgatatcggattagctagttggtggggtaaaggctcaccaaggcaacgatccgtagctggtttgagaggacgaccagccacactgggactgagacacggcccagactcctacgggaggcagcagtggggaattttggacaatgggggaaaccctgatccagccatcccgcgtgtatgatgaaggccttcgggttgtaaagtacttttggcagagaagaaaaggtatctcctaatacgagatactgctgacggtatctgcagaataagcaccggctaactacgtgccagcagccgcggtaatacgtagggtgcaagcgttaatcggaattactgggcgtaaagcgtgtgtaggcggttcggaaagaaagatgtgaaatcccagggctcaaccttggaactgcatttttaactgccgagctagagtatgtcagaaggggggtagaattccacgtgtagcagtgaaatgcgtagatatgtggaggaataccgatggcgaaggcagccccctgggataatactgacgctcagacacgaagcgtggggagcaaacaggattagataccctggtagtccacgccctaaacgatgtcaactagctgttggggccgttaggccttagtagcgcagctaacgcgtgaagttgaccgcctggggagtacggtcgcaagattaaaactcaaaggaattgacggggacccgcacaagcggtggatgatgtggattaattcgatgcaacgcgaaaaaccttacctacccttgacatgtctggaaagccgaagagatttggccgtgctcgcaagagaaccggaacacaggtgctgcatggctgtcgtcagctcgtgtcgtgagatgttgggttaagtcccgcaacgagcgcaacccttgtcattagttgctacgcaagagcactctaatgagactgccggtgacaaaccggaggaaggtggggatgacgtcaagtcctcatggcccttatgggtagggcttcacacgtcatacaatggtcgggacagagggtcgccaacccgcgagggggagccaatctcagaaacccgatcgtagtccggatcgcagtctgcaactcgactgcgtgaagtcggaatcgctagtaatcgcggatcagaatgtcgcggtgaatacgttcccgggtcttgtacacaccgcccgtcacaccatgggagtgggtttcaccagaagtaggtagcctaaccgtaaggagggcgcttaccacggtgggattcatgactggggtgaagtcgtaacaaggtagccgt

SEQ ID NO: 121 - DNA, 1404 bp, Alcaligenes sp.
  S3
atgcaagtcgaacggcagcgcgagagagcttgctctcttggcggcgagtggcggacgggtgagtaatatatcggaacgtgcccagtagcgggggataactactcgaaagagtggctaataccgcatacgccctacgggggaaagggggggatcgcaagacctctcactattggagcggccgatatcggattagctagttggtggggtaaaggctcaccaaggcaacgatccgtagctggtttgagaggacgaccagccacactgggactgagacacggcccagactcctacgggaggcagcagtggggaattttggacaatgggggaaaccctgatccagccatcccgcgtgtatgatgaaggccttcgggttgtaaagtacttttggcagagaagaaaaggtacctcctaatacgaggtactgctgacggtatctgcagaataagcaccggctaactacgtgccagcagccgcggtaatacgtagggtgcaagcgttaatcggaattactgggcgtaaagcgtgtgtaggcggttcggaaagaaagatgtgaaatcccagggctcaaccttggaactgcatttttaactgccgagctagagtatgtcagaggggggtagaattccacgtgtagcagtgaaatgcgtagatatgtggaggaataccgatggcgaaggcagccccctgggataatactgacgctcagacacgaaagcgtggggagcaaacaggattagataccctggtagtccacgccctaaacgatgtcaactagctgttggggccgttaggccttagtagcgcagctaacgcgtgaagttgaccgcctggggagtacggtcgcaagattaaaactcaaaggaattgacggggacccgcacaagcggtggatgatgtggattaattcgatgcaacgcgaaaaaccttacctacccttgacatgtctggaaagccgaagagatttggccgtgctcgcaagagaaccggaacacaggtgctgcatggctgtcgtcagctcgtgtcgtgagatgttgggttaagtcccgcaacgagcgcaacccttgtcattagttgctacgcaagagcactctaatgagactgccggtgacaaaccggaggaaggtggggatgacgtcaagtcctcatggcccttatgggtagggcttcacacgtcatacaatggtcgggacagagggtcgccaacccgcgagggggagccaatctcagaaacccgatcgtagtccggatcgcagtctgcaactcgactgcgtgaagtcggaatcgctagtaatcgcggatcagaatgtcgcggtgaatacgttcccgggtcttgtacacaccgcccgtcacaccatgggagtgggtttcaccagaagtaggtagcctaaccgtaaggagggcgct

SEQ ID NO: 122 - DNA, 1528 bp, Alicyclobacillus acidocaldarius
agagtttgatcctggctcaggacgaacgctggcggcgtgcctaatacatgcaagtcgagcggacctcttttgaggtcagcggcggacgggtgaggaacacgtgggtaatctgcctttcagaccggaataacgcccggaaacgggcgctaatatgccggatacgcccgcgaggaggcatcttcttgcggggaaaggcccgattgggccgctgagagaggagcccgcggcgcattagctagttggcggggtaacggcccaccaaggcgacgatgcgtagccgacctgagagggtgaccggccacactgggactgagacacggcccagactcctacgggaggcagcagtagggaatcttccgcaatgggcgcaagcctgacggagcaacgccgcgtgagcgaagaaggccttcgggttgtaaagctctgttgctcggggagagcggcatggggagtggaaagccccatgcgagacggtaccgagtgaggaagccccggctaactacgtgccagcagccgcggtaaaacgtagggggcgagcgttgtccggaatcactgggcgtaaagggtgcgtaggcggtcgagcaagtctggagtgaaagtccatggctcaaccatgggatggctctggaaactgcttgacttgagtgctggagaggcaaggggaattccacgtgtagcggtgaaatgcgtagagatgtggaggaataccagtggcgaaggcgccttgctggacagtgactgacgctgaggcacgaaagcgtggggagcaaacaggattagataccctggtagtccacgccgtaaacgatgagtgctaggtgttggggggacacaccccagtgccgaaggaaacccaataagcactccgcctggggagtacggtcgcaagactgaaactcaaaggaattgacgggggcccgcacaagcagtggagcatgtggtttaattcgaagcaacgcgaagaaccttaccagggcttgacatccctctgacgggtgcagagatgcaccttcccttcggggcagaggagacaggtggtgcatggttgtcgtcagctcgtgtcgtgagatgttgggttcagtcccgcaacgagcgcaacccttgacctgtgttaccagcgcgttgaggcggggactcacaggtgactgccggcgcaagtcggaggaaggcggggatgacgtcaaatcatcatgcccctgatgtcctgggctacacacgtgctacaatgggcggtacaaagggaggcgaagccgcgaggcggagcgaaacccaaaaagccgctcgtagttcggattgcaggctgcaactcgcctgcatgaagccggaattgctagtaatcgcggatcagcatgccgcggtgaatacgttcccgggccttgtacacaccgcccgtcacaccacgagagtcggcaacacccgaagtcggtgaggtaaccccgaaaggggagccagccgccgaaggtggggtcgatgattggggtgaagtcgtaacaaggtagccgtaccggaaggtgcggctggatcacct

SEQ ID NO: 123 - DNA, 1514 bp, Alicyclobacillus acidoterrestris
agagtttgatcctggctcaggacgaacgctggcggcgtgcctaatacatgcaagtcgagcgagcccttcggggctagcggcggacgggtgagtaacacgtgggcaatctgcctttcagactggaataacactcggaaacgggtgctaatgccggataatacacgggtaggcatctacttgtgttgaaagatgcaactgcatcgctgagagaggagcccgcggcgcattagctagttggtgaggtaacggctcaccaaggcgacgatgcgtagccgacctgagagggtgaccggccacactgggactgagacacggcccagactcctacgggaggcagcagtagggaatcttccgcaatgggcgcaagcctgacggagcaacgccgcgtgagcgaagaaggccttcgggttgtaaagctctgttgctcggggagagcgacaaggagagtggaaagctccttgtgagacggtaccgagtgaggaagccccggctaactacgtgccagcagccgcggtaatacgtagggggcaagcgttgtccggaatcactgggcgtaaagcgtgcgtaggcggttgtgtaagtctgaagtgaaagtccaaggctcaaccttgggattgctttggaaactgcatgacttgagtgctggagaggcaaggggaattccacgtgtagcggtgaaatgcgtagatatgtggaggaataccagtggcgaaggcgccttgctggacagtgactgacgctgaggcacgaaagcgtggggagcaaacaggattagataccctggtagtccacgccgtaaacgatgagtgctaggtgttggggggacacaccccagtgccgaaggaaacccaataagcactccgcctggggagtacggtcgcaagactgaaactcaaaggaattgacgggggcccgcacaagcagtggagcatgtggtttaattcgaagcaacgcgaagaaccttaccagggcttgacatccctctgaccggtgcagagatgtaccttcccttcggggcagaggagacaggtggtgcatggttgtcgtcagctcgtgtcgtgagatgttgggttaagtcccgcaacgagcgcaacccttgatctgtgttaccagcacgtagaggtggggactcacaggtgactgccggcgtaagtcggaggaaggcggggatgacgtcaaatcatcatgccctttatgtcctgggctacacacgtgctacaatgggcggtacaacgggaagcgaagccgcgaggtggagcaaaacctaaaaagccgttcgtagttcggattgcaggctgcaactcgcctgcatgaagccggaattgctagtaatcgcggatcagcatgccgcggtgaatccgttcccgggccttgtacacaccgcccgtcacaccacgagagtcggcaacacccgaagtcggtgaggtaaccgttatggagccagccgccgaaggtggggttgatgattggggtgaagtcgtaacaaggtagccgtatcggaaggtgcggttgga

SEQ ID NO: 124 - DNA, 1520 bp, Alicyclobacillus contaminans
  modified_base (182)..(182): a, c, t, g, unknown or other
  modified_base (192)..(192): a, c, t, g, unknown or other
  modified_base (476)..(476): a, c, t, g, unknown or other
tagagtttgatcatggctcaggacgaacgctggcggcgtgcctaatacatgcaagtcgagcggacggaagggagcttgctcctggaagtcagcggcggacgggtgagtaacacgtgggtaatctgcctgtcagaccggaataacgcctggaaacgggtgctaatgccggatagtcagtcttngggcatcttnggactgggaaaggcgctaaggcgtcactgacagaggagcccgcggcgcattagctagttggtggggtaaaggcctaccaaggcgacgatgcgtagccgacctgagagggtgaccggccacactgggactgagacacggcccagactcctacgggaggcagcagtagggaatcttcggcaatgggcgaaagcctgaccgagcaacgccgcgtgagcgaagaaggccttcgggttgtaaagctcagtcactcgggaagagcgaaccggagagggaatgctctggtngagacggtaccgagagaggaagccccggctaactacgtgccagcagccgcggtaatacgtagggggcgagcgttgtccggaatcactgggcgtaaagcgtgcgtaggcggtttggtaagtccggagtgaaagaccagggctcaaccctgggggtgctttggaaactgccagacttgagtgctggagaggcaaggggaattccacgtgtagcggtgaaatgcgtagagatgtggaggaataccagtggcgaaggcgccttgctggacagtgactgacgctgaggcacgaaagcgtggggagcaaacaggattagataccctggtagtccacgccgtaaacgatgagtgctaggtgttggggggtaccaccctcagtgccgaaggaaacccaataagcactccgcctggggagtacggtcgcaagactgaaactcaaaggaattgacgggggcccgcacaagcagtggagcatgtggtttaattcgaagcaacgcgaagaaccttaccagggcttgacatccctctgacgggttcagagatgagccgtcccttcggggcagaggagacaggtggtgcatggttgtcgtcagctcgtgtcgtgagatgttgggttaagtcccgcaacgagcgcaacccttgacctgtgttaccagcacgtgaaggtggggactcacaggtgactgccggcgtaagtcggaggaaggtggggatgacgtcaaatcatcatgccctttatgtcctgggctacacacgtgctacaatgggcggtacaacgggaagcgagaccgcgaggtggagcgaaaccctgaaagccgttcgtagttcggattgcaggctgcaactcgcctgcatgaagccggaattgctagtaatcgcggatcagcatgccgcggtgaatccgttcccgggccttgtacacaccgcccgtcacaccacgagagttggcaacacccgaagtcggtgaggtaaccctttagggagccagccgccgaaggtggggtcgatgattggggtgaagtcgtaacaaggtagccgtatcggaagg

SEQ ID NO: 125 - DNA, 1517 bp, Alicyclobacillus cycloheptanicus
agagtttgatcctggctcaggacgaacgctggcggcgtgcctaatacatgcaagtcgagcggacccttcggggtcagcggcggacgggtgagtaacacgtgggtaatctgcccaactgaccggaataacgcctggaaacgggtgctaatgccggataggcagcgagcaggcatctgctcgctgggaaaggtgcaaatgcaccgcagatggaggagcccgcggcgcattagctggttggtggggtaacggctcaccaaggcgacgatgcgtagccgacctgagagggtggacggccacactgggactgagacacggcccagactcctacgggaggcagcagtagggaatcttccgcaatgggcgcaagcctgacggagcaacgccgcgtgagcgaagaaggccttcgggttgtaaagctcagtcactcgggaagagcggcaaggggagtggaaagccccttgagagacggtaccgagagaggaagccccggctaactacgtgccagcagccgcggtaatacgtagggggcaagcgttgtccggaatcactgggcgtaaagcgtgcgtaggcggttgcgtgtgtccggggtgaaagtccagggctcaaccctgggaatgccttggaaactgcgtaacttgagtgctggagaggcaaggggaattccgcgtgtagcggtggaatgcgtagatatgcggaggaataccagtggcgaaggcgccttgctggacagtgactgacgctgaggcacgaaagcgtggggagcaaacaggattagataccctggtagtccacgccgtaaacgatgagtgctaggtgttggggggtaccaccctcagtgccgaaggaaacccaataagcactccgcctggggagtacggtcgcaagactgaaactcaaaggaattgacgggggcccgcacaagcagtggagcatgtggtttaattcgaagcaacgcgaagaaccttaccagggcttgacatccccctgacagccgcagagatgcggtttcccttcggggcaggggagacaggtggtgcatggttgtcgtcagctcgtgtcgtgagatgttgggttaagtcccgcaacgagcgcaacccttgaactgtgttaccagcacgtgaaggtggggactcacagttgactgccggcgtaagtcggaggaaggcggggatgacgtcaaatcatcatgccctttatgtcctgggctacacacgtgctacaatgggcggtacaacgggaagcgagaccgcgaggtggagcaaacccctgaaagccgttcgtagttcggattgcaggctgcaactcgcctgcatgaagccggaattgctagtaatcgcggatcagcatgccgcggtgaatccgttcccgggccttgtacacaccgcccgtcacaccacgagagtcggcaacacccgaagtcggtggggtaacccgtcagggggccagccgccgaaggtggggttgatgattggggtgaagtcgtaacaaggtagccgtatcggaaggtgcggttggat

SEQ ID NO: 126 - DNA, 1529 bp, Alicyclobacillus herbarius
  modified_base (1025)..(1025): a, c, t, g, unknown or other
  modified_base (1027)..(1027): a, c, t, g, unknown or other
  modified_base (1135)..(1135): a, c, t, g, unknown or other
  modified_base (1138)..(1138): a, c, t, g, unknown or other
  modified_base (1331)..(1331): a, c, t, g, unknown or other
agagtttgatcctggctcaggacgaacgctggcggcgtgcctaatacatgcaagtcgagcggacggaagggagcttgctcccggacgtcagcggcggacgggtgaggaacacgtgggcaatctgcccatcagtcgggaataacactcggaaacgggtgctaatgccggataggcatcttgggggcatccctgggatgggaaaggcgcttaggcgctgctgatggaggagcccgcggcgcattagctggttggcggggtaacggcccaccaaggcgacgatgcgtagccgacctgagagggtgaccggccacactgggactgagacacggcccagactcctacgggaggcagcagtagggaatcttccgcaatgggcgcaagcctgacggagcaacgccgcgtgagcgaagaaggccttcgggttgtaaagctcagtcaatcgggaagagcgacctagggagggaatgccctaggggagacggtaccgatggaggaagccccggcaaactacgtgccagcagccgcggtaatacgtagggggcgagcgttgtccggaatgactgggcgtaaagcgtgcgtaggcggccttacgcgtctgaggtttaagaccacggctcaaccgtgggggtgccttggaaacggtgaggcttgagtgctggagaggcaaggggaattccacgtgtagcggtgaaatgcgtagagatgtggaggaatacccgtggcgaaggcgccttgctggacagtgactgacgctgaggcacgaaagcgtggggagcaaacaggattagataccctggtagtccacgccgtaaacgatgagtgctaggtgttgggggtgcgagccctcagtgccgaaggaaacccaataagcactccgcctggggagtacggtcgcaagactgaaactcaaaggaattgacgggggcccgcacaagcagtggagcatgtggtttaattcgaagcaacgcgaagaaccttaccagggcttgacatccctctgacgcactcagagatgggtgttcccntntgggcagaggagacaggtggtgcatggttgtcgtcagctcgtgtcgtgagatgttgggttaagtcccgcaacgagcgcaacccttgacctgtgttaccagcgcgtganggnggggactcacaggtgactgccggcgcaagccggaggaaggcggggatgacgtcaaatcatcatgcccttgatgtcctgggcgacacacgtgctacaatgggcggtacaacgggcagcgagaccgcgaggtggagcgaatccctgaaagccgctcgtagttcggattgcaggctgcaacccgcctgcatgaagncggaattgctagtaatcgcggatcagcatgccgcggtgaatccgttcccgggccttgtacacaccgcccgtcacaccacgagagtgagcaacacccgaagtcggtgaggcaaccggataggagccagccgccgaaggtggggctcgcgattggggtgaagtcgtaacaaggtagccgtatcggaaggtgcggttggat

SEQ ID NO: 127 - DNA, 1528 bp, Alicyclobacillus pomorum
  modified_base (1017)..(1017): a, c, t, g, unknown or other
agagtttgatcctggctcaggacgaacgctggcggcgtgcctaatacatgcaagtcgagcggacggaagggagcttgctcccggaagtcagcggcggacgggtgagtaacacgtgggcaatctgcctgtcagaccggaataacgcctggaaacgggtgctaatgccggataggcaatctggaggcatctctggattgggaaaggcgcggatgcgccactgacagaggagcccgcggcgcattagctagttggtggggtaacggctcaccaaggcgacgatgcgtagccgacctgagagggtgaccggccacactgggactgagacacggcccagactcctacgggaggcagcagtagggaatcttcggcaatgggcgaaagcctgaccgagcaacgccgcgtgagcgaagaaggccttcgggttgtaaagctcagtcactcgggaagagcggtaaggagaggaaatgctcctttcgagacggtaccgagagaggaagccccggctaactacgtgccagcagccgcggtaatacgtagggggcgagcgttgtccggaatcactgggcgtaaagcgtgcgtaggcggtttgttaagtccgaagtgaaagtccagggctcaaccttgggattgctttggaaactggcagacttgagtgctggagaggcaaggggaattccacgtgtagcggtgaaatgcgtagatatgtggaggaataccagtggcgaaggcgccttgctggacagtgactgacgctgaggcacgaaagcgtggggagcaaacaggattagataccctggtagtccacgccgtaaacgatgagtgctaggtgttggggggtaccaccctcagtgccgaaggaaacccaataagcactccgcctggggagtacggtcgcaagactgaaactcaaaggaattgacgggggcccgcacaagcagtggagcatgtggtttaattcgaagcaacgcgaagaaccttaccagggcttgacatccctctgaccggtgcagagatgtnccttcccttcggggcagaggagacaggtggtgcatggttgtcgtcagctcgtgtcgtgagatgttgggttaagtcccgcaacgagcgcaacccttgacctgtgttaccagcacgtgatggtggggactcacaggtgactgccggcgtaagtcggaggaaggtggggatgacgtcaaatcatcatgccctttatgtcctgggctacacacgtgctacaatgggcggtacaacgggaagcgagaccgcgaggtggagcgaatccctgaaagccgttcgtagttcggattgcaggctgcaactcgcctgcatgaagccggaattgctagtaatcgcggatcagcatgccgcggtgaatccgttcccgggccttgtacacaccgcccgtcacaccacgagagttggcaacacccgaagtcggtgaggtaaccgcaaggagccagccgccgaaggtggggtcgacgattggggtgaagtcgtaacaaggtagccgtatcggaaggtgcggttggat

SEQ ID NO: 128 - DNA, 1464 bp, Alicyclobacillus sp.
  CCUG 53762
aacgctggcggcgtgcctaatacatgcaagtcgcgcgaacggaaggagagcttgctcttctgaagttagcggcggacgggtgagtaacacgtgggcaacctgcctgacagaccgggataacgcttggaaacgagtgctaataccggataggcaaacgggaggcatctcctgattgagaaaggcgctacggcgtcactgtcagatgggcccgcggcgcattagctagttggtgaggtaacggctcaccaaggcgacgatgcgtagccgacctgagagggtgaccggccacactgggactgagacacggcccagactcctacgggaggcagcagtagggaatcttccacaatgggcgcaagcctgatggagcaacgccgcgtgagtgatgaaggccttcgggttgtaaaactctgtcttctgggacgaacgggcaggagagggaatgctcctgccatgacggtaccagaggaggaagccacggctaactacgtgccagcagccgcggtaatacgtaggtggcaagcgttgtccggaattactgggcgtaaagcgcgcgcaggcggccatttaagtctggggtgaaagcccggggctcaaccccgggattgccttggatactggatggcttgagcatcggagaggcaaggggaattccacgtgtagcggtgaaatgcgtagagatgtggaggaacaccagtggcgaaggcgccttgctggccgattgctgacgctgaggcgcgaaagcgtggggagcaaacaggattagataccctggtagtccacgccgtaaacgatgagtgctaggtgttggcggtttcaataccgtcagtgccgaagctaacgcattaagcactccgcctggggagtacggtcgcaagactgaaactcaaaggaattgacgggggcccgcacaagcagtggagcatgtggtttaattcgaagcaacgcgaagaaccttaccaagacttgacatcccgctgaccggtctagagataggccttcccttcggggcagcggagacaggtggtgcatggttgtcgtcagctcgtgtcgtgagatgttgggttaagtcccgcaacgagcgcaacccttgaactgtgttgccagcattgagttgggcactcacagttgactgccggtgacaaaccggaggaaggcggggatgacgtcaaatcatcatgccccttatgtcttgggctacacacgtgctacaatgggcggtacagagggatgcgaaaccgcgaggtggagcgaaacccttaaagccgttcgtagttcggattgcaggctgcaactcgcctgcatgaagccggaattgctagtaatcgcggatcagcatgccgcggtgaatacgttcccgggccttgtacacaccgcccgtcacaccacgagagttggtaacacccgaagtcggtgaggtaaccttatggagccagccgccgaaggtgggatcgatgattgggg

SEQ ID NO: 129 - DNA, 1384 bp, Alistipes finegoldii
  modified_base (24)..(25): a, c, t, g, unknown or other
  modified_base (27)..(27): a, c, t, g, unknown or other
gtcgaggggcagcggggagtagcnngnctccgccggcgaccggcgcacgggtgcgtaacgcgtatgcaacctacctttaacaggggcataacactgagaaattggtactaattccccataacattcgagaaggcatcttcttgggttaaaaactccggtggttaaagatgggcatgcgttgtattagctagttggtgaggtaacggctcaccaaggcaacgatacatagggggactgagaggttaaccccccacattggtactgagacacggaccaaactcctacgggaggcagcagtgaggaatattggtcaatggacgcaagtctgaaccagccatgccgcgtgcaggaagacggctctatgagttgtaaactgcttttgtactagggtaaacgcttctacgtgtaggagcctgaaagtatagtacgaataaggatcggctaactccgtgccagcagccgcggtaatacggaggatccaagcgttatccggatttattgggtttaaagggtgcgtaggcggtttgataagttagaggtgaaataccggggctcaactccggaactgcctctaatactgttgaactagagagtagttgcggtaggcggaatgtatggtgtagcggtgaaatgcttagagatcatacagaacaccgattgcgaaggcagcttaccaaactatatctgacgttgaggcacgaaagcgtggggagcaaacaggattagataccctggtagtccacgcagtaaacgatgataactcgttgtcggcgatacacagtcggtgactaagcgaaagcgataagttatccacctggggagtacgttcgcaagaatgaaactcaaaggaattgacgggggcccgcacaagcggaggaacatgtggtttaattcgatgatacgcgaggaaccttacccgggcttgaaagttagtgacgattctggaaacaggatttcccttcggggcacgaaactaggtgctgcatggttgtcgtcagctcgtgccgtgaggtgtcgggttaagtcccataacgagcgcaacccctaccgttagttgccatcaggtcaagctgggcactctggcgggactgccggtgtaagccgagaggaaggtggggatgacgtcaaatcagcacggcccttacgtccggggctacacacgtgttacaatggtaggtacagagggccgctaccccgcgaggggatgccaatctcgaaagcctatctcagttcggatcggaggctgaaacccgcctccgtgaagttggattcgctagtaatcgcgcatcagccatggcgcggtgaatacgttcccgggccttgtacacaccgcccgtcaagccatggaagctgggggtgcctgaagttcgtgaccgcaaggagc

SEQ ID NO: 130 - DNA, 1317 bp, Alistipes indistinctus
gataaacgctagcggcaggcctaacacatgcaagtcgagggaccggcgcacgggtgcgtaacgcgtatgcaacctacctttaacagggggataatccgaagaaatttggtctaataccccataatgaaaaatggttagagatgggcatgcgttgtattagctagttggtgaggtaacggctcaccaaggctacgatacatagggggactgagaggttttccccccacactggtactgagacacggaccagactcctacgggaggcagcagtgaggaatattggtcaatggacgcaagtctgaaccagccatgccgcgtgcaggatgaaggtgtatgcattgtaaactgcttttgtacgagggtatgaaagtatcgtacgaataagggtcggctaactccgtgccagcagccgcggtaatacggaggacccgagcgttatccggatttattgggtttaaagggtgcgtaggcggattagtaagttagaggtgaaagctcgatgctcaacatcgaaattgcctctgatactgttagtctagagtatagttgcggaaggcggaatgtgtggtgtagcggtgaaatgcttagatatcacacagaacaccgattgcgaaggcagctttccaagctaactgacgctgatgcacgaaagcgtggggagcgaacaggattagataccctggtagtccacgccgtaaacgatgataactcgttgcaggcgagtctgtgacttagcgaaagcgttaagttatccacctggggagtacgttcgcaagaatgaaactcaaaggaattgacgggggcccgcacaagcggaggaacatgtggtttaattcgatgatacgcgaggaaccttacccgggcttgaaagtactaggtgctgcatggttgtcgtcagctcgtgccgtgaggtgtcgggttaagtcccataacgagcgcaacccctactgttagttaccagcacgtgggcactctagcaggactgccggtgtaagccggaggaaggtggggatgacgtcaaatcagcacggcccttacgtccggggcgacacacgtgttacaatggtcggcagagggtcgctaccccgtgaggggatgccaatctcgccgatctcagttcggatggaggctgaaactcgcctccagaagttggattcgctagtaatcgcgcatcagccatggcgcggtgaatacgttcccgggccttgtacacaccgcccgtcaagccatgggagttgggggtgcctgaagtacgtgcgtcctagggcaaaaccgatgactggggctaagtcgtaacaaggtagccgtaccggaagg

SEQ ID NO: 131 - DNA, 932 bp, Alistipes onderdonkii
  modified_base (16)..(16): a, c, t, g, unknown or other
  modified_base (18)..(18): a, c, t, g, unknown or other
  modified_base (99)..(99): a, c, t, g, unknown or other
  modified_base (137)..(137): a, c, t, g, unknown or other
  modified_base (151)..(151): a, c, t, g, unknown or other
atcgtacgaataaggntnggctaactccgtgccagcagccgcggtaatacggaggattcaagcgttatccggatttattgggtttaaagggtgcgtagncggtttgataagttagaggtgaaatcccggggcttaantccggaactgcctntaatactgttagactagagagtagttgcggtaggcggaatgtatggtgtagcggtgaaatgcttagagatcatacagaacaccgattgcgaaggcagcttaccaaactatatctgacgttgaggcacgaaagcgtggggagcaaacaggattagataccctggtagtccacgcagtaaacgatgataactcgttgtcggcgatacacagtcggtgactaagcgaaagcgataagttatccacctggggagtacgttcgcaagaatgaaactcaaaggaattgacgggggcccgcacaagcggaggaacatgtggtttaattggatgatacgcgaggaaccttacccgggcttgaaagttactgacgattctggaaacaggatttcccttcggggcaggaaactaggtgctgcatggttgtcgtcagctcgtgccgtgaggtgtcgggttaagtcccataacgagcgcaacccctaccgttagttgccatcaggtcaagctgggcactctggcgggactgccggtgtaagccgagaggaaggtggggatgacgtcaaatcagcacggcccttacgtccggggctacacacgtgttacaatggtaggtacagagggtcgctaccccgtgaggggatgccaatctcgaaagcctatctcagttcggattggaggctgaaacccgcctccatgaagttggattcgctagtaatcgcgcatcagccatggcgcggtgaatacgttcccgggccttgtacacaccgcccgtcaagccatggaagctg

SEQ ID NO: 132 - DNA, 1523 bp, Alistipes putredinis
gagagtttgatcctggctcaggatgaacgctagcggcaggcttaacacatgcaagtcgaggggcagcataatggatagcaatatctatggtggcgaccggcgcacgggtgcgtaacgcgtatgcaacctacctttaacagggggataacactgagaaattggtactaataccccataatatcatagaaggcatcttttatggttgaaaattccgatggttagagatgggcatgcgttgtattagctagttggtggggtaacggctcaccaaggcgacgatacatagggggactgagaggttaaccccccacactggtactgagacacggaccagactcctacgggaggcagcagtgaggaatattggtcaatggacgcaagtctgaaccagccatgccgcgtgcaggatgacggctctatgagttgtaaactgcttttgtacgagggtaaacgcagatacgtgtatctgtctgaaagtatcgtacgaataaggatcggctaactccgtgccagcagccgcggtaatacggaggattcaagcgttatccggatttattgggtttaaagggtgcgtaggcggtttgataagttagaggtgaaatttcggggctcaaccctgaacgtgcctctaatactgttgagctagagagtagttgcggtaggcggaatgtatggtgtagcggtgaaatgcttagagatcatacagaacaccgattgcgaaggcagcttaccaaactatatctgacgttgaggcacgaaagcgtggggagcaaacaggattagataccctggtagtccacgcagtaaacgatgataactcgttgtcggcgatacacagtcggtgactaagcgaaagcgataagttatccacctggggagtacgttcgcaagaatgaaactcaaaggaattgacgggggcccgcacaagcggaggaacatgtggtttaattcgatgatacgcgaggaaccttacccgggcttgaaagttagcgacgattcttgaaagaggatttcccttcggggcgcgaaactaggtgctgcatggttgtcgtcagctcgtgccgtgaggtgtcgggttaagtcccataacgagcgcaacccctaccgttagttgccatcaggtgaagctgggcactctggcgggactgccggtgtaagccgagaggaaggtggggatgacgtcaaatcagcacggcccttacgtccggggctacacacgtgttacaatggtaggtacagagggcagctacccagcgatgggatgcgaatctcgaaagcctatctcagttcggattggaggctgaaacccgcctccatgaagttggattcgctagtaatcgcgcatcagccatggcgcggtgaatacgttcccgggccttgtacacaccgcccgtcaagccatgggagccgggggtgcctgaagttcgtgaccgcaaggagcgacctagggcaaaactggtgactggggctaagtcgtaacaaggtagccgtaccggaaggtgcggctggaacacctcctttct

SEQ ID NO: 133 - DNA, 1355 bp, Alistipes shahii
  modified_base (753)..(753): a, c, t, g, unknown or other
gcaatacactggtggcgaccggcgcacgggtgcgtaacgcgtatgcaacctacccataacagggggataacactgagaaattggtactaataccccataacatcaggaccggcatcggttttggttgaaaactccggtggttatggatgggcatgcgttgtattagctggttggtgaggtaacggctcaccaaggcaacgatacatagggggactgagaggttaaccccccacattggtactgagacacggaccaaactcctacgggaggcagcagtgaggaatattggtcaatggacgcaagtctgaaccagccatgccgcgtgcaggaagacggctctatgagttgtaaactgcttttgtacgagggtaaacgctcttacgtgtaagagcctgaaagtatcgtacgaataaggtcggctaactcgtgccagcagccgcggtaatacggaggcaagcgttatccggatttattgggtttaaagggtgcgtaggcggtttgataagttagaggtgaaataccggtgcttaacaccggaactgcctctaatactgttgactagagagtagttgcggtaggcggaatgtatggtgtagcggtgaaatgcttagagatcatacagaacaccgattgcgaaggcagcttaccaaactatatctgacgttgaggcacgaaagcgtggggagcaaacaggattagataccctggtagtccacgcagtaaacgatgataactcgctgtcggcgatacacngtcggcggctaagcgaaagcgataagttatccacctggggagtacgttcgcaagaatgaaactcaaaggaattgacgggggcccgcacaagcggaggaacatgtggtttaattcgatgatacgcgaggaaccttacccgggcttgaaagttactgacgattctggaaacaggatttcccttcggggcaggaaactaggtgctgcatggttgtcgtcagctcgtgccgtgaggtgtcgggttaagtcccataacgagcgcaacccctaccgttagttgccatcaggtcaagctgggcactctggcgggactgccggtgtaagccgagaggaaggtggggatgacgtcaaatcagcacggcccttacgtccggggctacacacgtgttacaatggtaggtacagagggcagctacccagtgatgggatgcgaatctcgaaagcctatctcagttcggatcggaggctgaaacccgcctccgtgaagttggattcgctagtaatcgcgcatcagccatggcgcggtgaatacgttcccgggccttgtacacaccgcccgtcaagccatggaagctgggggtgcctgaagttcgtgaccgcaagga

SEQ ID NO: 134 - DNA, 1432 bp, Alistipes sp.
  HGB5
ggcgaccggcgcacgggtgcgtaacgcgtatgcaacctacctttaacaggggcataacactgagaaattggtactaattccccataacattcgagaaggcatcttcttgggttaaaaactccggtggttaaagatgggcatgcgttgtattagctagttggtgaggtaacggctcaccaaggcaacgatacatagggggactgagaggttaaccccccacattggtactgagacacggaccaaactcctacgggaggcagcagtgaggaatattggtcaatggacgcaagtctgaaccagccatgccgcgtgcaggaagacagctctatgagttgtaaactgcttttgtactagggtaaacgctcctacgtgtaggagtctgaaagtatagtacgaataaggatcggctaactccgtgccagcagccgcggtaatacggaggatccaagcgttatccggatttattgggtttaaagggtgcgtaggcggtttgataagttagaggtgaaataccggggctcaactccggaactgcctctaatactgttgaactagagagtagttgcggtaggcggaatgtatggtgtagcggtgaaatgcttagagatcatacagaacaccgattgcgaaggcagcttaccaaactatatctgacgttgaggcacgaaagcgtggggagcaaacaggattagataccctggtagtccacgcagtaaacgatgataactcgttgtcggcgatacacagtcggtgactaagcgaaagcgataagttatccacctggggagtacgttcgcaagaatgaaactcaaaggaattgacgggggcccgcacaagcggaggaacatgtggtttaattcgatgatacgcgaggaaccttacccgggcttgaaagttagtgacgattctggaaacaggatttcccttcggggcacgaaactaggtgctgcatggttgtcgtcagctcgtgccgtgaggtgtcgggttaagtcccataacgagcgcaacccctaccgttagttgccatcaggtcaagctgggcactctggcgggactgccggtgtaagccgagaggaaggtggggatgacgtcaaatcagcacggcccttacgtccggggctacacacgtgttacaatggtaggtacagagggccgctaccccgtgaggggatgccaatctcgaaagcctatctcagttcggatcggaggctgaaacccgcctccgtgaagttggattcgctagtaatcgcgcatcagccatggcgcggtgaatacgttcccgggccttgtacacaccgcccgtcaagccatggaagctgggggtgcctgaagttcgtgaccgcaaggagcgacctagggcaaaaccggtgactggggctaagtcgtaacaaggtagccgtaccggaaggtgcggctggaacacctcctttct

SEQ ID NO: 135 - DNA, 1480 bp, Alistipes sp.
  JC50
tgatcctggctcaggatgaacgctagcggcaggcctaacacatgcaagtcgaggggcagcgggattgaagcttgcttcaattgccggcgaccggcgcacgggtgcgtaacgcgtatgcaacctacccataacagggggataacactgagaaatcggtactaatatcccataacatcatgaggggcatcccttatggttgaaaactccggtggttatggatgggcatgcgttgtattagctggttggtgaggtaacggctcaccaaggcgacgatacatagggggactgagaggttaaccccccacattggtactgagacacggaccaaactcctacgggaggcagcagtgaggaatattggtcaatggacgcaagtctgaaccagccatgccgcgtgcaggatgacggctctatgagttgtaaactgcttttgtacgagggtaaacccggatacgtgtatccggctgaaagtatcgtacgaataaggatcggctaactccgtgccagcagccgcggtaatacggaggattcaagcgttatccggatttattgggtttaaagggtgcgtaggcggtttgataagttagaggtgaaataccggtgcttaacaccggaactgcctctaatactgttgagctagagagtagttgcggtaggcggaatgtatggtgtagcggtgaaatgcttagagatcatacagaacaccgattgcgaaggcagcttaccaaactatatctgacgttgaggcacgaaagcgtggggagcaaacaggattagataccctggtagtccacgcagtaaacgatgataactcgctgtcggcgatacacagtcggtggctaagcgaaagcgataagttatccacctggggagtacgttcgcaagaatgaaactcaaaggaattgacgggggcccgcacaagcggaggaacatgtggtttaattcgatgatacgcgaggaaccttacccgggcttgaaagttactgacgattctggaaacaggatttcccttcggggcaggaaactaggtgctgcatggttgtcgtcagctcgtgccgtgaggtgtcgggttaagtcccataacgagcgcaacccctaccgttagttgccatcaggtcaagctgggcactctggcgggactgccggtgtaagccgagaggaaggtggggatgacgtcaaatcagcacggcccttacgtccggggctacacacgtgttacaatggtaggtacagagggcagctacccagtgatgggatgcgaatctcgaaagcctatctcagttcggattggaggctgaaacccgcctccatgaagttggattcgctagtaatcgcgcatcagccatggcgcggtgaatacgttcccgggccttgtacacaccgcccgtcaagccatggaagctgggggtgcctgaagttcgtgaccgcaaggagcgacctagggcaaaaccggtgactggggctaagtcgtaacaaggta

SEQ ID NO: 136 - DNA, 1304 bp, Alistipes sp.
  RMA 9912
gctcaggatgaacgctagcggcaggcctaacacatgcaagtcgagggaccggcgcacgggtgcgtaacgcgtatgtaacctacctataacaggggcataacactgagaaattggtactaattccccataatgaaaagtggttatagatggacatgcgttgtattagctagttggtgaggtaacggctcaccaaggcaacgatacatagggggactgagaggttaaccccccacactggtactgagacacggaccagactcctacgggaggcagcagtgaggaatattggtcaatggacgcaagtctgaaccagccatgccgcgtgcaggaagacggcttatgagttgtaaactgcttttgtacgagggtatgaaagtatcgtacgaataaggatcggctaactccgtgccagcagccgcggtaatacggaggattcaagcgttatccggatttattgggtttaaagggtgcgtaggcggtttgataagttagaggtgaaatcccggggcttaactccggaactgcctctaatactgttagactagagagtagttgcggtaggcggaatgtatggtgtagcggtgaaatgcttagagatcatacagaacaccgattgcgaaggcagcttaccaaactatctgacgttgaggcacgaaagcgtggggagcaaacaggattagataccctggtagtccacgcagtaaacgatgataactcgttgtcggcgagtcggtgactaagcgaaagcgataagttatccacctggggagtacgttcgcaagaatgaaactcaaaggaattgacgggggcccgcacaagcggaggaacatgtggtttaattcgatgatacgcgaggaaccttacccgggcttgaaagtactaggtgctgcatggttgtcgtcagctcgtgccgtgaggtgtcgggttaagtcccataacgagcgcaacccctaccgttagttgccatcagctgggcactctggcgggactgccggtgtaagccggaggaaggtggggatgacgtcaaatcagcacggcccttacgtccggggctacacacgtgttacaatggtaggcagagggtcgctactccgtgaggagatgccaatctcgcctatctcagttcggatggaggctgaaacccgcctccagaagttggattcgctagtaatcgcgcatcagccatggcgcggtgaatacgttcccgggccttgtacacaccgcccgtcaagccatggaagctgggggtgcctgaagttcgtgcgacctagggcaaaaccggtaactggggctaagtcgtaaca

SEQ ID NO: 137 - DNA, 1404 bp, Alkaliphilus metalliredigenes
  modified_base (133)..(133): a, c, t, g, unknown or other
  modified_base (151)..(151): a, c, t, g, unknown or other
  modified_base (674)..(675): a, c, t, g, unknown or other
cctccttagagtttgatcctggctcaggatgaacgctggcggcgtgcctaacacatgcaagtcgagcgggttaatctgacggaagccttcgggtggaagaaagtgaaactagcggcggacgggtgagtaacgncgtgggcaacctaccttngtacagggggacaacaacgggaaaccgttgctaataccccataaaaccctagaggggcatcccttaagggtcaaagaatttcggtacaagatgggcccgcgtctgattagctagttggtgaggtaatggctcaccaaggcgacgatcagtagccgacctgagagggtgatcggccacactggaactgagacacggtccagactcctacgggaggcagcagtggggaatattgcacaatgggcgaaagcctgatgcagcaacgccgcgtgagcgatgaaggccttcgggtcgtaaagctctgtcctaggggaagaatattgacggtaccctaggaggaagccccggctaactacgtgccagcagccgcggtaatacgtagggggcaagcgttatccggaatcactgggcgtaaagggtgcgtaggcggtcttgcaagtcagaggtgaaaggctacggctcaaccgtagtaagcctttgaaactgctaagacttgagtatgggagaggaaagtggaattcctagnntagcggtgaaatgcgtagatattaggaggaacaccagtggcgaaggcgactttctggacccattactgaccgctgaggcacgaaaagcgtgggggagcaaacaggattagataccctggtagtccacgccgtaaacaatgagtgctaggatgttgggggtcgaacctcagtgccgcagctaacgcattaagcactccgcctggggagtacgctcacaagcagtgaaactcaaaggaattgactggggacccgcacaagcagctggagcatgtggtttaattcgaagcaacgcgaagaaccttacctggacgttgacatccctcggaccactccttaaccggagtcttcccttcggggactgaggtgacaggtggtgcatggttgtcgtcagctcgtgtcgtgagatgttgggttaagtcccgcaacgagcgcaacccttgtctttagttgccagcagttcggctgggcactctagagagactgccggggataactcggaggaaggtggggatgacgtcaaatcatcatgccccttatgttcagggctacacacgtgctacaatggccgatacaacgggcagcgaaggagtaatccggagcaaatcctataaagtcggtcccagttcggattgtgggctgaaactcgcccacatgaagctggagttgctagtaatcgcgaatcagaatgtctgcggtgaatgcgttcccgggtcttgtacactaccagcc

SEQ ID NO: 138 - DNA, 1314 bp, Alkaliphilus oremlandii
aataccccatgacgccttttgggggcatccctaaaaggtcaaagaacttcggtacaggatgggcccgcgtctgattagctagttggtgaggtaatggctcaccaaggcgacgatcagtagccggcctgagagggtgaacggccacactggaactgagacacggtccagactcctacgggaggcagcagtggggaatattgcacaatgggggaaaccctgatgcagcaacgccgcgtgagcgatgaaggccttcgggtcgtaaagctctgtcctaagggaagataatgacggtaccttaggaggaagccccggctaactacgtgccagcagccgcggtaatacgtagggggcaagcgttatccggaatcattgggcgtaaagggtgcgtaggctgccctataggtcagaggtcaaaggctacggctcaaccgtagtaagcctttgaaactgtagggcttgagtgcaggagaggagagtggaattcctagtgtagcggtgaaatgcgtagatattaggaggaacaccagtggcgaaggcgactctctggactgcaactgacgctgaggcacgaaagcgtgggtagcgaacaggattagataccctggtagtccacgccgtaaacgatgagtgctaggtgttgggggtcgaacctcggtgccgaagttaacgcattaagcactccgcctggggagtacgtacgcaagtatgaaactcaaaggaattgacggggacccgcacaagcagcggagcatgtggtttaattcgaagcaacgcgaagaaccttacctggacttgacatccctctgaccgattcttaaccgaatccttcccttcggggacagaggagacaggtggtgcatggttgtcgtcagctcgtgtcgtgggatgttgggttaagtcccgcaacgagcgcaacccttgtctttagttgccatcattaagttgggcactctagagagactgccggggataactcggaggaaggtggggatgacgtcaaatcatcatgccccttatgttcagggctacacacgtgctacaatggccgatacaacgggcagcgaaagagtaatctggagcaaatcctacaaaatcggtcccagttcggattgtgggctgaaactcgcccacatgaagttggagttgctagtaatcgcggatcagaatgtcgcggtgaatgcgttcccgggtcttgtacacaccgcccgtcacaccatgggagttggaagcacccgaagccagctatctaaccgtaaggaggaagctgtcgaaggtgaagctaatgactggggtgaagtcgtaacaaggtagccg

SEQ ID NO: 139 - DNA, 1482 bp, Alloscardovia omnicolens
gacgaacgctggcggcgtgcttaacacatgcaagtcgaacgggatcctttctagcttgctaggggggtgagagtggcgaacgggtgagtaacgcgtgattaacctgccgtgtagtttggaatagctcctggaaacgggtggtaatgccgaatgttccacatgctcgcatgggtgtgtgggaaaacgttttagtgctatgcgatgggatcgcgtcctatcagcttgttggtggggtagtggcctaccaaggcttcgacgggtagccggcctgagagggcgaccggccacattgggactgagatacggcccagactcctacgggaggcagcagtggggaatattgcacaatggggggaaccctgatgcagcgacgccgcgtgcgggatgacggccttcgggttgtaaaccgcttttattggggagcaagcgtgagtgagtgtaccttttgaataagcaccggctaactacgtgccagcagccgcggtaatacgtagggtgcaagcgttgtccggaattattgggcgtaaagagctcgtaggcggtttgtcgcgtctggtgtgaaagtccatcgcttaacggtggattggcgctgggtacgggcaggctagagtgtagtaggggagactggaattctcggtgtaacggtggaatgtgtagatatcgggaagaacaccaatggcgaaggcaggtctctgggctattactgacgctgaggagcgaaagcgtggggagcgaacaggattagataccctggtagtccacgccgtaaacggtggatgctggatgtggggccctttccacgggttctgtgtcggagctaacgcgttaagcatcccgcctggggagtacggccgcaaggctaaaactcaaagaaattgacgggggcccgcacaagcggcggagcatgcggattaattcgatgcaacgcgaagaaccttaccaagacttgacatgttaacgatggcctcagagatggggtgtctcttcggagcgttttcacaggtggtgcatggtcgtcgtcagctcgtgtcgtgagatgttgggttaagtcccgcaacgagcgcaacccttgtcttgtgttgccagcacgttatggtgggaactcacaagagaccgccggggttaactcggaggaaggtggggatgacgtcagatcatcatgccccttacgtcttgggcttcacgcatgctacaatggccggtacagcgaggtgcgatagggtgacctggagcggatctctgaaaaccggtctcagttcggatcggagcctgcaactcggctccgtgaaggtggagtcgctagtaatcgcagatcagcaacgctgcggtgaatgcgttcccgggccttgtacacaccgcccgtcaagtcatgaaagtgggcagcacccgaagccggtggcctaacagtttttgctgggggagccgtctaaggtgaggttcgcgattgggactaagtcgtaacaaggtagccgtaccggaagg

SEQ ID NO: 140 - DNA, 1230 bp, Alloscardovia sp.
  OB7196
cgaacgagtggcgaacgggtgagtaacgcgtgatcaacctgccgtgtagtggggaatagctcctggaaacgggtggtaatgccctatgttgaaaggtgctatgcgatgggatcgcgtcctatcagcttgttggtggggtaatggcctaccaaggcttcgacgggtagccggcctgagagggcgaccggccacattgggactgagatacggcccagactcctacgggaggcagcagtggggaatattgcacaatgggggaaaccctgatgcagcgacgccgcgtgcgggatgacggccttcgggttgtaaaccgcttttaattgggagcatgagtgtaccttttgaataagcaccggctaactacgtgccagcagccgcggtaatacgtagggtgcaagcgttgtccggaattattgggcgtaaagagctcgtaggcggtttgtcgcgtctggtgtgaaagtccatcgcttaacggtggatttgcgctgggtacgggcaggctagagtgtagtaggggagactggaattcccggtgtaacggtggaatgtgtagatatcgggaagaacaccaatggcgaaggcaggtctctgggctaactgacgctgaggagcgaaagcgtggggagcgaacaggattagataccctggtagtccacgccgtaaacggtggatgctggatgtggggcgttctgtgtcggagctaacgcgttaagcatcccgcctggggagtacggccgcaaggctaaaactcaaagaaattgacgggggcccgcacaagcggcggagcatgcggattaattcgatgcaacgcgaagaaccttaccaagacttgacatgcacaggtggtgcatggtcgtcgtcagctcgtgtcgtgagatgttgggttaagtcccgcaacgagcgcaacccttgtcttgtgttgccagcacgtgggaactcacaagagaccgccggggttaactcggaggaaggtggggatgacgtcagatcatcatgccccttacgtcttgggcttcacgcatgctacaatggccggcagcgaggtgcgatagggtgacctggagcggatctctgccggtctcagttcggatggagcctgcaactcggctccagaaggtggagtcgctagtaatcgcagatcagcaacgctgcggtgaatgcgttcccgggccttgtacacaccgcccgtcaagtcatgaaagtgggcaacacccgaagccggtgcctagg

SEQ ID NO: 141 - DNA, 1528 bp, Anaerobaculum hydrogeniformans
agagtttgatcctggctcaggacgaacgctggcggcgcgcttaacacatgcaagtcgtgcgatacctcgagcgagtcttacgacaagctcaaggtagagcggcggacgggtgagtaacacgtgagtagctgtcctaaggagggggataacgcctggaaacgggtgctaaaaccccatatgcctcgcaagaggtgaaaatgtagcttgctacagccttagggtgtgctcgcggcctatcagctagttggtgaggtaacggctcaccaaggctaagacgggtagccggcctgagagggtgtacggccacactggaattgagatacggtccagactcctacgggaggcagcagtggggaatcttgggcaatgggcgaaagcctgacccagcgacgccgcgttggggatgaagcccttcggggtgtaaacccatgttgtaggggacgaagaaagtgacggtaccctacgaggaagccccggctaactacgtgccagcagccgcggtaagacgtagggggcaagcgttgtccggaattactgggcgtaaagggcacgcaggcggtgcgccaagtcgagggtgtaaagttacggctcaaccgtgacattgcaatcgatactggcgcgctggagtgcgggagagggaagtggaattcccggtgtagcggtgaaatgcgtagatatcgggaggaacgccagtggcgaaggcggcttcctggcccgcgactgacgctcatgtgcgaaagccaggggagcgaaccggattagatacccgggtagtcctggccgtaaacgatgggtgctaggtgtaggcgcgtcaagcgtctgtgccgcagttaacgcgataagcacctcgcctggggagtacggtcgcaaggctgaaactcaaaggaattgacgggggcccgcacaagcggtggagcacgtggtttaattcgatgcaaaccgaagaaccttacctgggtttgacatgcaggtggtacgaacctgaaagggcgaggaccatatcttcggatgtggagcctgcacaggtgctgcatggctgtcgtcagctcgtgtcgtgagatgttgggttaagtcccgcaacgagcgcaacccctgcgcctagttgccatcagttaggctgggcactctaggcggactgccggcgacaagtcggaggaaggtggggatgacgtcaagtcatcatggcctttaagcccagggcgacacacgtgctacaatggccagcacagagggcggcaagtccgcgagggcaagcgaatcccttaaagctggtcttagttcggatcgcagtctgcaacccgactgcgtgaagccggaatcgctagtaatcgccggtcagccatacggcggtgaatacgttcccgggccttgtacacaccgcccgtcacaccacccgagttgggtgctcccgaagccgccggcccaacccctttttggggagggaggcgtcgaaggagtgtctgataaggggggtgaagtcgtaacaaggtagccgtaccggaaggtgcggctggatcacctcctttct

SEQ ID NO: 142 - DNA, 1468 bp, Anaerobiospirillum succiniciproducens
gctggcggcaggcctaatacatgcaagtcgaacggtaacagcagagagcttgctctttggctgacgagtggcggacgggtgagtaaggcttgggaatctgcctggtagtgggggacaacagttggaaacgactgctaataccgcatactcccttcgggggaaagacttcggttgctatcagatgagcccaagtgggattagctagtaggtgaggtaaaggctcacctaggcgacgatctctagctggtctgagaggatgatcagccacattgggactgagacacggcccagactcctacgggaggcagcagtagggaatattgcacaatgggggaaaccctgatgcagccatgccgcgtgtgtgaagaaggccttcgggttgtaaagcactttcagtggggaggaaacactgacgttacccacagaagaagcaccggctaactccgtgccagcagccgcggtaatacggagggtgcaagcgttaatcggaataactgggcgtaaagggcatgtaggcggaaaggtaagtaggatgtgaaatacccgggctcaacctgggttggtcattctaaactgcctttctagagtattgcagagggagatggaatttcaggtgtagcggtggaatgcgtagatatctgaaagaacaccagaggcgaaggcggtctcctgggcaaatactgacgctgaggtgcgaaagcgtggggagcaaacaggattagataccctggtagtccacgccgtaaacgatgtcgattaggagcttgaacttcggtttgggttccgcagctaacgcgataaatcgaccgcctggggagtacggccgcaaggttaaaactcaaatgaattgacgggggcccgcacaagcggtggagcatgtggtttaattcgaagcaacgcgaagaaccttacctgaccttgacatcgtaggaatctttyagagatragagagtgccttcgggaacctacagacaggtgctgcatggctgtcgtcagctcgtgtcgtgagatgttgggttaagtcccgcaacgagcgcaacccttgtcctttgttgccaacaggtaaagctgggaactcaaaggagactgccggtgacaaaccggaggaaggtagggatgacgtcaagtcatcatggcccttacggtcagggctacacacgtgctacaatggggcgtacagagggaaacgataccgtgaggtggagtggaacccacaaagcgtcccgcagttcggattggagtctgcaactcgactccatgaagtcggaatcgctagtaatcgcaaatcagaatgttgcggtgaatacgttcccgggccttgtacacaccgcccgtcacaccatgggagcggattgcaccagaagtagttagcttaaccgaaaggagggcgattaccacggtgtggtctgtgactggggtgaagtcgtaacaaggtaaccgtaggggaacctgcggttggatcacctcc

SEQ ID NO: 143 - DNA, 1494 bp, Anaerobiospirillum thomasii
cctggctcagattgaacgctggcggcaggcctaatacatgcaagtcgaacggtaacagtaagatagcttgctatcttagctgacgagtggcggacgggtgagtaaagtctgggaaactgcctgatagagggggacaacagctggaaacggctgctaataccgcatacaccctgagggggaaaggagcaatccgctatcagatgtgcccagatgggattagctagtaggtgtggtaagggcgcacctaggcgacgatctctagctggtctgagaggatgatcagccacattgggactgagacacggcccagactcctacgggaggcagcagtagggaatattgcacaatggggggaaccctgatgcagccatgcccgctgtgtgaagaaggccttcgggttgtaaagcactttcagtggggaggaaatcgcaagagtgacgttacccacagaagaagcaccggctaactccgtgccagcagccgcggtaatacggagggtgcaagcgttaatcggaataactgggcgtaaagggcatgtaggcggatagtcaagtaaggtgtgaaagccccgggctcaacctgggaactgcactttaaactaactatctagagtattgcagagggaaatggaattccaggtgtagcggtgaaatgcgtagatatctggaagaacaccagaggcgaaggcgatctcctgggcagatactgacgctgaggtgcgaaagcgtggggagcaaacaggattagataccctggtagtccacgccgtaaacgatgtcgattagaagcttgagcgatagtttgggtttcgtagctaacgcgctaaatcgaccgcctggggagtacggccgcaaggttaaaactcaaatgaattgacgggggcccgcacaagcggtggagcatgtggtttaattcgatgcaacgcgaagaaccttacctgaccttgacatcgtaggaatgaataagagattattcagtgccttcgggagcctatagacaggtgctgcatggctgtcgtcagctcgtgtcgtgagatgttgggttaagtcccgcaacgagcgcaacccttgtcctttgttgccagcgggtaaagccgggaactcaaaggagactgccagtgacaaactggaggaaggcagggatgacgtcaagtcatcatggcccttacggtcagggctacacacgtgctacaatggggcgtacagagggagacgaaaccgcgaggtggagtggagcccacaaagcgtcccgcagttcggattggagtctgcaactcgactccatgaagtcggaatcgctagtaatcgcaaatcagaatgttgcggtgaatacgtccccgggccttgtacacaccgcccgtcacaccatgggagtgaattgcaccagaagtagttagcctaaccgcaaggagggcgattaccacggtgtggtttatgactggggtgaagtcgtaacaaggtaaccataggggaacctgtggctggatcacctcct

SEQ ID NO: 144 - DNA, 1530 bp, Anaerococcus hydrogenalis
tttaattgagagtttgatcctggctcaggataaacgctggcggcgtgcataacacatgcaagtcgaacgatgaaacttagatgatttcttcggaatgaacttaagtggattagtggcgaacgggtgagtaacacgtgagtaacctgccttacacaaggggatagcctctggaaacggagaataataccctataaagtctaatcagcccatgctggaaagaccaaagatttatcggtgtaagatggacttgcgtctgattagctagttggtgagataaaagctcaccaaggcgacgatcagtagccggcttgagagagtgtacggccacattgggactgagacacggcccaaactcctacgggaggcagcagtggggaattttgcacaatgggggaaaccctgatgcagcgacgccgcgtgatttagaaggccttcgggttgtaaaaatcttttttacgggatgaaaatgacagtaccgtaagaataaggtccggctaaatacgtgccagcagccgcggtaatacgtatggaccgagcgttgtccggaatcattgggcgtaaagggtacgtaggcggcctagtaagttagaagttaaagaatatagctcaactatataaagcttttaaaactgctaggcttgagagatggaagggaaagtggaattcctagtgtagcggtgaaatgcgcagatattaggaagaataccggtggcgaaggcgactttctggtcatcatctgacgctgaggtacgaaagcgtgggtagcaaacaggattagataccctggtagtccacgctgtaaacgatgagtgttaggttcttggaataatctgggagccgcagctaacgcattaaacactccgcctggggagtacgcacgcaagtgtgaaactcaaaggaattgacggggacccgcacaagcagcggagcatgtggtttaattcgacgcaacgcgaagaaccttaccaagtcttgacatatttcggagggaattagagataattccttacgacttcggtcgactgaaatacaggtggtgcatggttgtcgtcagctcgtgtcgtgagatgttgggttaagtcccataacgagcgcaacccctatcgttagttaccatcattaagttggggactctagcgatactgccggtgataaaccggaggaaggtggggacgacgtcaaatcatcatgccctttatgacttgggctacacacgtgctacaatggcagatacagagggcagcgaaagagtgatctgaagcgaaactcacaaaatctgtcccagttcggattgtactctgcaactcgagtacatgaagttggagttgctagtaatcgcgaatcagaatgtcgcggtgaatgcgttcccgggtcttgtacacaccgcccgtcacaccatggaagttggcaatacccgaagcctgtgagcgaaccttttaggacgcagcagtcgaaggtagggtcagtaactggggtgaagtcgtaacaaggtagccgtatcggaaggtgcggctggatcacctcctttct

SEQ ID NO: 145 - DNA, 1426 bp, Anaerococcus lactolyticus
tggattagtggcggacgggtgagtaacgcgtgagtaacctgccttagagaaggggatagcctttggaaacgaagaataataccctataacaccaacacctcgcatgaagagttggtcaaagatttatcgctctaagatggacttgcgtctgattagttagttggtgaggtaacggcccaccaagacagcgatcagtagccggcttgagagagtgtacggccacattgggactgagacacggcccagactcctacgggaggcagcagtggggaattttgcacaatgggggaaaccctgatgcagcgacgccgcgtgatttagaaggccttcgggttgtaaaaatcttttctatgggaagaaaatgacagtaccataggaataaggaccggctaattacgtgccagcagccgcggtaatacgtaaggtccgagcgttgtccggaatcattgggcgtaaagggtacgtaggcgggtaagcaagttagaagtgaaatcctgtagctcaactacagtaagcttttaaaactgctcatcttgagatatggaagggaaagtggaattcctagtgtagcggtgaaatgcgcagatattaggaggaataccggtggcgaaggcgactttctggccataatctgacgctgaggtacgaaagcgtgggtagcaaacaggattagataccctggtagtccacgccgtaaacgatgagtgttaggtgtctggagtaaatctgggtgccgcagctaacgcattaaacactccgcctggggagtacgcgcgcaagcgtgaaactcaaaggaattgacggggacccgcacaagcagcggagcatgtggtttaattcgacgcaacgcgaagaaccttaccaagtcttgacatattacggcgggagctagagatagttccttacttcttcggaagactgtaatacaggtggtgcatggttgtcgtcagctcgtgtcgtgagatgttgggttaagtcccataacgagcgcaacccctatcgttagttaccatcattaagttggggactctaacaatactgccggtgacaaaccggaggaaggtggggatgacgtcaaatcatcatgccctttatgacttgggctacacacgtgctacaatggcaggtacacagagcagctaaacagcgatgtcacgcgaatctcaaaaagcctgtcccagttcggattgcactctgcaactcgagtgcatgaagttggagttgctagtaatcgtggatcagaatgccgcggtgaatgcgttcccgggtcttgtacacaccgcccgtcacaccatggaagttggcaatacccgaagcctgtgagcgaacccttgtggacgcagcagtcgaaggtagggtcagtaactggggtgaagtcgtaacaaggtagccgtatcggaaggtgcggctggatcacctcctttct

SEQ ID NO: 146 - DNA, 1407 bp, Anaerococcus octavius
gattaacgctggcggcgtgcataacacatgcaagtcgaacgatgaaacttaaatgatttcttcggaatgaacttaagtggattagtggcggacgggtgagtaacgcgtgagtaacctgccttacacaaggggatagccgttggaaacgacgaataataccctatgaaactatcacttcgcatgaagcgatagtcaaagtgttagcggtgtaagatggacttgcgtctgattagctagttggtgagaaaaaagcccaccaaggcaacgatcagtagccggcttgagagagtgtacggccacattgggactgagacacggcccagactcctacgggaggcagcagtggggaattttgcacaatgggggaaaccctgatgcagcgacgccgcgtgatttagaaggccttcgggttgtaaaaatcttttgtataggaagaaaatgacagtactatacgaataaggtccggctaattacgtgccagcagccgcggtaatacgtaaggaccgagcgttgtccggaatcattgggcgtaaagggtacgtaggcgggtcattaagttagaagtcaaaggctatagctcaactatagtaagcttctaaaactggagaccttgagtaatggaagggaaagtggaattcctagtgtagcggtggaatgcgcagatattaggaggaataccggtggcgaaggcgactttctggccattaactgacgctgaggtacgaaagcgtgggtagcaaacaggattagataccctggtagtccacgccgtaaacgatgagtgttaggtgtctggagtaaatctgggtgccgcagctaacgcattaaacactccgcctggggagtacgcacgcaagtgtgaaactcaaaggaattgacggggacccgcacaagcagcggagcatgtggtttaattcgaagcaacgcgaagaaccttaccaagtcttgacatattttggaagcacttagagataagtgcctatatcttcggataactgaaatacaggtggtgcatggttgtcgtcagctcgtgtcgtgagatgttgggttaagtcccataacgagcgcaacccctatggctagttaccatcattaagttggggactctagcaatactgccggtgacaaaccggaggaaggtggggatgacgtcaaatcatcatgccctttatgacttgggctacacacgtgctacaatggcaggtacagagggcagcaagacagcgatgttaagcaaaactcaaaaagcctgtcccagttcggattgcactctgcaactcgagtgcatgaagttggagttgctagtaatcgtggatcagaatgccacggtgaatgcgttcccgggtcttgtacacaccgcccgtcacaccatggaagttggcaatacccgaagcctgtgagcgaacc

SEQ ID NO: 147 - DNA, 1521 bp, Anaerococcus prevotii
agagtttgatcctggctcaggataaacgctggcggcgtgcataacacatgcaagtcgaacgatgaagcttaaatgatctcttcggagtgaccttaagtggattagtggcggacgggtgagtaacgcgtgagtaacctgccttgcacaaggggatagccgttggaaacgacgaataataccctatgatatgatagcctcgcatgaagctatcatcaaagatttatcggtgtaagatggactcgcgtctgattagctagttggtggggtaacagctcaccaaggcaacgatcagtagccggcttgagagagtgtacggccacattgggactgagacacggcccagactcctacgggaggcagcagtggggaattttgcacaatgggggcaaccctgatgcagcgacgccgcgtgatttagaaggccttcgggttgtaaaaatcttttgtatgggaagaaaatgacagtaccatacgaataaggaccggctaattacgtgccagcagccgcggtaatacgtaaggtccgagcgttgtccggaatcattgggcgtaaagggtacgtaggcggataagcaagttagaagtgaaatcctatagctcaactatagtaagcttttaaaactgctcatcttgaggtatggaagggaaagtggaattcctagtgtagcggtgaaatgcgcagatattaggaggaataccagtggcgaaggcgactttctggccataaactgacgctgaggtacgaaagcgtgggtagcaaacaggattagataccctggtagtccacgccgtaaacgatgagtgttaggtgtctggaataatctgggtgccgcagctaacgcaataaacactccgcctggggagtacgcacgcaagtgtgaaactcaaaggaattgacggggacccgcacaagcagcggagcatgtggtttaattcgacgcaacgcgaagaaccttaccaagtcttgacatattacggcggggtctagagatagactcttacttcttcggaagactgtaatacaggtggtgcatggttgtcgtcagctcgtgtcgtgagatgttgggttaagtcccataacgagcgcaacccctattgttagttaccatcattaagttggggactctagcaatactgccggtgacaaaccggaggaaggtggggatgacgtcaaatcatcatgccctttatgacttgggctacacacgtgctacaatggcaggtacagagggaagcgagactgcgaagttaagcaaaactcaaaaagcctgtcccagttcggattgcactctgcaactcgagtgcatgaagttggagttgctagtaatcgcagatcagaatgctgcggtgaatgcgttcccgggtcttgtacacaccgcccgtcacaccatggaagttggcaatacccgaagcctgtgagctaacctttagggagcagcagtcgaaggtagggtcagtaactggggtgaagtcgtaacaaggtagccgtatcggaaggtgcggctggatcacctcctttct

SEQ ID NO: 148 - DNA, 1492 bp, Anaerococcus sp.
  8404299
agagtttgatcctggctcaggataaacgctggcggcgtgcataacacatgcaagtcgaacgatgaaccttaattgatttcttcggaatgaaattaagctggattagtggcgaacgggtgagtaacacgtgagtaacctgccttacacaaggggatagcctttggaaacgaagaataataccctataaagtcaaacaatatcgcatgctaragtgaccaaagatttatcggtgtaagatggacttgcgtctgattagctagttggtgagataaaagcccaccaaggcgacgatcagtagccggcttgagagagtgtacggccacattgggactgagacacggcccaaactcctacgggaggcagcagtggggaattttgcacaatgggggaaaccctgatgcagcgacgccgcgtgatttagaaggccttcgggttgtaaaaatcttttttatgggatgaaaatgacagtaccataagaataaggtccggctaaatacgtgccagcagccgcggtaatacgtatggaccgagcgttgtccggaatcattgggcgtaaagggtacgtaggcggcctagtaagttagaagtgaaataatatagctcaactatataaagcttttaaaactgttaggcttgagagatgaaagggaaagtggaattcctagtgtagcggtgaaatgcgcagatattaggaagaataccggtggcgaaggcgactttctggtcatcatctgacgctgaggtacgaaagcgtgggtagcaaacaggattagataccctggtagtccacgctgtaaacgatgagtgttaggttcttggaataatctgggagccgcagctaacgcattaaacactccgcctggggagtacgcacgcaagtgtgaaactcaaaggaattgacggggacccgcacaagcagcggagcatgtggtttaattcgacgcaacgcgaagaaccttaccaagtcttgacataatacggagggaattagagataatttcttatcacttcggtgaactgtattacaggtggtgcatggttgtcgtcagctcgtgtcgtgagatgttgggttaagtcccataacgagcgcaacccctatcgttagttaccatcattaagttggggactctagcgatactgccggtgataaaccggaggaaggtggggacgacgtcaaatcatcatgccctttatgacttgggctacacacgtgctacaatggcagatacagagggcagcgaaagagcgatctgaagcgaaactcacaaagtctgtcccagttcggattgtactctgcaactcgagtacatgaagttggagttgctagtaatcgcgaatcagaatgtcgcggtgaatgcgttcccgggtcttgtacacaccgcccgtcacaccatgggagttggcaatacccgaagcctgtgagcgaaccaattggacgcagcagtcgaaggtagggtcagtaactggggtgaagtcgtaacaaggtagccgt

SEQ ID NO: 149 - DNA, 1486 bp, Anaerococcus sp.
  8405254
tagagtttgatcctggctcaggattaacgctggcggcgtgcataacacatgcaagtcgaacgatgaaactttaatgaacccttcggggagaattaaagcggattagtggcgaacgggtgagtaacgcgtgagtaacctgccttacacaaggggatagcctttggaaacgaagaataataccctataaaaccataaaggcacatgcaattatggtcaaagtattagcggtgtaagatggacttgcgtctgattagctagttggtgagataaaagcccaccaaggcaacgatcagtagccggcttgagagagtgtacggccacattgggactgagacacggcccagactcctacgggaggcagcagtggggaattttgcacaatgggggaaaccctgatgcagcgacgccgcgtgatttagaaggccttcgggttgtaaaaatcttttgtataggaagaaaatgacagtactatacgaataaggtccggctaattacgtgccagcagccgcggtaatacgtaaggaccgagcgttgtccggaatcattgggcgtaaagggtacgtaggcggctagaaaagttagaagtcaaaggctatagctcaactatagtaagcttctaaaactatttagcttgagagatggaagggaaagtggaattcctagtgtagcggtggaatgcgcagatattaggaggaataccggtggcgaaggcgactttctggccattttctgacgctgaggtacgaaagcgtgggtagcaaacaggattagataccctggtagtccacgccgtaaacgatgagtgttaggtgtctggagtcaaatctgggtgccgcagcaaacgcattaaacactccgcctggggagtacgcacgcaagtgtgaaactcaaaggaattgacggggacccgcacaagcagcggagcatgtggtttaattcgacgcaacgcgaagaaccttaccaagtcttgacatattttagaagcaattagagataattgcctatatcttcggataactaaaatacaggtggtgcatggttgtcgtcagctcgtgtcgtgagatgttgggttaagtcccataacgagcgcaacccctattgctagttaccatcattaagttggggactctagtaatactgccggtgacaaaccggaggaaggtggggatgacgtcaaatcatcatgccctttatgacttgggctacacacgtgctacaatggcaggtacacagggaagcaagactgtgaagttaagcaaaactcaaaaagcctgtcccagttcggattgcactctgcaactcgagtgcatgaagttggagttgctagtaatcgcagatcagaatgctgcggtgaatgcgttcccgggtcttgtacacaccgcccgtcacaccatggaagttggcaatacccgaagcctgtgagcgaaccctttggggcgcagcagtcgaaggtagggtcagtaactggggtgaagtcgtaacaagg

SEQ ID NO: 150 - DNA, 1435 bp, Anaerococcus sp.
  9401487
tagagtttgatcctggctcaggattaacgctggcggcgtgcataacacatgcaagtcgaacgatgaaacttaaaagatttcttcggaatgaccttaagtggattagtggcggacgggtgagtaacgcgtgagtaacctgccttacacaaggggatagcctctggaaacggagaataataccctataacaccatcaaatcgcatgaagtgatggtcaaagtgttagcggtgtaagatggacttgcgtctgattagctagttggtgagaaaaaagcccaccaaggcaacgatcagtagccggcttgagagagtgtacggccacattgggactgagacacggcccagactcctacgggaggcagcagtggggaattttgcacaatgggggaaaccctgatgcagcgacgccgcgtgatttagaaggccttcgggttgtaaaaatcttttgtataggaagaaaatgacagtactatacgaataaggtccggctaattacgtgccagcagccgcggtaatacgtaaggaccgagcgttgtccggaatcattgggcgtaaagggtacgtaggcgggtttttaagttagaagtcaaaggctatagctcaactatagtaagcttctaaaactgggaaccttgagagatggaagggaaagtggaattcctagtgtagcggtggaatgcgcagatattaggaggaataccggtggcgaaggcgactttctggccattttctgacgctgaggtacgaaagcgtgggtagcaaacaggattagataccctggtagtccacgccgtaaacgatgagtgttaggtgtctggagtaaatctgggtgccgcagctaacgcattaaacactccgcctggggagtacgcacgcaagtgtgaaactcaaaggaattgacggggacccgcacaagcagcggagcatgtggtttaattcgaagcaacgcgaagaaccttaccaagtcttgacatattacggcagggattagagataatcccctacatcttcggatgactgtaatacaggtggtgcatggttgtcgtcagctcgtgtcgtgagatgttgggttaagtcccataacgagcgcaaccccttttgctagttaccatcattaagttggggactctagcaatactgccggtgacaaaccggaggaaggtggggatgacgtcaaatcatcatgccctttatgacttgggctacacacgtgctacaatggcaggtacacagggcagcaagacagtgatgttaagcgaaactcaaaaagcctgtcccagttcggattgcactctgcaactcgagtgcatgaagttggagttgctagtaatcgtggatcagaatgccgcggtgaatgcgttcccgggtcttgtacacaccgcccgtcacaccatggaagttggcaatacccgaagcctgtgagctaaccctttggg

SEQ ID NO: 151 - DNA, 1289 bp, Anaerococcus sp.
  9403502
aagtaatcaaagtgttttagcggtgtaagatggacttgcgtctgattagctagttggtgagataacagctcaccaaggcaacgatcagtagccggcttgagagagtgtacggccacattgggactgagacacggcccagactcctacgggaggcagcagtggggaattttgcacaatgggggcaaccctgatgcagcgacgccgcgtgatttatgaaggccttcgggttgtaaaaatcttttgtataggaagaagatgacagtactatacgaataaggtccggctaattacgtgccagcagccgcggtaatacgtaaggaccgagcgttgtccggaatcattgggcgtaaagggtacgtaggcggccamttaagttagaagtcaaaggctatagctcaactatagtaagcttctaaaactgggtggcttgagagatggaagggaaagtggaattcctagtgtagcggtgaaatgcgcagatattaggaggaataccggtggcgaaggcgactttctggccattatctgacgctgaggtacgaaagcgtgggtagcaaacaggattagataccctggtagtccacgccgtaaacgatgagtgttaggtgtctggagtaaatctgggtgccgcagctaacgcattaaacactccgcctggggagtacgcacgcaagtgtgaaactcaaaggaattgacggggacccgcacaagcagcggagcatgtggtttaattcgaagcaacgcgaaaaaccttaccaagtcttgacatattacggcgtttcttagagataagaagctatatcttcggataactgtaatacaggtggtgcatggttgtcgtcagctcgtgtcgtgagatgttgggttaagtcccataacgagcgcaacccttatggctagttaccatcattaagttggggactctagcaatactgccggtgacaaaccggaggaaggtggggatgacgtcaaatcatcatgccctttatgacttgggctacacacgtgctacaatggcaggtacagagggcagcgaaactgygaagttaagcgaaactcaaaaagcctgtcccagttcggattgcactctgcaactcgagtgcatgaagttggagttgctagtaatcgcagatcagaatgctgcggtgaatgcgttcccgggtcttgtacacaccgcccgtcacaccatggaagttggcaatacccgaagcctgtgagcgaaccctttgggacgcagcagtcgaaggtagggtcagtaactggggtgaagtcgtaacaaggtagccgta

SEQ ID NO: 152 - DNA, 1445 bp, Anaerococcus sp.
  gpac104
gattaacgctggcggcgtgcataacacatgcaagtggaacgatgaaacttgaatgatctcttcggagtgaacttaagtggattagtggcggacgggtgagtaacgcgtgagtaacctgccttagagaaggggatagcctttggaaacgaagaataataccctatgacatgatagcctcgcatgagattatcrtcaaagatttatcgctctaagatggacttgcgtctgattagttagttggtggggtaacggcccaccaagacagcgatcagtagccggcttgagagagtgtacggccacattgggactgagacacggcccagactcctacgggaggcagcagtggggaattttgcacaatgggggaaaccctgatgcagcgacgccgcgtgatttagaaggccttcgggttgtaaaaatcttttctatgggaagaacatgacagtaccataggaataaggaccggctaattacgtgccagcagccgcggtaatacgtaaggtccgagcgttgtccggaatcattgggcgtaaagggtacgtaggcgggtaagcaagttagaagtgaaatcctatagctcaactatagtaagcttttaaaactgctcatcttgaggtatggaagggaaagtggaattcctagtgtagcggtgaaatgcgcagatattaggaggataccggtggcgaaggcgactttctggcataacctgacgctgaggtacgaaagcgtgggtagcaaacaggattagataccctggtagtccacgccgtaaacgatgagtgttaggtgtctggagtaaatctgggtgccgcagtaacgcattaaacactccgcctggggagtacgcgcgcaagcgtgaaactcaaaggaattgacgggacccgcacaagcagcggagcatgtggtttaattcgacgcaacgcgaagaaccttaccaagtcttgacatattacggcgggagctagagatagttccttacttcttcggaagactgtaatacaggtggtgcatggttgtcgtcagctcgtgtcgtgagatgttgggttaagtcccataacgagcgcaacccctattgttagttaccatcattaagttggggactctaacgatactgccggtgacaaaccggaggaaggtggggacgacgtcaaatcatcatgccctttatgacttgggctacacacgtgctacaatggcaggtacacagagcagctaaacagtgatgtcttgcgaatctcaaaaagcctgtcccagttcggattgtactctgcaactcgagtacatgaagttggagttgctagtaatcgtgaatcagaatgtcgcggtgaatgcgttcccgggtcttgtacacaccgcccgtcacaccatggaagttggcaatgcccgaagcctgtgagcgaacccttgtgggcgcagcagtcgaaggtagggtcagtaactgggtg

SEQ ID NO: 153 - DNA, 1450 bp, Anaerococcus sp.
  gpac126
  modified_base (842)..(842): a, c, t, g, unknown or other
gattaacgctggcggcgtgcataacacatgcaagtcgaacgatgaaagctaaatgatttcttcggaatgaatttagccggattagtggcggacgggtgagtaacgcgtgagtaacctgccttagagaaggggatagcctttggaaacgaagaataataccctatgacaccaacacctcgcatgaagagttggtcaaagatttatcgctctaagatggacttgcgtctgattagttagttggtgaggtaacggctcaccaagacagcgatcagtagccggcttgagagagtgtacggccacattgggactgagacacggcccagactcctacgggaggcagcagtggggaattttgcacaatgggggaaaccctgatgcagcgacgccgcgtgatttagaaggccttcgggttgtaaaaatcttttctatgggaagaaaatgacagtaccataggaataaggaccggctaattacgtgccagcagccgcggtaatacgtaaggtccgagcgttgtccggaatcattgggcgtaaagggtacgtaggcgggtaagcaagttagaagtgaaatcctatagctcaactatagtaagcttttaaaactgctcatcttgaggtatggaagggaaagtggattcctagtgtagcggtgaaatgcgcagatattaggggggataccggtggcgaaggcgactttctggcataacctgacgctgaggtacgaaagcgtgggtagcaaacagggttagataccyggkagtccacgccgtaaacgawgagtgataggtgtctggagaaaatctgggtgccgcagtaacgcatwaaacactccsccctggggantacgcgcgcaagcgtgaaactcaaaggaattgacggggacccgcacaagcagcggagcatgtggtttaattcgacgcaacgcgaagaacctttaccaagtctagacatattaccggcgggatctagagatagatccctacttcttcggaagactgtaatacaggtggtgcatgtttgtcgtcagctcgtgtcgtgagatgttgggttaagtcccataagcgagcgcaacccctattgttagttaccatcattaagttggggactctaacgatactgccgttgacaaaccggagaaagttggggacgacgtcaaatcatcatgccctttatgacttgggctacacacgtgctacaatggcaggtacacagagcagctagacagcgatgtcatgcaaatctcaaaaagcctgtccccagttcggattgtactctgcaactcgagtacatgaagttggagttgctagtaatcgtggatcagaatgccgcggtgaatgcgttcccgggtcttgtacacaccgcccgtcacaccatggaagttggcaatacccgaagcctgtgagcgaacccttgtggaagcagcagtcgaaggtagggtcagtaactgggtg

SEQ ID NO: 154 - DNA, 1440 bp, Anaerococcus sp.
  gpac155
  modified_base (1373)..(1373): a, c, t, g, unknown or other
  modified_base (1395)..(1397): a, c, t, g, unknown or other
  modified_base (1401)..(1401): a, c, t, g, unknown or other
gattaacgctggcggcgttcataacacatgcaagtcgaacgatgaaacttaaatgatctcttcggagtgaatttaagtggattagtggcggacgggtgagtaacgcgtgagtaacctgccttagagaaggggatagcctttggaaacgaagaataataccctatgaaaccataacctcgcatgaggccttggtcaaagatttatcgctctaagatggacttgcgtctgattagttagttggtggggtaacggcccaccaagacagcgatcagtagccggcttgagagagtgtacggccacattgggactgagacacggcccagactcctacgggaggcagcagtggggaattttgcacaatgggggaaaccctgatgcagcgacgccgcgtgatttagaaggccttcgggttgtaaaaatcttttctatgggaagaaaatgacagtaccataggaataaggaccggctaattacgtgccagcagccgcggtaatacgtaaggtccgagcgttgtccggaatcattgggcgtaaagggtacgtaggcgggtaagcaagttagaagtgaaatcctatagctcaactatagtaagcttttaaaactgctcatcttgaggtatggaagggaaagtggaattcctagtgtagcggtgaaatgcgcagatattaggaggaataccggtggcgaaggcgactttctggccataccctgacgctgaggtacgaaagcgtgggtagcaaaccaggattagataccctggtagtccacgccgtaaacgatgagtgttaggtgtctggagtaaatctgggtgccgcagctaacgcattaaacactccgccctggggagtacgcgcgcaagcgtgaaactcaaaggaattgacggggacccgcacaagcagcggagcatgtggtttaattcgacgcaacgcgaagaaccttaccaagtcttgacatattacggcggaacttagagataagttcttatgacttcggtcaactgtaatacaggtggtgcatggttgtcgtcagctcgtgtcgtgagatgttgggttaagtcccataacgagcgcaacccctattgttagttaccatcattaagttggggactctaacgatactgccggtgacaaaccggaggaaggtggggacgacgtcaaatcatcatgccctttatgacttgggctacacacgtgctacaatggcaggtacacagagcagctaaacagtgatgtcttgcgaatctcaaaaagcctgtcccagttcggattgtactctgcaactcgagtacatgaagttggagttgctagtaatcgtgaatcagaatgtcgcggtgaatgcgttcccggtcttgtacacacgccgtcacaccatgnagttgcatacccgagcctgtgnnncccngtgggcgccgcagtcgaaggtaggtcagtaactggggtg

SEQ ID NO: 155 - DNA, 1457 bp, Anaerococcus sp.
  gpac199
gattaacgctggcggcgtgcataacacatgcaagtggaacgatgaaacttttttgatttcttcggaatgaatataagtggattagtggcggacgggtgagtaacgcgtgagtaacctgccttagagaaggggatagcctttggaaacgaagaataataccctatgaaaccataacctcgcatgaggccttggtcaaagatttatcgctctaagatggacttgcgtctgattagttagttggtggggtaacggcctaccaagacagcgatcagtagccggcttgagagagtgtacggccacattgggactgagacacggcccagactcctacgggaggcagcagtggggaattttgcacaatgggggaaaccctgatgcagcgacgccgcgtgatttagaaggccttcggggttgtaaaaatcttttctatgggaagaaaatgacagtaccatagggaataagggaccgggctaattacgtgccagcagccgcgggtaatacgtaaggtccgcagcgttgtccggaatcattgggcgtaaagggtacgtaggcgggtaagcaagttagaagtgaaatcctatagctcaactatagtaagcttttaaaactgctcatcttgaggtatggaagggaaagtgggattcctagtgtagcggtgaaatgcgcagatattaggaggataccgggtggcgaaggcgactttctgccaataccctgacgctgaggtacgaaagcgtggtagcaaaccaggattagataccctggtagtccacgccgtaaacgatgagtgttaggtgtctggagtaaatctgggtgccgcagctaacgcattaaacactccgcctggggagtacgcgcgcaagcgtgaaactcaaaggaattgacggggacccgcacaagcagcggagcatgtgtttaattcgacgcaacgcgaagaaccttaccaagtcttgacatattacggcggaacttagagataagttcttatgacttcggtcaactgtaatacaggtggtgcatggttgtcgtcagctcgtgtcgtgagatgttgggttaagtcccataacgagcgcaacccctattgttagttaccatcattaagttggggactctaacgatactgccggtgacaaaccggaggaaggtggggacgacgtcaaatcatcatgccctttatgatcttgggctacacacgtgctacaatggcaggtacacagagcagctaaacagtgatgtcttgcgaatctcaaaaagcctgtcccagttcggattgtactctgcaactcgagtacatgaagttggagttgctagtaatcgtgaatcagaatgtcgcggtgaatgcgttccccgggtcttgtacacaccgcccgtcacaccatggaagttggcaatacccgaagccctgtgagcgaacccaattgggcgcagcagtcgaaggtaggtcagtaactggggtg

SEQ ID NO: 156 - DNA, 1458 bp, Anaerococcus sp.
  gpac215
  modified_base (13)..(13): a, c, t, g, unknown or other
  modified_base (737)..(737): a, c, t, g, unknown or other
  modified_base (741)..(741): a, c, t, g, unknown or other
  modified_base (761)..(761): a, c, t, g, unknown or other
taacgctggcggncgtgcataacacatgcaagtcgaacgatgaaacttaaatgatttcttcggaatgaacttaagcggattagtggcgaacgggtgagtaacacgtgagtaacctgccttacacaaggggatagcctttggaaacgaagaataataccctataacgtcaaattatcgcatgatagaatgaccaaagatttatcggtgtaagatggacttgcgtctgattagctagttggtgagataaaggcccaccaaggcaacgatcagtagccggctttgagagagtgtacggccacattgggactgagacacggcccaaactcctacgggaggcagcagtggggaattttgcacaatgggggaaaccctgatgcagcgacgccgcgtgatttagaaggccttcgggttgtaaaaatcttttttatgggatgaaaatgacagtaccataagaataaggtccggctaaatacgtgccagcagccgcggtaatacgtatggaccgagcgttgtccggaatcattgggcgtaaagggtacgtaggcggcccagtaagttagaagtgaaataatatagctcaactatataaagcttttaaaactgctaggcttgagagatggaagggaaagtggaattcctagtgtagcggtgaaatgcgcagatattaggaagaataccggtgccgaagcgactttctggtcatcatctggacgttgaggtacgaaagcgttggttancaanccaggattagatacccctgntagtccacggcctgtaaacgatgagtgttagttcttggaataatctgggagccgcagctaacgcattaaacactccgcctggggagtacgcacgcaagtgtgaaactcaaaggaattgacggggacccgcacaagcagcggagcatgtggtttaattcgacgcaacgcgaagaaccttaccaagtcttgacataatacggagggaattagagatagtttcttaagacttcggtctactgtattacaggtggtgcatggttgtcgtcagctcgtgtcgtgagatgttgggttaagtcccataacgagcgcaacccctatcgttagttaccatcattaagttggggactctagcgatactgccggtgataaaccggaggaaggtggggacgacgtcaaatcatcaatgccccttttaatggaaccttgggctacacacgtgctacaatggcaggtacagagggcagcgaaagagcgatctgaagcgaaactcaaaaaacctgtcccagttcggattgtactctgcaactcgagtacatgaagttggagttgctagtaatcgcgaatcagaatgtcgcggtgaatgcgttcccgggtcttgtacacaccgcccgtcacaccatgggagttggcaatacccgaagcctgtgagcgaccttttaggacgcagcagtcgaaggtaggatcagtaagctgggtg

SEQ ID NO: 157 - DNA, 1530 bp, Anaerococcus tetradius
ttatatatgagagtttgatcctggctcaggattaacgctggcggcgtgcataacacatgcaagtcgaacgatgaagatatttagattccttcgggatgaaaaatattggattagtggcggacgggtgagtaacgcgtgagtaacctgccttacacaaggggatagccgttggaaacgacgaataataccctatgacataaactcttcgcatgaagagcttatcaaagatttatcggtgtaagatggactcgcgtctgattagctagttggtgaggtaacggcccaccaaggcaacgatcagtagccggcttgagagagtgtacggccacattgggactgagacacggcccagactcctacgggaggcagcagtggggaattttgcacaatgggggaaaccctgatgcagcgacgccgcgtgatttagaaggccttcgggttgtaaaaatcttttgtatgggaagaaaatgacagtaccatacgaataaggaccggctaattacgtgccagcagccgcggtaatacgtaaggtccgagcgttgtccggaatcattgggcgtaaagggtacgtaggcggataagcaagttagaagtgaaatcctatagctcaactatagtaagcttttaaaactgctcatcttgaggtatggaagggaaagtggaattcctagtgtagcggtgaaatgcgcagatattaggaggaataccggtggcgaaggcgactttctggccataaactgacgctgaggtacgaaagcgtgggtagcaaacaggattagataccctggtagtccacgccgtaaacgatgagtgttaggtgtctggaataatctgggtgccgcagctaacgcaataaacactccgcctggggagtacgcacgcaagtgtgaaactcaaaggaattgacggggacccgcacaagcagcggagcatgtggtttaattcgacgcaacgcgaagaaccttaccaagtcttgacatattacggagggaattagagatagttccttacttcttcggaagactgtaatacaggtggtgcatggttgtcgtcagctcgtgtcgtgagatgttgggttaagtcccataacgagcgcaacccctatatttagttaccatcattaagttggggactctagatatactgccggtgataaaccggaggaaggtggggatgacgtcaaatcatcatgccctttatgacttgggctacacacgtgctacaatggcaggtacacagggaagcgagactgcgaagttaagcaaaactcaaaaagcctgtcccagttcggattgcactctgcaactcgagtgcatgaagttggagttgctagtaatcgtggatcagaatgccgcggtgaatgcgttcccgggtcttgtacacaccgcccgtcacaccatggaagttggcaatacccgaagcctgtgagctaaccattaggaagcagcagtcgaaggtagggtcagtaactggggtgaagtcgtaacaaggtagccgtatcggaaggtgcggctggatcacctcctttct

SEQ ID NO: 158 - DNA, 1425 bp, Anaerococcus vaginalis
tggattagtggcgaacgggtgagtaacacgtgagtaacctgccttacacaaggggatagcctttggaaacgaagaataataccctataaagtcaaaatatcgcatgataaaatgaccaaagatttatcggtgtaagatggacttgcgtctgattagctagttggtgagataaaagcccaccaaggcgacgatcagtagccggcttgagagagtgtacggccacattgggactgagacacggcccaaactcctacgggaggcagcagtggggaattttgcacaatgggggaaaccctgatgcagcgacgccgcgtgatttagaaggccttcgggttgtaaaaatcttttttatgggatgaaaatgacagtaccataagaataaggtccggctaaatacgtgccagcagccgcggtaatacgtatggaccgagcgttgtccggaatcattgggcgtaaagggtacgtaggcggcctagtaagttagaagtgaaataatatagctcaactatataaagcttttaaaactgttaggcttgagagatgaaagggaaagtggaattcctagtgtagcggtgaaatgcgcagatattaggaagaataccggtggcgaaggcgactttctggtcatcatctgacgctgaggtacgaaagcgtgggtagcaaacaggattagataccctggtagtccacgctgtaaacgatgagtgttaggttcttggaataatctgggagccgcagctaacgcattaaacactccgcctggggagtacgcacgcaagtgtgaaactcaaaggaattgacggggacccgcacaagcagcggagcatgtggtttaattcgacgcaacgcgaagaaccttaccaagtcttgacataatacggagggaattagagataattttctatgacttcggtctactgtattacaggtggtgcatggttgtcgtcagctcgtgtcgtgagatgttgggttaagtcccataacgagcgcaacccctatcgttagttaccatcattaagttggggactctagcgatactgccggtgataaaccggaggaaggtggggacgacgtcaaatcatcatgccctttatgacttgggctacacacgtgctacaatggcagatacagagggcagcgaaagagcgatctgaagcgaaactcacaaagtctgtcccagttcggattgtactctgcaactcgagtacatgaagttggagttgctagtaatcgcgaatcagaatgtcgcggtgaatgcgttcccgggtcttgtacacaccgcccgtcacaccatgggagttggcaatacccgaagcctgtgagcgaaccttttaggacgcagcagtcgaaggtagggtcagtaactggggtgaagtcgtaacaaggtagccgtatcggaaggtgcggctggatcacctcctttct

SEQ ID NO: 159 - DNA, 1035 bp, Anaerofustis stercorihominis
  modified_base (868)..(868): a, c, t, g, unknown or other
  modified_base (940)..(941): a, c, t, g, unknown or other
  modified_base (956)..(956): a, c, t, g, unknown or other
  modified_base (1004)..(1004): a, c, t, g, unknown or other
  modified_base (1020)..(1021): a, c, t, g, unknown or other
gtcgaacgagaagcttacaattgatccttcgggtgaagctgtaagtggacagtggcgaacgggtgagtaacgcgtaggtaaccaacctcatgcagggggatagcccagggaaacttggattaaacccgcataagaccacagcaccgcatggtgcagaggtaaaaactccggtggcatgagacggacctgcgtcttattaggtagttggtgaggtaacggctcaccaagccaacgatgagtagccgacctgagagggtgatcggccacattgggactgagacacggcccagactcctacgggaggcagcagtggggaatattgcgcaatggggggaaccctgacgcagcaacgccgcgtgagcgatgaaggttttcggatcgtaaagctctgtctttggggaagataatgacggtacccaaggaggaagctccggctaactacgtgccagcagccgcggtaatacgtagggagcaagcgttgtccggattcactgggcgtaaagagcacgtaggcggttaattaagtcaggtgtgaaagttttcggctcaaccggaaaagtgcacttgaaactgaataacttgagtatcggagaggtaagcggaattcctagtgtagcggtgaaatgcgtagagattaggaagaacaccggtggcgaaggcggcttactggacgataactgacgctgaggtgcgaaagcgtggggagcgaacaggattagataccctggtagtccacgccgtaaacgatgaatactaggtgttggggtaactcagtgccgcagttaacacattaagtattccgcctggggagtacgctcgcaagagtgaaactcaaaggaattgacgggggcccgcacaagcagcggancatgtggtttaattcgaagcaacgcgaagaaccttaccaggtcttgacatcccttgaccgcctaagagattnnctttccttcgggacnaggagacaggtggtgcatggttgtcgtcagctcgtgtcgtgagatgtngggttaagtcccgcannagcgcaacccttat

SEQ ID NO: 160 - DNA, 1316 bp, Anaeroglobus geminatus
agagtttgatcctggctcaggacaacgctggcggcgtgcgtaacacatgcaagtcgaacgagagagtgagagaagcttgcttttcttacaatcgagtggcaaacgggtgagtaacgcgtaaacaacctgccccgcagatggggacaacagctggaaacggctgctaataccgaatacggtcctcttagcgcatggtaagaggaagaaagggtggcctctggaacaagctaccgctgtgggaggggtttgcgtctgattagctggttggaggggtaacggcccaccaaggcgacgatcagtagccggtctgagaggatgaacggccacattggaactgagacacggtccagactcctacgggaggcagcagtggggaatcttccgcaatgggcgaaagcctgacggagcaacgccgcgtgagtgaagacggccttcgggttgtaaagctctgttataggggacgaacggccgggtagcgaagagggagccggcatgacggtaccgtaagagaaagccacggctaactacgtgccagcagccgcggtaatacgtaggtggcaagcgttgtccggaatgattgggcgtaaagggcgcttggcggctgtgtaagtctgtctagaaagtgcggggctaaaccccgtgagaggatggaaactggacagctgagagtgtcggagaggaaagcggaattcctagtgtagcggtgaaatgcgtagatattaggaggaacaccggtggcgaaagcggctttctggacgacaactgacgctgaggcgcgaaagccaggggagcaaacgggattagataccccggtagtcctggccgtaaacgatgggtactaggtgtaggaggtatcgacccctcctgtgccggagttaacgcaataagtaccccgcctggggagtacggccgcaaggctgaaactcaaaggaattgacgggggcccgcacaagcggtggagtatgtggtttaattcgacgcaacgcgaagaaccttaccaagccttgacattgctcgcaacgggtagagatacctggttcttcttcggaagacgagacaacaggtggtgcacggctgtcgtcagctcgtgtcgtgagatgttgggttaagtcccgcaacgagcgcaacccctatcttcagttaccagcacgtagaggtggggactcaggagagactgccgcagacaatgcggaggaaggcggggacgacgtcaagtcatcatgccccttatggcttgggctacacacgtactacaatggctctaaatagagggaagcgaaggagcgatccggagcaaaccccgcaaacagagtccc

SEQ ID NO: 161 - DNA, 1390 bp, Anaerosporobacter mobilis
ggcggcgtgcttaacacatgcaagtcgaacgaagcaactatcttgcttgcaagagagttgacttagtggcggacgggtgagtaacgcgtgggtaacctgcctcatacagggggataacagttggaaacgactgctaagaccgcataacccgctagtgtcgcatgacacggacggaaaatatttataggtatgagatgggcccgcgtctgattagctagttggtaaggtaacggcttaccaaggcgacgatcagtagccgacttgagagagtgatcggccacattgggactgagacacggcccaaactcctacgggaggcagcagtggggaatattggacaatgggggaaaccctgatccagcgacgccgcgtgagtgaagaagtatttcggtatgtaaagctctatcagcagggaagataatgacagtacctgactaagaagccccggctaactacgtgccagcagccgcggtaatacgtagggggcaagcgttatccggatttactgggtgtaaagggagcgtaggtggcatggcaagtcagaagtgaaagcccagggctcaaccctgggactgcttttgaaactgtcaagctagagtgcaggagaggtaagtggaattcctagtgtagcggtgaaatgcgtagatattaggaggaacaccagtggcgaaggcggcttactggactgtaactgacactgaggctcgaaagcgtggggagcaaacaggattagataccctggtagtccacgccgtaaacgatgaatactaggtgtctgggattcgattctcaggtgccgacgctaacgcattaagtattccacctggggagtacgttcgcaagaatgaaactcaaaggaattgacggggacccgcacaagcggtggagcatgtggtttaattcgaagcaacgcgaagaaccttacctagtcttgacatcccgatgaccggactttaatcggtccttctcttcggagcatcggagacaggtggtgcatggttgtcgtcagctcgtgtcgtgagatgttgggttaagtcccgcaacgagcgcaacccctatctttagtagccagcatttaaggtgggcactctagagagactgccagggataacctggaggaaggtggggatgacgtcaaatcatcatgccccttatgactagggctacacacgtgctacaatggtgataacaaagtgaagcagcctcgtgagagtgagcaaatcacaaaaatgtcatctcagttcggattgtagtctgcaactcgactacatgaagctggaatcgctagtaatcgcgaatcagaatgtcgcggtgaatacgttcccgggtcttgtacacaccgcccgtcacaccatgggagttggtaatgcccgaagtcagtgacccaacc

SEQ ID NO: 162 - DNA, 1539 bp, Anaerostipes caccae
ttgaacatgagagtttgatcctggctcaggatgaacgctggcggcgtgcttaacacatgcaagtcgaacgaagcatttaggattgaagttttcggatggatttcctatatgactgagtggcggacgggtgagtaacgcgtggggaacctgccctatacaggggggataacagctggaaacggctgctaataccgcataagcgcacagaatcgcatgattcagtgtgaaaagccctggcagtataggatggtcccgcgtctgattagctggttggtgaggtaacggctcaccaaggcgacgatcagtagccggcttgagagagtgaacggccacattgggactgagacacggcccaaactcctacgggaggcagcagtggggaatattgcacaatgggggaaaccctgatgcagcgacgccgcgtgagtgaagaagtatttcggtatgtaaagctctatcagcagggaagaaaacagacggtacctgactaagaagccccggctaactacgtgccagcagccgcggtaatacgtagggggcaagcgttatccggaattactgggtgtaaagggtgcgtaggtggcatggtaagtcagaagtgaaagcccggggcttaaccccgggactgcttttgaaactgtcatgctggagtgcaggagaggtaagcggaattcctagtgtagcggtgaaatgcgtagatattaggaggaacaccagtggcgaaggcggcttactggactgtcactgacactgatgcacgaaagcgtggggagcaaacaggattagataccctggtagtccacgccgtaaacgatgaatactaggtgtcggggccgtagaggcttcggtgccgcagcaaacgcagtaagtattccacctggggagtacgttcgcaagaatgaaactcaaaggaattgacggggacccgcacaagcggtggagcatgtggtttaattcgaagcaacgcgaagaaccttacctggtcttgacatcccaatgagcgaaccttaaccggttttttctttcgagacattggagacaggtggtgcatggttgtcgtcagctcgtgtcgtgagatgttgggttaagtcccgcaacgagcgcaacccctatctttagtagccagcatttaaggtgggcactctagagagactgccagggataacctggaggaaggtggggacgacgtcaaatcatcatgccccttatggccagggctacacacgtgctacaatggcgtaaacaaagggaagcgaagtcgtgaggcgaagcaaatcccagaaataacgtctcagttcggattgtagtctgcaactcgactacatgaagctggaatcgctagtaatcgtgaatcagaatgtcacggtgaatacgttcccgggtcttgtacacaccgcccgtcacaccatgggagtcagtaacgcccgaagtcagtgacccaaccgcaaggagggagctgccgaaggtgggaccgataactggggtgaagtcgtaacaaggtagccgtatcggaaggtgcggctggatcacctcctttct

SEQ ID NO: 163 - DNA, 1344 bp, Anaerostipes sp.
  3_2_56FAA
  modified_base (25)..(25): a, c, t, g, unknown or other
  modified_base (44)..(44): a, c, t, g, unknown or other
cggatggatttcctatatgactgantggcggacgggtgagtaangcgtggggaacctgccctatacagggggataacagctggaaacggctgctaataccgcataagcgcacagaatcgcatgattcagtgtgaaaagccctggcagtataggatggtcccgcgtctgattagctggttggtgaggtaacggctcaccaaggcgacgatcagtagccggcttgagagagtgaacggccacattgggactgagacacggcccaaactcctacgggaggcagcagtggggaatattgcacaatgggggaaaccctgatgcagcgacgccgcgtgagtgaagaagtatttcggtatgtaaagctctatcagcagggaagaaaacagacggtacctgactaagaagccccggctaactacgtgcagcccggtaacgggggcaagcgttatcggaattactgggtgtaaagggtgcgtaggtggcatggtaagtcagaagtgaaagcccggggcttaaccccgggactgcttttgaaactgtcatgctggagtgcaggagaggtaagcggaattcctagtgtagcggtgaaatgcgtagatattaggaggaacaccagtggcgaaggcggcttactggactgtcactgacactgatgcacgaaagcgtggggagcaaacaggattagataccctggtagtccacgccgtaaacgatgaatactaggtgtcggggccgtagaggcttcggtgccgcagcaaacgcagtaagtattccacctggggagtacgttcgcaagaatgaaactcaaaggaattgacggggacccgcacaagcggtggagcatgtggtttaattcgaagcaacgcgaagaaccttacctggtcttgacatcccaatgaccgaaccttaaccggttttttctttcgagacattggagacaggtggtgcatggttgtcgtcagctcgtgtcgtgagatgttgggttaagtcccgcaacgagcgcaacccctatctttagtagccagcattacggatgggcactctagagagactgccagggataacctggaggaaggtggggacgacgtcaaatcatcatgccccttatggccagggctacacacgtgctacaatggcgtaaacaaagggaagcgaagtcgtgaggcgaagcaaatcccagaaataacgtctcagttcggattgtagtctgcaactcgactacatgaagctggaatcgctagtaatcgtgaatcagaatgtcacggtgaatacgttcccgggtcttgtacacaccgcccgtcacaccatgggagtcagtaacgcccgaagtcagtgacccaaccgcaa

SEQ ID NO: 164 - DNA, 1360 bp, Anaerotruncus colihominis
cttacgttttgaagttttcggatggatgaatgtaagcttagtggcggacgggtgagtaacacgtgagcaacctgcctttcagagggggataacagccggaaacggctgctaataccgcatgatgttgcgggggcacatgcccctgcaaccaaaggagcaatccgctgaaagatgggctcgcgtccgattagccagttggcggggtaacggcccaccaaagcgacgatcggtagccggactgagaggttgaacggccacattgggactgagacacggcccagactcctacgggaggcagcagtgggggatattgcacaatgggcgaaagcctgatgcagcgacgccgcgtgagggaagacggtcttcggattgtaaacctctgtctttggggaagaaaatgacggtacccaaagaggaagctccggctaactacgtgccagcagcgcggtaatacgtagggagcaagcgttgtccggaattactgggtgtaaagggagcgtaggcgggatggcaagtagaatgttaaatccatcggtcaaccggtggctgcgttctaaactgccgttcttgagtgaagtagaggcaggcggaattcctagtgtagcggtgaaatgcgtagatattaggaggaacaccagtggcgaaggcggcctgctgggctttaactgacgctgaggctcgaaagcgtggggagcaaacaggattagataccctggtagtccacgccgtaaacgatgattactaggtgtggggggactgaccccttccgtgccgcagttaacacaataagtaatccacctggggagtacggccgcaaggttgaaactcaaaggaattgacgggggcccgcacaagcagtggagtatgtggtttaattcgaagcaacgcgaagaaccttaccaggtcttgacatcggatgcatagcctagagataggtgaagcccttcggggcatccagaaaggtggtgcatgagtgtcgtcagctcgtgtcgtgagatgttgggttaagtcccgcaacgagcgcaacccttattattagttgctacgcaagagcactctaatgagactgccgttgacaaaacggaggaaggtggggatgacgtcaaatcatcatgccccttatgacctgggctacacacgtactacaatggcactaaaacagagggcggcgacaccgcgaggtgaagcgaatcccgaaaaagtgtctcagttcagattgcaggctgcaacccgcctgcatgaagtcggaattgctagtaatcgcggatcagcatgccgcggtgaatacgttcccgggccttgtacacaccgcccgtcacaccatgggagtcggtaacacccgaagccagtagcctaaccg

SEQ ID NO: 165 - DNA, 1505 bp, Anaplasma marginale
tcaaacttgagagtttgatcctggctcagaacgaacgctggcggcaagcttaacacatgcaagtcgaacggaccgtatacgcagcttgctgcgtgtatggttagtggcagacgggtgagtaatgcataggaatctacctagtagtatgggatagccactagaaatggtgggtaatactgtataatccctgcgggggaaagatttatcgctattagatgagcctatgtcagattagctagttggtggggtaatggcctaccaaggcggtgatctgtagctggtctgagaggatgatcagccacactggaactgagacacggtccagactcctacgggaggcagcagtggggaatattggacaatgggcgcaagcctgatccagctatgccgcgtgagtgaggaaggccttagggttgtaaaactctttcagtagggaagataatgacggtacctacagaagaagtcccggcaaactccgtgccagcagccgcggtaatacggagggggcaagcgttgttcggaattattgggcgtaaagggcatgtaggcggtttggtaagttaaaggtgaaataccagggcttaaccctggggctgcttttaatactgcaggactagagtccggaagaggatagcggaattcctagtgtagaggtgaaattcgtagatattaggaggaacaccagtggcgaaggcggctgtctggtccggtactgacgctgaggtgcgaaagcgtggggagcaaacaggattagataccctggtagtccacgctgtaaacgatgagtgctgaatgtgggggcttttgcctctgtgttgtagctaacgcgttaagcactccgcctggggactacggtcgcaagactaaaactcaaaggaattgacggggacccgcacaagcggtggagcatgtggtttaattcgatgcaacgcgaaaaaccttaccacttcttgacatggaggctagatccttcttaacagaagggcgcagttcggctgggcctcgcacaggtgctgcatggctgtcgtcagctcgtgtcgtgagatgttgggttaagtcccgcaacgagcgcaaccctcatccttagttaccagcgggtaatgccgggcactttaaggaaactgccagtgataaactggaggaaggtggggatgatgtcaagtcagcacggcccttatggggtgggctacacacgtgctacaatggcgactacaataggttgcaacgtcgcaaggctgagctaatccgtaaaagtcgtctcagttcggattgtcctctgtaactcgagggcatgaagtcggaatcgctagtaatcgtggatcagcatgccacggtgaatacgttctcgggtcttgtacacactgcccgtcacgccatgggaattggcttaactcgaagctggtgcgccaaccgtaaggaggcagccatttaaggttgggtcggtgactggggtgaagtcgtaacaaggtagctgtaggtgaacctgcggctggattacctccttt

SEQ ID NO: 166 - DNA, 1508 bp, Anaplasma phagocytophilum
tcaaacttgagagtttgatcctggctcagaacgaacgctggcggcaagcttaacacatgcaagtcgaacggattattctttatagcttgctataaagaatagttagtggcagacgggtgagtaatgcataggaatctacctagtagtatgggatagccactagaaatggtgggtaatactgtataatccctgcgggggaaagatttatcgctattagatgagcctatgttagattagctagttggtagggtaaaggcctaccaaggcgatgatctatagctggtctgagaggatgatcagccacactggaactgagatacggtccagactcctacgggaggcagcagtggggaatattggacaatgggcgcaagcctgatccagctatgccgcgtgagtgaggaaggccttagggttgtaaaactctttcagtagggaagataatgacggtacctacagaagaagtcccggcaaactccgtgccagcagccgcggtaatacggagggggcaagcgttgttcggaattattgggcgtaaagggcatgtaggcggttcggtaagttaaaggtgaaatgccagggcttaaccctggagctgcttttaatactgccagactagagtccgggagaggatagcggaattcctagtgtagaggtgaaattcgtagatattaggaggaacaccagtggcgaaggcggctatctggtccggtactgacgctgaggtgcgaaagcgtggggagcaaacaggattagataccctggtagtccacgctgtaaacgatgagtgctgaatgtggggattttttatctctgtgttgtagctaacgcgttaagcactccgcctggggactacggtcgcaagactaaaactcaaaggaattgacggggacccgcacaagcggtggagcatgtggtttaattcgatgcaacgcgaaaaaccttaccactccttgacatggagattagatccttcttaacggaagggcgcagttcggctggatctcgcacaggtgctgcatggctgtcgtcagctcgtgtcgtgagatgttgggttaagtcccgcaacgagcgtaaccctcatccttagttgccagcgggttaagccgggcactttaaggaaactgccagtggtaaactggaggaaggtggggatgatgtcaagtcagcacggcccttatggggtgggctacacacgtgctacaatggtgactacaataggttgcaatgtcgcaaggctgagctaatccgtaaaagtcatctcagttcggattgtcctctgcaactcgagggcatgaagtcggaatcgctagtaatcgtggatcagcatgccacggtgaatacgttctcgggtcttgtacacactgcccgtcacgccatgggaattggcttaactcgaagctggtgcgccaaccgaaaggaggcagccatttaaggttgggtcagtgactagggtgaagtcgtaacaaggtagctgtaggtgaacctgcggctggattacctccttt

SEQ ID NO: 167 - DNA, 1393 bp, Aneurinibacillus aneurinilyticus
gtcgagcggaccaaagaagagcttgctcttcggcggttagcggcggacgggtgagtaacacgtaggcaacctgcctgtacgactgggataactccgggaaaccggagctaataccggatacgtttttcagaccgcatggtctgaaagagaaagacctttggtcacgtacagatgggcctgcggcgcattagctagttggtggggtaacggcctaccaaggcgacgatgcgtagccgacctgagagggtgatcggccacactgggactgagacacggcccagactcctacgggaggcagcagtagggaatcttccgcaatggacgaaagtctgacggagcaacgccgcgtgaacgatgaaggttttcggatcgtaaagttctgttgttagggaagaaccgccgggatgacctcccggtctgacggtacctaacgagaaagccccggctaactacgtgccagcagccgcggtaatacgtagggggcaagcgttgtccggaattattgggcgtaaagcgcgcgcaggcggcttcttaagtcaggtgtgaaagcccacggtcaaccgtggagggccacttgaaactgggaggcttgagtgcaggagaggagagcggaattccacgtgtagcggtgaaatgcgtagagatgtggaggaacacccgtggcgaaggcggctctctggcctgtaactgacgctgagcgcgaaagcgtggggagcgaacaggattagataccctggtagtccacgccgtaaacgttgagtgctaggtgttggggactccaatcctcagtgccgcagctaacgcaataagcactccgcctggggagtacggccgcaaggctgaaactcaaaggaattgacggggacccgcacaagcggtggagcatgtggtttaattcgaagcaacgcgaagaaccttaccagggcttgacatcccgctgaccctcctagagataggagctctcttcggagcagcggtgacaggtggtgcatggttgtcgtcagctcgtgtcgtgagatgttgggttaagtcccgcaacgagcgcaacccttgtccttagttgccagcattcagttgggcactctagggagactgccgtcgacaagacggaggaaggtggggatgacgtcaaatcatcatgccccttatgtcctgggctacacacgtgctacaatggatggaacaacgggcagccaactcgcgagagtgcgccaatcccttaaaaccattctcagttcggattgcaggctgcaactcgcctgcatgaagccggaatcgctagtaatcgcggatcagcatgccgcggtgaatacgttcccgggtcttgtacacaccgcccgtcacaccacgagagtttgcaacacccgaagtcggtgaggtaaccgcaaggagc

SEQ ID NO: 168 - DNA, 1417 bp, Aneurinibacillus danicus
  modified_base (809)..(809): a, c, t, g, unknown or other
  modified_base (1245)..(1245): a, c, t, g, unknown or other
cgaacgctggcggcgtgcctaatacatgcaagtcgagcggaccaacggagagcttgctctcctgcggtcagcggcggacgggtgagtaacacgtaggcaacctgcctgtacgaccgggataactccgggaaaccggagctaataccggataggatttcagaccgcatggtttggaatggaaagaccctgtgtcacgtacagatgggcctgcggcgcattagctagttggtggggtaacggcctaccaaggcgacgatgcgtagccgacctgagagggtgaacggccacactgggactgagacacggcccagactcctacgggaggcagcagtagggaatcttccgcaatggacgaaagtctgacggagcaacgccgcgtgaacgaagaaggttttcggatcgtaaagttctgttgttagggaagaaccgccgggataacctcccggtctgacggtacctaacgagaaagccccggctaactacgtgccagcagccgcggtaatacgtagggggcaagcgttgtccggaattattgggcgtaaagcgcgcgcaggcggcttcttaagtcaggtgtgaaagcccacggctcaaccgtggagggccacttgaaactgggaggcttgagtgcaggagaggagagcggaattccacgtgtagcggtgaaatgcgtagagatgtggaggaacacctgtggcgaaggcggctctctggcctgtaactgacgctgaggcgcgaaagcgtggggagcgaacaggattagataccctggtagtccacgccgtaaacgatgagtgctaggtgttggggtntccaaacctcagtgccgcagctaacgcaataagcactccgcctggggagtacggccgcaaggctgaaactcaaaggaattgacggggacccgcacaagcggtggagcatgtggtttaattcgaagcaacgcgaagaaccttaccagggcttgacatcccgctgacccctctagagatagaggcttccttcgggacagcggtgacaggtggtgcatggttgtcgtcagctcgtgtcgtgagatgttgggttaagtcccgcaacgagcgcaacccttgtccttagttgccagcattcagttgggcactctagggagactgccgtcgacaagacggaggaaggtggggatgacgtcaaatcatcatgccccttatgtcctgggctacacacgtgctacaatggatggaacaacgggcagccaactcgcgagagtgagcnaatcccttaaaaccattctcagttcggattgcaggctgcaactcgcctgcatgaagccggaatcgctagtaatcgcggatcagcatgccgcggtgaatacgttcccgggtcttgtacacaccgcccgtcacaccacgagagtttgcaacacccgaagtcggtgaggtaacct

SEQ ID NO: 169 - DNA, 1483 bp, Aneurinibacillus migulanus
aggacgaacgctggcggcgtgcctaatacatgcaagtcgagcggaccaatgaagagcttgctcttcggcggttagcggcggacgggtgagtaacacgtaggcaacctgcctgtacgactgggataactccgggaaaccggagctaataccggatacttctttcagaccgcatggtctgaaagagaaagacctttggtcacgtacagatgggcctgcggcgcattagctagttggtggggtaacggcctaccaaggcgacgatgcgtagccgacctgagagggtgatcggccacactgggactgagacacggcccagactcctacgggaggcagcagtagggaatcttccgcaatggacgaaagtctgacggagcaacgccgcgtgaacgatgaaggttttcggatcgtaaagttctgttgttagggaagaaccgccgggatgacctcccggtctgacggtacctaacgagaaagccccggctaactacgtgccagcagccgcggtaatacgtagggggcaagcgttgtccggaattattgggcgtaaagcgcgcgcaggcggcttcttaagtcaggtgtgaaagcccacggctcaaccgtggagggccacttgaaactgggaagcttgagtgcaggagaggagagcggaattccacgtgtagcggtgaaatgcgtagagatgtggaggaacacccgtggcgaaggcggctctctggcctgtaactgacgctgaggcgcgaaagcgtggggagcgaacaggattagataccctggtagtccacgccgtaaacgttgagtgctaggtgttggggactccaatcctcagtgccgcagctaacgcaataagcactccgcctggggagtacggccgcaaggctgaaactcaaaggaattgacggggacccgcacaagcggtggagcatgtggtttaattcgaagcaacgcgaagaaccttaccagggcttgacatcccgctgaccctcctagagataggagctctcttcggagcagcggtgacaggtggtgcatggttgtcgtcagctcgtgtcgtgagatgttgggttaagtcccgcaacgagcgcaacccttgtccttagttgccagcatttagttgggcactctagggagactgccgtcgacaagacggaggaaggtggggatgacgtcaaatcatcatgccccttatgtcctgggctacacacgtgctacaatggatggaacaacgggcagccaactcgcgagagtgcgcgaatcccttaaaaccattctcagttcggattgcaggctgcaactcgcctgcatgaagccggaatcgctagtaatcgcggatcagcatgccgcggtgaatacgttcccgggtcttgtacacaccgcccgtcacaccacgagagtttgcaacacccgaagtcggtgaggtaaccgcaaggagccagccgccgaaggtggggcagatgattggggtgaagtcgtaacaaggtatccg

SEQ ID NO: 170 - DNA, 1415 bp, Aneurinibacillus terranovensis
gacgaacgctggcggcgtgcctaatacatgcaagtcgagcggacytttaaaagcttgcttttaaaggttagcggcggacgggtgagtaacacgtgggcaacctgcctgtaagctcgggataactccgggaaaccggagctaataccgaatacgattcgcaaccgcatggttgcgaatggaaagttttcgaacacttacagatgggcccgcggcgcattagctggttggtggggtaacggcctaccaaggcgacgatgcgtagccgacctgagagggtgatcggccacactgggactgagacacggcccagactcctacgggaggcagcagtagggaatcttccgcaatggacgaaagtctgacggagcaacgccgcgtgagcgatgaaggttttcggatcgtaaagctctgttgtcagggaagaaccgccgggacgacctcccggtctgacggtacctgacgagaaagccccggctaactacgtgccagcagccgcggtaatacgtagggggcaagcgttgtccggaattattgggcgtaaagcgcgcgcaggcggccttttaagtcaggtgtgaaagcccgcggctcaaccgtggagggccacctgaaactgggaggcttgagtgcaggagaggagagcggaattccacgtgtagcggtgaaatgcgtagagatgtggaggaacacccgtggcgaaggcggctctctggcctgtaactgacgctgaggcgcgaaagcgtggggagcaaacaggattagataccctggtagtccacgccgtaaacgatgagtgctaggtgttggggactccaatcctcagtgccgcagctaacgcaataagcactccgcctggggagtacggccgcaaggctgaaactcaaaggaattgacggggacccgcacaagcggtggagcatgtggtttaattcgaagcaacgcgaagaaccttaccaggacttgacatcccgctgacccctctagagatagaggctcccttcggggcagcggtgacaggtggtgcatggttgtcgtcagctcgtgtcgtgagatgttgggttaagtcccgcaacgagcgcaacccttgtccgtagttgccagcattgagttgggcactctacggagactgccgtcgacaagacggaggaaggtggggatgacgtcaaatcatcatgccccttatgtcctgggctacacacgtgctacaatggatggtacaacgggccgccagctcgcgagagtgagcgaatccctaaaaaccattctcagttcggattgcaggctgcaactcgcctgcatgaagccggaatcgctagtaatcgcggatcagcatgccgcggtgaatacgttcccgggtcttgtacacaccgcccgtcacaccacgagagtttgcaacacccgaagtcggtgaggtaacc

SEQ ID NO: 171 - DNA, 1219 bp, Aneurinibacillus thermoaerophilus
ttcctgaggttagcggcggacgggtgagtaacacgtaggcaacctgcctgtacgaccgggataactccgggaaaccggagctaataccggataggatgccgaaccgcatggttcggcatggaaaggcctttgagccgcgtacagatgggcctgcggcgcattagctagttggtggggtaacggcctaccaaggcgacgatgcgtagccgacctgagagggtgaacggccacactgggactgagacacggcccagactcctacgggaggcagcagtagggaatcttccgcaatggacgaaagtctgacggagcaacgccgcgtgagtgaggaaggtcttcggatcgtaaaactctgttgtcagggaagaaccgccgggatgacctcccggtctgacggtacctgacgagaaagccccggctaactacgtgccagcagccgcggtaatacgtagggggcaagcgttgtccggaattattgggcgtaaagcgcgcgcaggcggcttcttaagtcaggtgtgaaagcccacggctcaaccgtggagggccatctgaaactggggagcttgagtgcagaaggagagcggaattccacgtgtacggtgaaatgcgtaagatgtggaggaacaccagtggcgaaggcggctctctggcctgtaactgacgtgaggcgcgaaagcgtggggagcaaacaggattaataccctggtagtcacccgtaaacgatgagtgctaggtgttggggagtccacctcctcagtgcgcataacgcaataacactcccctgggagtacgccgcaaggctgaaactcaaaggaattgacggggacccgcacaagcggtggagcatgtggtttaatttaagcaacgcgaaaaccttaccagggcttgacatcccgctgacccctccagagatggaggtttccttcgggacagcggtgacaggtggtgcatggttgtcgtcagctcgtgtcgtgagatgttgggttaagtcccgcaacgagcgcaacccttgtcctttgttgccagcattcagttgggcactctaaggagactgccgtcgacaagacggaggaaggtggggatgacgtcaaatcatcatgccccttatgtcctgggctacacacgtgctacaatggacggtacaacgggcgtgccaacccgcgagggtgagccaatccctaaaaaccgttctcagttcggattgcaggctgcaactcgc

SEQ ID NO: 172 - DNA, 1541 bp, Anoxybacillus contaminans
ttagaggttgatcctggctcaggacgaacgctggcggcgtgcctaatacatgcaagtcgagcggaccgaaaagaagcttgcttcgattcggttagcggcggacgggtgagtaacacgtgggcaacctgccctgtagacggggataacaccgagaaatcggtgctaataccggataacacgaaakgycgcatggyctttcgttgaaaggcggcgcaagctgtcgctacaggatgggcccgcggcgcattagctagttggtgaggtaacggctcaccaaggcgacgatgcgtagccgacctgagagggtgatcggccacactgggactgagacacggcccagactcctacgggaggcagcagtagggaatcttccgcaatggacgaaagtctgacggagcaacgccgcgtgagcgaagaaggtcttcggattgtaaagctctgttgttagggaagaacaagtaccgcagtaactggcggtaccttgacggtacctaacgagaaagccacggctaactacgtgccagcagccgcggtaatacgtaggtggcaagcgttgtccggaattattgggcgtaaagcgcgcgcaggcggtcctttaagtctgatgtgaaagcccacggctcaaccgtggagggtcattggaaactgggggacttgagtgcagaagaggagagcggaattccacgtgtagcggtgaaatgcgtagagatgtggaggaacaccagtggcgaaggcggctctctggtctgtaactgacgctgaggcgcgaaagcgtggggagcaaacaggattagataccctggtagtccacgccgtaaacgatgagtgctaagtgttagaggggttacaccctttagtgctgtagctaacgcattaagcactccgcctggggagtacgctcgcaagagtgaaactcaaaggaattgacgggggcccgcacaagcggtggagcatgtggtttaattcgaagcaacgcgaagaaccttaccaggtcttgacatcccttgacaacccaagagattgggcgttccccttcgggggacaaggtgacaggtggtgcatggttgtcgtcagctcgtgtcgtgagatgttgggttaagtcccgcaacgagcgcaacccttgaccttagttgccagcattgagttgggcactctaaggtgactgccgatgacaaatcggaggaaggtggggatgacgtcaaatcatcatgccccttatgacctgggctacacacgtgctacaatgggcggtacaaagggttgcaaacccgcgagggggagccaatcccaaaaagccgctctcagttcggattgcaggctgcaactcgcctgcatgaagccggaatcgctagtaatcgcggatcagcatgccgcggtgaatacgttcccgggccttgtacacaccgcccgtcacaccacgagagtttgcaacacccgaagtcggtgaggtaacccttacgggagccagccgccgaaggtggggcagatgattggggtgaagtcgtaacaaggtagccgtatcggaaggtgcggctggatca

SEQ ID NO: 173 - DNA, 1405 bp, Anoxybacillus flavithermus
  modified_base (12)..(12): a, c, t, g, unknown or other
gcggacgaatcnaaagcttgcttttgattcgttagcggcggacgggtgagtaacacgtgggcaacctgccctgtagacggggataacaccgagaaatcggtgctaataccggataacacgaaatgtcgcatgacgtttcgttgaaagacggcgcaagctgtcgctacaggatgggcccgcggcgcattagctagttggtgaggtaacggctcaccaaggcgacgatgcgtagccgacctgagagggtgatcggccacactgggactgagacacggcccagactcctacgggaggcagcagtagggaatcttccgcaatggacgaaagtctgacggagcaacgccgcgtgagcgaagaaggccttcgggtcgtaaagctctgttgttagggaagaacaagtaacgcagtaactggcgttaccgtgacggtacctaacgagaaagccacggctaactacgtgccagcagccgcggtaatacgtaggtggcaagcgttgtccggaattattgggcgtaaagcgcgcgcaggcggttccttaagtctgatgtgaaagccacggctcaaccgtggagggtcattggaaactgggggacttgagtgcagaagaggagagcggaattccacgtgtagcggtgaaatgcgtagagatgtggaggaacaccagtggcgaaggcggctctctggtctgtaactgacgctgaggcgcgaaagcgtggggagcaaacaggattagataccctggtagtccacgccgtaaacgatgagtgtaagtgttagagggtatccgccctttagtgctgtagctaacgcattaagcactccgcctggggagtacgctcgcaagagtgaaactcaaaggaattgacgggggcccgcacaagcggtggagcatgtggtttaattcgaagcaacgcgaagaaccttaccaagtcttgacatcccctgacaacccgagagatcgggcgttcccccttcggggggacagggtgacaggtggtgcatggttgtcgtcagctcgtgtcgtgagatgttgggttaagtcccgcaacgagcgcaaccctcgaccttagttgccagcattcagttgggcactctaaggtgactgccggctaaaagtcggaggaaggtggggatgacgtcaaatcatcatgccccttatgacctgggctacacacgtgctacaatgggcggtacaaagggtcgcgaacccgcgagggggagccaatcccaaaaagccgctctcagttcggattgcaggctgcaactcgcctgcatgaagccggaatcgctagtaatcgcggatcagcatgccgcggtgaatacgttcccgggccttgtacacaccgcccgtcacaccacgagagtttgcaacacccgaagtcggtgaggtaacccttacgggagc

SEQ ID NO: 174 - DNA, 1483 bp, Arcanobacterium haemolyticum
  modified_base (679)..(679): a, c, t, g, unknown or other
cgaacgctggcggcgtgcttaacacatgcaagtcgaacgatgaaggctcctgcttgcgggggttggattagtggcgaacgggtgagtaatacgtgagtaacctgcccctttctcttgggataagccttggaaacgaggtctaatactagatattctgcttctgccgcatggtgggggttggaaaggttttttctggtgggggatgggctcacggcctatcagcttgttggtggggtgatggcctaccaaggcgtcgacgggtagccggcctgagagggtgaccggccacattgggactgagatacggcccagactcctacgggaggcagcagtggggaatattgcacaatggacggaagtctgatgcagcgaacgccgcgtgggggatgaaggctttcgggttgtaaactccttttaacactgaacaaggcgaaagttgagggtaggtgttgaataagcgccggctaactacgtgccagcagccgcggtaatacgtagggcgcgagcgttgtccggaattattgggcgtaaagagctcgtaggcggtttgtcgcgtctgctgtgaaagaccggggcttaactccggggctgcagtgggtacgggcaggctagagtgcggtaggggtaattggaattcctggtgtagcggtggaatgcgcagatatcaggaggaacaccnatggcgaaggcaggttactgggccgttactgacgctgaggagcgaaagcatggggagcgaacaggattagataccctggtagtccatgccgtaaacgttgggcactaggtgtggggccttttccatgggttctgtaccgtagctaacgcattaagtgccccgcctggggagtacggccgcaaggctaaaactcaaaggaattgacgggggcccgcacaagcggcggagcatgcggattaattcgatgcaacgcgaagaaccttaccaaggcttgacatacaccgggattatgcagagatgtgtgagtcttcggactggtgtacaggtggtgcatggttgtcgtcagctcgtgtcgtgagatgttgggttaagtcccgcaacgagcgcaacccttgtcttgtgttgccagcacgttatggtggggactcacgagagactgccggggttaactcggaggaaggtggggatgacgtcaaatcatcatgccccttatgtcttgggcttcacgcatgctacaatggctggtacagagggttgcgagcttgtgagggtgagcgaatcccttaaagccagtctcagttcggattggggtctgcaactcgaccccatgaagtcggagtcgctagtaatcgcagatcagccaacgctgcggtgaatacgttcccgggccttgtacacaccgcccgtcacgtcacgaaagttggtaacacccgaagcccgtggcctaactcgtttgagggggagcggacgaaggtgggattagccattgggacgaagtcgtaacaaggtagccgtaccggaagg

SEQ ID NO: 175 - DNA, 1293 bp, Arcanobacterium pyogenes
  modified_base (921)..(921): a, c, t, g, unknown or other
catgcagtcgaacgatgaagccggggctttttgttttggtggattagtggcgaacgggtgagtaatacgtgagtaacctgcccttgtctttgggataagcctgggaaactgggtctaataccggatattctgcttttgccgcatggtgggggttggaaagattttttggatggggatgggctcacggcctatcagcttgttggtggggtgatggcctaccaaggcgtcgacgggtagccggcctgagagggtgaccggccacattgggactgagatacggcccagactcctacgggaggcagcagtggggaatattgcacaatggacgcaagtctgatgcagcgacgccgcgtgggggatgaaggctttcgggttgtaaactcctttcagtacagaagaagcatttttgtgacggtatgtgcagaagaagcgccggctaactacgtgccagcagccgcggtaatacgtagggcgcgagcgttgtccggaattattgggcgtaaagagctcgtaggcggtttgttgcgcctgctgtgaaagaccggggcttaacttcggggttgcagtgggtacgggcagactagagtgtggtaggggtaattggaattcctggtgtagcggtggaatgcgcagatatcaggaggaacaccgatggcgaaggcaggttactgggccattactgacgctgaggagcgaaagcgtgggtagcgaacaggattagataccctggtagtccacgctgtaaacgttgggcactaggtgtggggccttttccacgggttctgcgccgtagctaacgctttaagtgccccgcctggggagtacggccgcaaggttaaaactcaaggaattgacgggggcccgcacaagcggcggagcatgcggattaattcgatgcaacgcgaagaaccttaccaaggnttgacatacactgcgatgtgccagagatgtgcagccttcgggtggtgtacaggtggtgcatggttgtcgtcagctcgtgtcgtgagatgttgggttaagtcccgcaacgagcgcaacccttgtcctgtgttgccagcatgttgtggtggggactcacgggagactgccggggttaactcggaggaaggtggggatgacgtcaaatcatcatgccccttatgtcttgggcttcacgcatgctacaatggccggtacagagggttgcgagcctgtgagggtgagctaatcccttaaagctggtctcagttcggattggggtctgcaactcgaccccatgaagtcggagtcgctagtaatcgcagatcagcaacg

SEQ ID NO: 176 - DNA, 1519 bp, Arcobacter butzleri
tttatggagagtttgatcctggctcagagtgaacgctggcggcgtgcttaacacatgcaagtcgaacgagaacggattatagcttgctataattgtcagctaagtggcgcacgggtgagtaatgtataggtaatatgcctcttactaagggataacaattggaaacgattgctaataccttatattcctttttatcaaaagataaaaagggaaagatttattggtaagagattagcctgtattgtatcagttagttggtggggtaatggcctaccaagacgatgacgcataactggtttgagaggatgatcagtcacactggaactgagacacggtccagactcctacgggaggcagcagtggggaatattgcacaatggacgaaagtctgatgcagcaacgccgcgtggaggatgacacatttcggtgcgtaaactccttttatataagaagataatgacggtattatatgaataagcaccggctaactccgtgccagcagccgcggtaatacggagggtgcaagcgttactcggaatcactgggcgtaaagagcgtgtaggcggattgataagtttgaagtgaaatcctatagcttaactatagaactgctttgaaaactgttaatctagaatgtgggagaggtagatggaatttctggtgtaggggtaaaatccgtagagatcagaaggaataccgattgcgaaggcgatctactggaacaatattgacgctgagacgcgaaagcgtggggagcaaacaggattagataccctggtagtccacgccctaaacgatgtacactagttgttgtgaggctcgaccttgcagtaatgcagttaacacattaagtgtaccgcctggggagtacggtcgcaagattaaaactcaaaggaatagacggggacccgcacaagcggtggagcatgtggtttaattcgacgatacacgaagaaccttacctggacttgacatagtaagaatgatttagagatagattagtgtctgcttgcagaaacttgcatacaggtgctgcacggctgtcgtcagctcgtgtcgtgagatgttgggttaagtcccgcaacgagcgcaaccctcgtccttagttgctaacagttcggctgagaactctaaggagactgcctacgcaagtaggaggaaggtgaggatgacgtcaagtcatcatggcccttacgtccagggctacacacgtgctacaatggggtatacaaagagcagcaatacggtgacgtggagcaaatctcaaaaatgcctcccagttcggattgtagtctgcaactcgactacatgaagttggaatcgctagtaatcgtagatcagctatgctacggtgaatacgttcccgggtcttgtactcaccgcccgtcacaccatgggagttgaactcattcgaagcggggatgctaaagtagctaccttccacagtggattcagcgactggggtgaagtcgtaacaaggtaaccgtaggagaacctgcggttggatcacctcctttca

SEQ ID NO: 177 - DNA, 1462 bp, Arcobacter cryaerophilus
  modified_base (195)..(195): a, c, t, g, unknown or other
  modified_base (936)..(936): a, c, t, g, unknown or other
  modified_base (1098)..(1098): a, c, t, g, unknown or other
atggagagtttgatcctggctcagagtgaacgctggcggcgtgcttaacacatgcaagtcgaacgagaacggattatagcttgctataattgtcagctaagtggcgcacgggtgagtaatgtataggtaatatgcctcttactaagggataacaattggaaacgattgctaataccttatactccttgttaactnaagttaataagggaaagatttattggtaagagattagcctgtattgtatcagttagttggtggggtaatggcctaccaagacaatgacacataactggtttgagaggatgatcagtcacactggaactgagacacggtccagactcctacgggaggcagcagtggggaatattgcacaatggacgaaagtctgatgcagcaacgccgcgtggaggatgacacatttcggtgcgtaaactccttttatatgagaagataatgacggtattatatgaataagcaccggctaactccgtgccagcagccgcggtaatacggggggtgcaagcgttactcggaatcactgggcgtaaagagcatgtaggcggattgataagtttgaagtgaaatcctatagcttaactatagaactgctttgaaaactgttaatctagaatgtgggagaggtagatggaatttctggtgtaggggtaaaatccgtagagatcagaaggaataccgattgcgaaggcgatctactggaacattattgacgctgagatgcgaaagcgtggggagcaaacaggattagataccctggtagtccacgccctaaacgatgtacactagttgttgtgagacttgatcttgcagtaatgcagttaacacattaagtgtaccgcctggggagtacggtcgcaagattaaaactcaaaggaatagacggggacccgcacaagcggtggagcatgtggtttaatncgaagatacacgaagaaccttacctggacttgacatagtaagaactttctagagatagattggtgtctgcttgcagaaacttatatacaggtgctgcacggctgtcgtcagctcgtgtcgtgagatgttgggttaagtcccgcaacgagcgcaaccctcgtntttagttgctaacagttcggctgagaactctaaacagactgcctacgcaagtaggaggaaggtgaggacgacgtcaagtcatcatggcccttacgtccagggctacacacgtgctacaatgggatatacaaagagccgcaatacggtgacgtggagcaaatcttataaaatatctcccagttcggattgtagtctgcaactcgactacatgaagttggaatcgctagtaatcgtagatcagctatgctacggtgaatacgttcccgggtcttgtactcaccgcccgtcacaccatgggagtcgaactcattcgaagcggggatgctaaaatagctaccttccacagtggatttggcgactgggg

SEQ ID NO: 178 - DNA, 1482 bp, Arthrobacter agilis
gatcctggctcaggatgaacgctggcggcgtgcttaacacatgcaagtcgaacgatgaacctcacttgtggggggattagtggcgaacgggtgagtaacacgtgagtaacctgcccttgactctgggataagcctgggaaaccgggtctaatactggatacgaccttctggcgcatgccatgttggtggaaagcttttgtggttttggatggactcgcggcctatcagcttgttggtggggtaatggcctaccaaggcgacgacgggtagccggcctgagagggtgaccggccacactgggactgagacacggcccagactcctacgggaggcagcagtggggaatattgcacaatgggcgcaagcctgatgcagcgacgccgcgtgagggatgaaggccttcgggttgtaaacctctttcagtagggaagaagcctgtcttttgggtgggtgacggtacctgcagaagaagcgccggctaactacgtgccagcagccgcggtaatacgtagggcgcaagcgttatccggaattattgggcgtaaagagctcgtaggcggtttgtcgcgtctgccgtgaaagtccggggcttaactccggatctgcggtgggtacgggcagactagagtgcagtaggggagactggaattcctggtgtagcggtgaaatgcgcagatatcaggaggaacaccgatggcgaaggcaggtctctgggctgtaactgacgctgaggagcgaaagcatggggagcgaacaggattagataccctggtagtccatgccgtaaacgttgggcactaggtgtgggggacattccacgttttccgcgccgtagctaacgcattaagtgccccgcctggggagtacggccgcaaggctaaaactcaaaggaattgacgggggcccgcacaagcggcggagcatgcggattaattcgatgcaacgcgaagaaccttaccaaggcttgacatgaaccggaatgatgcagagatgtgtcagccacttgtggccggtttacaggtggtgcatggttgtcgtcagctcgtgtcgtgagatgttgggttaagtcccgcaacgagcgcaaccctcgttccatgttgccagcgggttatgccggggactcatgggagactgccggggtcaactcggaggaaggtggggacgacgtcaaatcatcatgccccttatgtcttgggcttcacgcatgctacaatggccggtacaaagggttgcgatactgtgaggtggagctaatcccaaaaagccggtctcagttcggattgaggtctgcaactcgacctcatgaagttggagtcgctagtaatcgcagatcagcaacgctgcggtgaatacgttcccgggccttgtacacaccgcccgtcaagtcacgaaagttggtaacacccgaagccggtggcctaaccccttgtgggagggagccgtcgaaggtgggaccggcgattgggactaagtcgtaacaag

SEQ ID NO: 179 - DNA, 1519 bp, Arthrobacter arilaitensis
ggagagtttgatcctggctcaggatgaacgctggcggcgtgcttaacacatgcaagtcgaacgatgaagcccagcttgctgggtggattagtggcgaacgggtgagtaacacgtgagtaacctgcccccgactctgggataagcccgggaaactgggtctaataccggatattacctcttgccgcatggcaggtggtggaaagatttatcggtgggggatggactcgcggcctatcagcttgttggtgaggtaatggctcaccaaggcgacgacgggtagccggcctgagagggtgaccggccacactgggactgagacacggcccagactcctacgggaggcagcagtggggaatattgcacaatgggcgaaagcctgatgcagcgacgccgcgtgagggatgacggccttcgggttgtaaacctctttcagtagggaagaagcgaaagtgacggtacctgcagaagaagcgccggctaactacgtgccagcagccgcggtaatacgtagggcgcaagcgttatccggatttattgggcgtaaagagctcgtaggcggtttgtcgcgtctgccgtgaaagtccgaggctcaacctcggatctgcggtgggtacgggcagactagagtgatgtaggggagactggaattcctggtgtagcggtgaaatgcgcagatatcaggaggaacaccgatggcgaaggcaggtctctgggcatttactgacgctgaggagcgaaagcatggggagcgaacaggattagataccctggtagtccatgccgtaaacgttgggcactaggtgtgggggacattccacgttttccgcgccgtagctaacgcattaagtgccccgcctggggagtacggccgcaaggctaaaactcaaaggaattgacgggggcccgcacaagcggcggagcatgcggattaattcgatgcaacgcgaagaaccttaccaaggcttgacatgtgccagaccgcttcagagatggagtttcccttcggggctggttcacaggtggtgcatggttgtcgtcagctcgtgtcgtgagatgttgggttaagtcccgcaacgagcgcaaccctcgttccatgttgccagcacgtagtggtggggactcatgggagactgccggggtcaactcggaggaaggtggggatgacgtcaaatcatcatgccccttatgtcttgggcttcacgcatgctacaatggccggtacaatgggttgcgatactgtgaggtggagctaatccctaaaagccggtctcagttcggattggggtctgcaactcgaccccatgaagtcggagtcgctagtaatcgcagatcagcaacgctgcggtgaatacgttcccgggccttgtacacaccgcccgtcaagtcacgaaagttggtaacacccgaagccgatggcctaaccaccttgtgtggggggagtcgtcgaaggtgggactggcgattgggactaagtcgtaacaaggtagccgtaccggaaggtgcggctggatcacctcct

SEQ ID NO: 180 - DNA, 1468 bp, Arthrobacter bergerei
ctggctcaggacgaacgctggcggcgtgcttaacacatgcaagtcgaacgatgaccccgtgcttgcacgggtgattagtggcgaacgggtgagtaacacgtgagtaacctgcccctgactctgggataagcccgggaaactgggtctaatactggatatgacctttaaccgcatggtttttggtggaaagatttatcggttggggatggactcgcggcctatcagcttgttggtgaggtaatggctcaccaaggcgacgacgggtagccggcctgagagggtgaccggccacactgggactgagacacggcccagactcctacgggaggcagcagtggggaatattgcacaatgggcgaaagcctgatgcagcgacgccgcgtgagggatgacggccttcgggttgtaaacctctttcagtagggaagaagcgaaagtgacggtacctgcagaagaagcgccggctaactacgtgccagcagccgcggtaatacgtagggcgcaagcgttatccggatttattgggcgtaaagagctcgtaggcggtttgtcgcgtctgccgtgaaagtccgaggctcaacctcggatctgcggtgggtacgggcagactagagtgatgtaggggagactggaattcctggtgtagcggtgaaatgcgcagatatcaggaggaacaccgatggcgaaggcaggtctctgggcatctactgacgctgaggagcgaaagcatggggagcgaacaggattagataccctggtagtccatgccgtaaacgttgggcactaggtgtggggaacattccacgttttccgcgccgtagctaacgcattaagtgccccgcctggggagtacggccgcaaggctaaaactcaaaggaattgacgggggcccgcacaagcggcggagcatgcggattaattcgatgcaacgcgaagaaccttaccaaggcttgacatgttccagaccgcctcagagatggggtttcccttcggggctggttcacaggtggtgcatggttgtcgtcagctcgtgtcgtgagatgttgggttaagtcccgcaacgagcgcaaccctcgttccatgttgccagcacgtaaaggtggggactcatgggagactgccggggtcaactcggaggaaggtggggatgacgtcaaatcatcatgccccttatgtcttgggcttcacgcatgctacaatggccggtacaatgggttgcgatactgtgaggtggagctaatccctaaaagccggtctcagttcggattggggtctgcaactcgaccccatgaagtcggagtcgctagtaatcgcagatcagcaacgctgcggtgaatacgttcccgggccttgtacacaccgcccgtcaagtcacgaaagttggtaacacccgaagccgatggcctaaccaccttgtgtggagggagtcgtcgaaggtgggactggcgattgggactaagtcgtaaca

SEQ ID NO: 181 - DNA, 1464 bp, Arthrobacter globiformis
cctggctcaggatgaacgctggcggcgtgcttaacacatgcaagtcgaacgatgatccggtgcttgcaccggggattagtggcgaacgggtgagtaacacgtgagtaacctgcccttgactctgggataagcctgggaaactgggtctaataccggatatgactcctcatcgcatggtggggggtggaaagcttttgtggttttggatggactcgcggcctatcagcttgttggtgaggtaatggctcaccaaggcgacgacgggtagccggcctgagagggtgaccggccacactgggactgagacacggcccagactcctacgggaggcagcagtggggaatattgcacaatgggcgaaagcctgatgcagcgacgccgcgtgagggatgacggccttcgggttgtaaacctctttcagtagggaagaagcgaaagtgacggtacctgcagaagaagcgccggctaactacgtgccagcagccgcggtaatacgtagggcgcaagcgttatccggaattattgggcgtaaagagctcgtaggcggtttgtcgcgtctgccgtgaaagtccggggctcaactccggatctgcggtgggtacgggcagactagagtgatgtaggggagactggaattcctggtgtagcggtgaaatgcgcagatatcaggaggaacaccgatggcgaaggcaggtctctgggcattaactgacgctgaggagcgaaagcatggggagcgaacaggattagataccctggtagtccatgccgtaaacgttgggcactaggtgtgggggacattccacgttttccgcgccgtagctaacgcattaagtgccccgcctggggagtacggccgcaaggctaaaactcaaaggaattgacgggggcccgcacaagcggcggagcatgcggattaattcgatgcaacgcgaagaaccttaccaaggcttgacatggaccggaccgccgcagaaatgtggtttctccttttggggccggttcacaggtggtgcatggttgtcgtcagctcgtgtcgtgagatgttgggttaagtcccgcaacgagcgcaaccctcgttccatgttgccagcgcgtaatggcggggactcatgggagactgccggggtcaactcggaggaaggtggggacgacgtcaaatcatcatgccccttatgtcttgggcttcacgcatgctacaatggccggtacaaagggttgcgatactgtgaggtggagctaatcccaaaaagccggtctcagttcggattggggtctgcaactcgaccccatgaagtcggagtcgctagtaatcgcagatcagcaacgctgcggtgaatacgttcccgggccttgtacacaccgcccgtcaagtcacgaaagttggtaacacccgaagccggtggcctaaccccttgtgggagggagccgtcgaaggtgggactggcgattgggactaagtcg

SEQ ID NO: 182 - DNA, 1472 bp, Arthrobacter nicotianae
  modified_base (608)..(608): a, c, t, g, unknown or other
gatcctggctcaggatgaacgctggcggcgtgcttaacacatgcaagtcgaacgatgaagcccagcttgctgggtggattagtggcgaacgggtgagtaacacgtgagtaacctgcccccgactctgggataagcccgggaaactgggtctaataccggatatgacctcgcaccgcatggtgcggggtggaaagatttatcggtgggggatggactcgcggcctatcagcttgttggtgaggtaatggctcaccaaggcgacgacgggtagccggcctgagagggtgaccggccacactgggactgagacacggcccagactcctacgggaggcagcagtggggaatattgcacaatgggcgcaagcctgatgcagcgacgccgcgtgagggatgacggccttcgggttgtaaacctctttcagtagggaagaagcgaaagtgacggtacctgcagaagaagcgccggctaactacgtgccagcagccgcggtaatacgtagggcgcaagcgttatccggatttattgggcgtaaagagctcgtaggcggtttgtcgcgtctgccgtgaaagtccgaggctcaacctcggatctgcggtgggtacggncagactagagtgatgtaggggagactggaattcctggtgtagcggtgaaatgcgcagatatcaggaggaacaccgatggcgaaggcaggtctctgggcatttactgacgctgaggagcgaaagcatggggagcgaacaggattagataccctggtagtccatgccgtaaacgttgggcactaggtgtgggggacattccacgttttccgcgccgtagctaacgcattaagtgccccgcctggggagtacggccgcaaggctaaaactcaaaggaattgacgggggcccgcacaagcggcggagcatgcggattaattcgatgcaacgcgaagaaccttaccaaggcttgacatgtgccagaccgctccagagatggggtttcccttcggggctggttcacaggtggtgcatggttgtcgtcagctcgtgtcgtgagatgttgggttaagtcccgcaacgagcgcaaccctcgttccatgttgccagcacgtagtggtggggactcatgggagactgccggggtcaactcggaggaaggtggggatgacgtcaaatcatcatgccccttatgtcttgggcttcacgcatgctacaatggccggtacaatgggttgcgatactgtgaggtggagctaatccctaaaagccggtctcagttcggattggggtctgcaactcgaccccatgaagtcggagtcgctagtaatcgcagatcagcaacgctgcggtgaatacgttcccgggccttgtacacaccgcccgtcaagtcacgaaagttggtaacacccgaagccgatggcctaaccacttgtgtgggggagtcgtcgaaggtgggactggcgattgggactaagtcgtaacaag

SEQ ID NO: 183 - DNA, 1345 bp, Atopobium minutum
tcaggatgaacgctggcggcgcgcctaacacatgcaagtcgaacgattaaagcatcttttagatgtgtataaagtggcgaacggctgagtaacacgtgggcaacctgcccttttctttgggatagctacgggaaaccgtgggtaataccgaatatttcttgagtgtcgcatggcacacaagacaaagcgtctagcggaaaaggatgggcccgcggcctgttagcttgttggtggggtaatggcctaccaaggcagttatgggtagccgggttgagagaccgaccggccagattgggactgagacacggcccagactcctacgggaggcagcagtggggaatcttgcgcaatgggggaaaccctgacgcagcgacgccgcgtgcgggatgaaggccttcgggttgtaaaccgctttcagcagggacgaggccgcaaggtgacggtacctgcagaagaagctccggctaaatacgtgccagcagccgcggtaatacgtatggagcaagcgttatccggattcattgggcgtaaagcgctcgtaggcggtctgttaggtcggtaagttaaatccgggggctcaacccccgtccgcttccgataccggcagacttgagtttggtaggggaaggtggaattcctagtgtagcggtggaatgcgcagatattaggaagaacaccggtggcgaaggcggccttctgggccataactgacgctgaggagcgaaagctaggggagcgaacaggattagataccctggtagtcctagccgtaaacgatggacactaggtgtggggggatgtaccttccgtgccgcagctaacgcattaagtgtcccgcctggggagtacgaccgcaaggttaaaactcaaaggaattgacgggrgcccgcacaagcagcggagcatgtggcttaattcgaagcaacgcgaagaaccttaccagggcttgacatttaggtgaagcggcggaaacgtcgtggccgaaaggagcctaaacaggtggtgcatggctgtcgtcagctcgtgtcgtgagatgttgggttaagtcccgcaacgagcgcaacccttgtcgcatgttgccagcaggtcaagctgggcacccgtgcgagaccgccggcgtcaagccggaggaaggtggggacgacgtcaagtcatcatgccccttatgtcctgggctgcacacgtgctacaatggtcggcacagcgggaagcaaacttgcgaaagtaagccaatcccttaaagccggccccagttcggattggaggctgcaacccgcctccatgaagtcggagttgctagtaatcgcggatcagcacgccgcggtgaatgcgttcccgggccttg

SEQ ID NO: 184 - DNA, 1517 bp, Atopobium parvulum
atggagagttcgatcctggctcaggatgaacgctggcggcgcgcctaacacatgcaagtcgaacgattaaagcaccttcgggtgtgtataaagtggcgaacggctgagtaacacgtgggcaacctgcccctttcattgggatagccacgggaaaccgtggataataccgaatacttcgagacttccgcatggaagactcgagaaagctccggcggagagggatgggcccgcggcctgttagcttgttggtggggtaacggcctaccaaggcaatgatgggtagctgggttgagagaccgaccagccagattgggactgagacacggcccagactcctacgggaggcagcagtggggaatcttgcacaatgggcgaaagcctgatgcagcgacgccgcgtgcgggatgaaggccttcgggttgtaaaccgctttcagcagggacgaggcgaaagtgacggtacctgcagaagaagccccggctaactacgtgccagcagccgcggtaatacgtagggggcaagcgttatccggattcattgggcgtaaagcgctcgtaggcggtctgttaggtcgggagttaaatccgggggctcaacccccgctcgctctcgataccggcagacttgagtttggtaggggaaggtggaattcctagtgtagcggtggaatgcgcagatattaggaagaacaccagtggcgaaggcggccttctgggccataactgacgctgaggagcgaaagctaggggagcaaacaggattagataccctggtagtcctagccgtaaacgatggacactaggtgtgggggagtatttcttccgtgccgcagctaacgcattaagtgtcccgcctggggagtacggccgcaaggctaaaactcaaaggaattgacgggggcccgcacaagcagcggagcatgtggtttaattcgaagcaacgcgaagaaccttaccagggcttgacatttaggtgaagcggcggaaacgtcgtggccgaaaggagcctaaacaggtggtgcatggctgtcgtcagctcgtgtcgtgagatgttaggttaagtcctgcaacgagcgcaaccctcgtcgtatgttgccagcggttaggccgggcacccatacgagaccgccggcgtcaagccggaggaaggtggggacgacgtcaagtcatcatgccccttatgtcctgggctacacacgtgctacaatggccggcacaatgggctgccaacccgcgagggtgagcgaatccctaaagccggtcccagttcggattggaggctgcaacccgcctccatgaagtcggagttgctagtaatcgcggatcagcacgccgcggtgaatgcgttcccgggccttgtacacaccgcccgtcacaccacccgagtcgattgcacccgaagtcgtcggcctaaccttttaggagggagacgccgaaggtgtggttggtaaggggggtgaagtcgtaacaaggtagccgtaccggaaggtgcggctggatcacctcctttctagggag

SEQ ID NO: 185 - DNA, 1518 bp, Atopobium rimae
atggagagttcgatcctggctcaggatgaacgctggcggcgcgcctaacacatgcaagtcgaacggttaaagcaccttttaggtgtgtataaagtggcgaacggctgagtaacacgtgggcaacctgccctcctcttggggatagcctcgggaaaccgaggataatacccgatacttcaatgtggccgcatgacgacattgagaaagcttttgcggagaaggatgggcccgcggcctgttagcttgttggtggggtagaggcctaccaaggcaatgatgggtagctgggttgagagaccgaccagccagattgggactgagacacggcccagactcctacgggaggcagcagtggggaatcttgcacaatgggcgaaagcctgatgcagcgacgccgcgtgcgggacgaaggccttcgggttgtaaaccgctttcagcagggacgaggcgaaagtgacggtacctgcagaagaagccccggctaactacgtgccagcagccgcggtaatacgtagggggcaagcgttatccggattcattgggcgtaaagcgctcgtaggcggtctgttaggtcgggagttaaatccggaggctcaacctccgcccgctcccgataccggcagacttgagtttggtaggggaaggtggaattcctagtgtagcggtggaatgcgcagatattaggaagaacaccagtggcgaaggcggccttctgggccataactgacgctgaggagcgaaagctaggggagcaaacaggattagataccctggtagtcctagctgtaaacgatggacactaggtgtgggagaatacgtcttccgtgccgcagctaacgcattaagtgtcccgcctggggagtacggccgcaaggctaaaactcaaaggaattgacggggacccgcacaagcagcggagcatgtggtttaattcgaagcaacgcgaagaaccttaccagggcttgacatgtaggtgaagcggcggaaacgtcgtggccgaaaggagcctacacaggtggtgcatggctgtcgtcagctcgtgtcgtgagatgttaggttaagtcctgcaacgagcgcaaccctcgtcgtatattgccagcggttcggccgggcacctatacgagaccgccggcgtcaagccggaggaaggtggggacgacgtcaagtcatcatgccccttatgtcctgggctacacacgtgctacaatggccggcacaatgagctgccaacccgcaagggcgagcgaatctctaaagccggtcccagttcggattggaggctgcaacccgcctccatgaagtcggagttgctagtaatcgcggatcagcacgccgcggtgaatgcgttcccgggtcttgtacacaccgcccgtcacaccacccgagtcgattgcacccgaagtcgtcggcctaaccttttaggagggagacgccgaaggtgtggttggtaaggggggtgaagtcgtaacaaggtagccgtaccggaaggtgcggctggatcacctcctttctagggag

SEQ ID NO: 186 - DNA, 1355 bp, Atopobium sp.
  BS2
aaagcaccttcgggtgtgtataaagtggcgaacggctgagtaacacgtgggcaacctgcccctctcattgggatagccacgggaaaccgtggataataccgaatacttcgagacttccgcatggaagactcgagaaagctccggcggagagggatgggcccgcggcctgttagcttgttggtggggtaacggcctaccaaggcaatgatgggtagctgggttgagagaccgaccagccagattgggactgagacacggcccagactcctacgggaggcagcagtggggaatcttgcacaatgggcgaaagcctgatgcagcgacgccgcgtgcgggatgaaggccttcgggttgtaaaccgctttcagcagggacgaggcgaaagtgacggtacctgcagaagaagccccggctaactacgtgccagcagccgcggtaatacgtagggggcaagcgttatccggattcattgggcgtaaagcgctcgtaggcggtctgttaggtcgggagttaaatccgggggctcaacccccgttcgctcccgataccggcagacttgagtttggtaggggaaggtggaattcctagtgtagcggtggaatgcgcagatattaggaagaacaccagtggcgaaggcggccttctgggccataactgacgctgaggagcgaaagctaggggagcaaacaggattagataccctggtagtcctagccgtaaacgatggacactaggtgtgggggaatatttcttccgtgccgcagctaacgcattaagtgtcccgcctggggagtacggccgcaaggctaaaactcaaaggaattgacgggggcccgcacaagcagcggagcatgtggtttaattcgaagcaacgcgaagaaccttaccagggcttgacatttaggtgaagcggcggaaacgtcgtggccgaaaggagcctaaacaggtggtgcatggctgtcgtcagctcgtgtcgtgagatgttaggttaagtcctgcaacgagcgcaaccctcgtcgtatgttgccagcggttaggccgggcacccatacgagaccgccggcgtcaagccggaggaaggtggggacgacgtcaagtcatcatgccccttatgtcctgggctacacacgtgctacaatggccggcacaatgggctgccaacccgcgagggtgagcgaatccctaaagccggtcccagttcggattggaggctgcaacccgcctccatgaagtcggagttgctagtaatcgcggatcagcacgccgcggtgaatgcgttcccgggccttgtacacaccgcccgtcacaccacccgagtcgattgcacccgaagtcgtcggcctaaccttttagga

SEQ ID NO: 187 - DNA, 1487 bp, Atopobium sp.
  F0209
gagtttgatcctggctcaggatgaacgctggcggcacgcttaacacatgcaagtcgaacgattaaagcaccttcgggtgtgtatagagtggcgaacggctgagtaacacgtgggcaacctgcccttcagtttggaatagctacgggaaaccgtgggtaataccggatgatccacttccctcgcatgaaggaagtggcaaagatttatcgctgaaggatgggcccgcggcctgttagcttgttggtgaggtaacggctcaccaaggcagtaatgggtagccgggttgagagaccgaccggccagattgggactgagacacggcccagactcctacgggaggcagcagtggggaatcttgcgcaatgggcgaaagcctgacgcagcgatgccgcgtgcgggatgaaggccttcgggtcgtaaaccgctttcagcagggacgaggccgcaaggtgacggtacctgcagaagaagccccggctaactacgtgccagcagccgcggtaatacgtagggggcgagcgttatccggattcattgggcgtaaagcgcgcgtaggcggcctgttaggtcaggagttaaatccgggggctcaacccccgtccgctcctgataccggcaggcttgagtctggtaggggaaggcggaattccaagtgtagcggtggaatgcgcagatatttggaagaacaccggtggcgaaggcggccttctgggccacgactgacgctgaggcgcgaaagctaggggagcgaacaggattagataccctggtagtcctagccgtaaacgatggacactaggtgtggggggatcatccctccgtgccgcagctaacgcattaagtgtcccgcctggggagtacggccgcaaggctaaaactcaaaggaattgacgggggcccgcacaagcagcggagcatgtggcttaattcgaagcaacgcgaagaaccttaccagggcttgacatataggtgaagcggtggaaacaccgtagccgaaaggagcctatacaggtggtgcatggctgtcgtcagctcgtgtcgtgagatgttgggttaagtcccgcaacgagcgcaacccccgtcgtatgttgccagcggttcggccgggcacccatacgagaccgccggcgtcaagccggaggaaggtggggacgacgtcaagtcatcatgccccttatgtcctgggctgcacacgtgctacaatggccggcacaatgggctgccaggtcgcgagaccgagcgaatccctaaagccggccccagttcggattggaggctgcaacccgcctccatgaagtcggagttgctagtaatcgcggatcagcacgccgcggtgaatgcgttcccgggccttgtacacaccgcccgtcacaccacccgagtcgtctgcacccgaagtcgccggcccaaccttttggagggaggtgccgaaggtgtggagggtaaggggggtgaagtcgtaacaaggtagccgtaccggaaggtgc

SEQ ID NO: 188 - DNA, 1473 bp, Atopobium sp.
  ICM42b10
agagtttgatcctggctcaggatgaacgctggcggcgcgcctaacacatgcaagtcgaacgattaaagcaccttcgggtgtgtataaagtggcgaacggctgagtaacacgtgggcaacctgcccctctcattgggatagccacgggaaaccgtggataataccgaatacttcgagtctcccgcatggaagactcgagaaagctccggcggagagggatgggcccgcggcctgttagcttgttggtggggtaacggcctaccaaggcaatgatgggtagctgggttgagagaccgaccagccagattgggactgagacacggcccagactcctacgggaggcagcagtggggaatcttgcacaatgggcgaaagcctgatgcagcgacgccgcgtgcgggatgaaggccttcgggttgtaaaccgctttcagcagggacgaggcgaaagtgacggtacctgcagaagaagccccggctaactacgtgccagcagccgcggtaatacgtagggggcaagcgttatccggattcattgggcgtaaagcgctcgtaggcggtctgttaggtcgggagttaaatccgggggctcaacccccgttcgctcccgataccggcagacttgagtttggtaggggaaggtggaattcctagtgtagcggtggagtgcgcagatattaggaagaacaccagtggcgaaggcggccttctgggccataactgacgctgaggagcgaaagctaggggagcaaacaggattagataccctggtagtcctagccgtaaacgatggacactaggtgtgggggaatatttcttccgtgccgcagctaacgcattaagtgtcccgcctggggagtacggccgcaaggctaaaactcaaaggaattgacgggggcccgcacaagcagcggagcatgtggtttaattcgaagcaacgcgaagaaccttaccagggcttgacatttaggtgaagcggcggaaacgtcgtggccgaaaggagcctaaacaggtggtgcatggctgtcgtcagctcgtgtcgtgagatgttaggttaagtcctgcaacgagcgcaaccctcgtcgtatgttgccagcggttaggccgggcacccatacgagaccgccggcgtcaagccggaggaaggtggggacgacgtcaagtcatcatgccccttatgtcctgggctacacacgtgctacaatggccggcacaatgggctgccaacccgcgagggtgagcgaatccctaaagccggtcccagttcggattggaggctgcaacccgcctccatgaagtcggagttgctagtaatcgcggatcagcacgccgcggtgaatgcgttcccgggccttgtacacaccgcccgtcacaccacccgagtcgattgcacccgaagtcgtcggcctaaccttttaggagggagacgccgaaggtgtggttggtaaggggggtgaagtcgtaacaaggtaacc

SEQ ID NO: 189 - DNA, 1267 bp, Atopobium sp.
  ICM57
cgctggcggcgcgcctaacacatgcaagtcgaacgagtggcgaacggctgagtaacacgtgggcaacctgcccctctcattgggatagccacgggaaaccgtggataataccgaatactgaaaggcggagagggatgggcccgcggcctgttagcttgttggtggggtaacggcctaccaaggcaatgatgggtagctgggttgagagaccgaccagccagattgggactgagacacggcccagactcctacgggaggcagcagtggggaatcttgcacaatgggcgaaagcctgatgcagcgacgccgcgtgcgggatgaaggccttcgggttgtaaaccgctttcagcagggacgatgacggtacctgcagaagaagccccggctaactacgtgccagcagccgcggtaatacgtagggggcaagcgttatccggattcattgggcgtaaagcgctcgtaggcggtctgttaggtcgggagttaaatccgggggctcaacccccgttcgctcccgataccggcagacttgagtttggtaggggaaggtggaattcctagtgtagcggtggaatgcgcagatattaggaagaacaccagtggcgaaggcggccttctgggccaactgacgctgaggagcgaaagctaggggagcaaacaggattagataccctggtagtcctagccgtaaacgatggacactaggtgtgggggcttccgtgccgcagctaacgcattaagtgtcccgcctggggagtacggccgcaaggctaaaactcaaaggaattgacgggggcccgcacaagcagcggagcatgtggtttaattcgaagcaacgcgaagaaccttaccagggcttgacattaacaggtggtgcatggctgtcgtcagctcgtgtcgtgagatgttaggttaagtcctgcaacgagcgcaaccctcgtcgtatgttgccagcggccgggcacccatacgagaccgccggcgtcaagccggaggaaggtggggacgacgtcaagtcatcatgccccttatgtcctgggctacacacgtgctacaatggccggcaatgggctgccaacccgcgagggtgagcgaatccctccggtcccagttcggatggaggctgcaacccgcctccagaagtcggagttgctagtaatcgcggatcagcacgccgcggtgaatgcgttcccgggccttgtacacaccgcccgtcacaccacccgagtcgattgcacccgaagtcgtcgcctagggagacgccgaa

SEQ ID NO: 190 - DNA, 1521 bp, Atopobium vaginae
tttgaacggagagttcgatcctggctcaggatgaacgctggcggcgcgcctaacacatgcaagtcgaacgattaaagcaccttcgggtgtgtataaagtggcgaacggctgagtaacacgtgggcaacctgccctttgcactgggatagcctcgggaaaccgaggttaataccggatactccatatatatcgcatgatgtatatgggaaagctccgacggcaaaggatgggcccgcggcctgttagctagttggtggggtaacggcctaccaaggcaatgatgggtagccgggttgagagaccgaccggccagattgggactgagacacggcccagactcctacgggaggcagcagtggggaatcttgcacaatgggcgaaagcctgatgcagcgacgccgcgtgcgggatgaaggccttcgggttgtaaaccgctttcagcagggacgaggccgcaaggtgacggtacctgcagaagaagccccggctaactacgtgccagcagccgcggtaatacgtagggggcaagcgttatccggattcattgggcgtaaagcgcgcgtaggcggtttgttaggtcaggagttaaatctgggggctcaacccctatccgctcctgataccggcaggcttgagtctggtaggggaaggcggaattccaagtgtagcggtgaaatgcgcagatatttggaagaacaccggtggcgaaggcggccttctgggccacgactgacgctgaggcgcgaaagctaggggagcgaacaggattagataccctggtagtcctagccgtaaacgatggacactaggtgtggggagattatactttccgtgccgcagccaacgcattaagtgtcccgcctggggagtacggtcgcaagactaaaactcaaaggaattgacgggggcccgcacaagcagcggagcatgtggcttaattcgaagcaacgcgaagaaccttaccagggcttgacatttaggtgaagcagtggaaacactgtggccgaaaggagcctaaacaggtggtgcatggctgtcgtcagctcgtgtcgtgagatgttgggttaagtcccgcaacgagcgcaacccttgtcgcatgttgccagcggttaaagccgggcacccatgcgagaccgccggcgttaagccggaggaaggtggggacgacgtcaagtcatcatgccccttatgtcctgggctgcacacgtgctacaatggccggcacagagggctgcaactgcgcgagcagaagcgaatccctaaagccggtcccagttcggattggaggctgcaacccgcctccatgaagtcggagttgctagtaatcgcggatcagcacgccgcggtgaatgcgttcccgggccttgtacacaccgcccgtcacaccacccgagtcgtctgcacccgaagtcgtcggcctaacctgcaaaggagggagacgccgaaggtgtggagggtaaggggggtgaagtcgtaacaaggtagccgtaccggaaggtgcggctggatcacctcctttct

SEQ ID NO: 191 - DNA, 1285 bp, Aurantimonas coralicida
gtaacgcgtgggaatctacccatccctacgggatagctccgggaaactggagataataccgtatacgtcctccgggagaaagatttatcggggatggatgagcccgcgttggattagctagttggtggggtaatggcctaccaaggcgacgatccatagctggtctaagaggatgatcagccacattgggactgagacacggcccaaactcctacgggaggcagcagtggggaatattggacaatgggcgcaagcctgatccagccatgccgcgtgagtgatgaaggccctagggttgtaaagctctttcagtggggacgataatgacggtacccacagaagaagccccggctaacttcgtgccagcagccgcggtaatacgaagggggctagcgttgttcggaattactgggcgtaaagcgcacgtaggcggacatttaagtcaggggtgaaatcccggggctcaaccccggaactgcctctgatactgggtgtcttgagtgtggtagaggtgagtggaattgcgagtgtagaggtgaaattcgtagatattcgcaggaacaccagtggcgaaggcggctcactggaccacaactgacgctgaggtgcgaaagcgtggggagcaaacaggattagataccctggtagtccacgccgtaaacgatggaagctagccgtcggaggatttatccttcggtggcgcagttaacgcattaagcttcccgcctggggagtacggtcgcaagattaaaactcaaaggaattgacgggggcccgcacaagcggtggagcatgtggtttaattcgaagcaacgcgcagaaccttaccagctcttgacatgcctcgacggtatccggagacggatgccttccttcgggacgagtgcacaggtgctgcatggctgtcgtcagctcgtgtcgtgagatgttgggttaagtcccgcaacgagcgcaaccctcgcccttagttgccagcattcagttgggcactctagggggactgccggtgataagccgagaggaaggtggggatgacgtcaagtcctcatggcccttacgggctgggctacacacgtgctacaatggcggtgacagtgggcagccaactcgcgagagtgagctaatcccaaaaaaccgtctcagttcggattgcactctgcaactcgggtgcatgaagttggaatcgctagtaatcgtggatcagcatgccacggtgaatacgttcccgggccttgtacacaccgcccgtcacaccatggkagwkgkttmtmmcsgaasatrgtsc

SEQ ID NO: 192 - DNA, 1390 bp, Aureimonas altamirensis
ctcagaacgaacgctggcggcaggcttaacacatgcaagtcgaacgcacctttcggggtgagtggcagacgggtgagtaacgcgtgggaatctacccttctctacgggatagctccgggaaactggaattaataccgtatacgtcctgagggagaaagatttatcggggaaggatgagcccgcgttggattagctagttggtggggtaaaggcctaccaaggcgacgatccatagctggtctaagaggatgatcagccacattgggactgagacacggcccaaactcctacgggaggcagcagtggggaatattggacaatgggcgcaagcctgatccagccatgccgcgtgagtgatgaaggccctagggttgtaaagctctttcagtggggacgataatgacggtacccacagaagaagccccggctaacttcgtgccagcagccgcggtaatacgaagggggctagcgttgttcggaattactgggcgtaaagcgcacgtaggcggatatttaagtcaggggtgaaatcccggggctcaaccccggaactgcctttgatactgggtatcttgagttcggaagaggtaagtggaattgcgagtgtagaggtgaaattcgtagatattcgcaggaacaccagtggcgaaggcggcttactggtccgatactgacgctgaggtgcgaaagcgtggggagcaaacaggattagataccctggtagtccacgccgtaaacgatggaagctagccgtcgggtgatttatcactcggtggcgcagcaaacgcattaagcttcccgcctggggagtacggtcgcaagattaaaactcaaaggaattgacgggggcccgcacaagcggtggagcatgtggtttaattcgaagcaacgcgcagaaccttaccagctcttgacatgccacgacgatgaccggagacggacatcttccttcgggacgtggacacaggtgctgcatggctgtcgtcagctcgtgtcgtgagatgttgggttaagtcccgcaacgagcgcaaccctcgcccttagttgccagcattgagttgggcactctaaggggactgccggtgataagccgagaggaaggtggggatgacgtcaagtcctcatggcccttacgggctgggctacacacgtgctacaatggcggtgacaatgggcagccaactcgcgagagtgcgctaatcccaaaaagccgtctcagttcggattgcactctgcaactcgggtgcatgaagttggaatcgctagtaatcgtggatcagcatgccacggtgaatacgttcccgggccttgtacacaccgcccgtcacaccatgggagttggttctacccgaaggtggtgcgctaaccgcaaggaggcagccaaccacgg

SEQ ID NO: 193 - DNA, 1319 bp, Auritibacter ignavus
ctggcggcgtgcttaacacatgcaagtcgaacgagtggcgaacgggtgagtatcacgtgagtaacctgcccttgactctgggataagcctgggaaactgggtctaatactggatatggaaaggcggttttggatggactcgcggcctatcagcttgttggtggggtaatggcctaccaaggcttcgacgggtagccggcctgagagggtgaccggccacactgggactgagacacggcccagactcctacgggaggcagcagtgggggatattgcacaatgggcgcaagcctgatgcagcgacgtcgcgtgagggatgacggccttcgggttgtaaacctctttcagcagggaagatgacggtacctgcagaagaagcaccggctaactacgtgccagcagccgcggtaatacgtagggtgcgagcgttatccggaattattgggcgtaaagagctcgtaggcggtttgtcgcgtctgctgtgaaagctcagggcttaactctgagtttgcagtgggtacgggcagactggagtgcagtaggggagattggaattcctggtgtagcggtggaatgcgcagatatcaggaggaacaccgatggcgaaggcaggtctctgggctgactgacgctgaggagcgaaagcatggggagcgaacaggattagataccctggtagtccatgccgtaaacggtgggcgctaggtgtgagtcggttcgtgccgtagctaacgcattaagcgccccgcctggggagtacggccgcaaggctaaaactcaaaggaattgacgggggcccgcacaagcggcggagcatgtggattaattcgatgcaacgcgaagaaccttacctgggcttgacatatacaggtggtgcatggttgtcgtcagctcgtgtcgtgagatgttgggttaagtcccgcaacgagcgcaacccttgtcttatgttgccagcacgtggggactcataggagactgccggggtcaactcggaggaaggtggggatgacgtcaaatcatcatgccccttatgtcttgggcttcacgcatgctacaatggccggcagagggttgcgatactgtgaggttgagctaatcccttctggtctcagttcggatggggtctgcaactcgaccccagaagtcggagtcgctagtaatcgcagatcagcaatgctgcggtgaatacgttcccgggccttgtacacaccgcccgtcgagtcacgaaagttggtaacacccgaagccggtgcctagggagccgtcgaaggtgggactggcgattgggactaagtcgtaacaaggtagccgtaccggaag

SEQ ID NO: 194 - DNA, 1429 bp, Averyella dalhousiensis
ccaggagctacatgcagtcgagcggtagcacaggggagcttgctcctgggtgacgagcggcggacgggtgagtaatgtctgggaaactgcctgatggagggggataactactggaaacggtagctaataccgcataacgtctacggaccaaagtgggggaccttcgggcctcatgccatcagatgtgcccagatgggattagctagtaggtggggtaatggctcacctaggcgacgatccctagctggtctgagaggatgaccagccacactggaactgagacacggtcgagactcctacgggaggcagcagtggggaatattgcacaatgggcgcaagcctgatgcagccatgccgcgtgtgtgaagaaggccttcgggttgtaaagcactttcagcgaggaggaagggttcagtgttaatagcactgttcattgacgttactcgcagaagaagcaccggctaactccgtgccagcagccgcggtaatacggagggtgcaagcgttaatcggaattactgggcgtaaagcgcacgcaggcggtctgtcaagtcggatgtgaaatccccgggctcaacctgggaactgcattcgaaactggcaggctagagtcttgtagaggggggtagaattccaggtgtagcggtgaaatgcgtagagatctggaggaataccggtggcgaaggcggccccctggacaaagactgacgctcaggtgcgaaagcgtggggagcaaacaggattagataccctggtagtccacgccgtaaacgatgtcgacttggaggttgtgcccttgaggcgtggcttccggagctaacgcgttaagtcgaccgcctggggagtacggccgcaaggttaaaactcaaatgaattgacgggggcccgcacaagcggtggagcatgtggtttaattcgatgcaacgcgaagaaccttacctactcttgacatccagagaacttagcagagatgctttggtgccttcgggaactctgagacaggtgctgcatggctgtcgtcagctcgtgttgtgaaatgttgggttaagtcccgcaacgagcgcaacccttatcctttgttgccagcggttcggccgggaactcaaaggagactgccagtgataaactggaggaaggtggggatgacgtcaagtcatcatggcccttacgagtagggctacacacgtgctacaatggcgcatacaaagagaagcgacctcgcgagagcaagcggacctcataaagtgcgtcgtagtccggattggagtctgcaactcgactccatgaagtcggaatcgctagtaatcgtagatcagaatgctacggtgaatacgttcccgggccttgtacacaccgcccgtcacaccatgggagtgggttgcaaaagaagtaggtagcttaaccttcgggagggcgctaccctgtataa

SEQ ID NO: 195 - DNA, 1403 bp, Bacillus aeolius
tggcggcgtgcctaatacatgcaagtcgagcgaacggatggagagcttgctctcctgacgttagcggcggacgggtgagtaacacgtgggcaacctgcctgtaagaccgggataacttcgggaaaccggagctaataccggataattcctttcctcgcatgaggaaaggttgaaaggcggcttcggctgtcacttacagatgggcccgcggcgcattagctagttggtgaggtaacggctcaccaaggcgacgatgcgtagccgacctgagagggtgatcggccacactgggactgagacacggcccagactcctacgggaggcagcagtagggaatcttccgcaatggacgaaagtctgacggagcaacgccgcgtgagcgatgaaggtcttcggatcgtaaagctctgttgttagggaagaacaagtaccgttcgaataggcggtaccttgacggtacctaaccagaaagccacggctaactacgtgccagcagccgcggtaatacgtaggtggcaagcgttgtccggaattattgggcgtaaagcgcgcgcaggcggtctcttaagtctgatgtgaaagcccacggctcaaccgtggagggtcattggaaactgggagacttgagtgcagaagaggagagcggaattccatgtgtagcggtgaaatgcgtagagatatggaggaacaccagtggcgaaggcggctctcttgtctgtaactgacgctgaggcgcgaaagcgttgggagcaaacaggattagataccctggtagtccacgccgtaaacgatgagtgctaagtgttagagggtttccgccctttagtgctgcagctaacgcattaagcactccgcctggggagtacggccgcaaggctgaaactcaaaggaattgacgggggcccgcacaagcggtggagcatgtggtttaattcgaagcaacgcgaagaaccttaccaggtcttgacatcctctgctacctctagatagagggttccccttcgggggacggaatgacaggtggtgcatggttgtcgtcagctcgtgtcgtgagatgttgggttaagtcccgcaacgaacgcaacccttgaccttagttgccagcattcagttgggcactctaaggtgactgccggtgacaaaccggaagaaagtggggatgacgtcaaatcatcatgccccttatgacctgggctacacacgtgctacaatgggtggtacaaagggctgcgatgccgcgaggctgagccaatcccaaaaaaccactctcagttcggattgcaggctgcaactcgcctgcatgaagccggaatcgctagtaatcgcggatcagcatgccgcggtgaatacgttcccgggccttgtacacaccgcccgtcacaccacgagagtttgcaacaccc

SEQ ID NO: 196 - DNA, 1382 bp, Bacillus aerophilus
  modified_base (8)..(12): a, c, t, g, unknown or other
agcggacnnnnnggagcttgctcccggatgttagcggcggacgggtgagtaacacgtgggtaacctgcctgtaagactgggataactccgggaaaccggagctaataccggatagttccttgaaccgcatggttcaaggatgaaagacggtttcggctgtcacttacagatggacccgcggcgcattagctagttggtgaggtaacggctcaccaaggcgacgatgcgtagccgacctgagagggtgatcggccacactgggactgagacacggcccagactcctacgggaggcagcagtagggaatcttccgcaatggacgaaagtctgacggagcaacgccgcgtgagtgatgaaggttttcggatcgtaaagctctgttgttagggaagaacaagtgcaagagtaactgcttgcaccttgacggtacctaaccagaaagccacggctaactacgtgccagcagccgcggtaatacgtaggtggcaagcgttgtccggaattattgggcgtaaagggctcgcaggcggtttcttaagtctgatgtgaaagcccccggctcaaccggggagggtcattggaaactgggaaacttgagtgcagaagaggagagtggaattccacgtgtagcggtgaaatgcgtagagatgtggaggaacaccagtggcgaaggcgactctctggtctgtaactgacgctgagagcgaaagcgtggggagcgaacaggattagataccctggtagtccacgccgtaaacgatgagtgctaagtgttagggggtttccgccccttagtgctgcagctaacgcattaagcactccgcctggggagtacggtcgcaagactgaaactcaaaggaattgacgggggcccgcacaagcggtggagcatgtggtttaattcgaagcaacgcgaagaaccttaccaggtcttgacatcctctgataaccctagagatagggctttcccttcggggaccggggagggtgatgggaaactgggaaacttgctcgtgtcgtgagatgttgggttaagtcccgcaacgagcgcaacccttgatcttagttgccagcattcagttgggcactctaaggtgactgccggtgacaaaccggaggaaggtggggatgacgtcaaatcatcatgccccttatgacctgggctacacacgtgctacaatggacagaacaaagggctgcgagaccgcaaggtttagccaatcccacaaatctgttctcagttcggatcgcagtctgcaactcgactgcgtgaagctggaatcgctagtaatcgcggatcagcatgccgcggtgaatacgttcccgggccttgtacacaccgcccgtcacaccacgagagtttgcaacacccgaagtcggtg

SEQ ID NO: 197 - DNA, 1392 bp, Bacillus aestuarii
gcggaccaatagaagcttgcttctgttggttagcggcggacgggtgagtaacacgtgggcaacctgcctgtaagactgggataacttcgggaaaccggagctaataccggataattcatcccctcgcatgagggggtgctgaaagtcggttcacgctgacacttacagatgggcccgcggcgcattagctagttggtgaggtaatggctcaccaaggcgacgatgcgtagccgacctgagagggtgatcggccacactgggactgagacacggcccagactcctacgggaggcagcagtagggaatcttccacaatggacgaaagtctgatggagcaacgccgcgtgagcgatgaaggccttcgggtcgtaaagctctgttgttagggaagaacaagtaccggagtaactgccggtaccttgacggtacctaaccagaaagccacggctaactacgtgccagcagccgcggtaatacgtaggtggcaagcgttgtccggaattattgggcgtaaagcgcgcgcaggcggtcctttaagttgatgtgaaagcccacggctcaaccgtggagggtcattggaaactgggggacttgagtgcagaagaggaaagcggaattccacgtgtagcggtgaaatgcgtagagatgtggaggaacaccagtggcgaaggcggctttctggtctgtaactgacgctgaggcgcgaaagcgtggggagcaaacaggattagataccctggtagtccacgccgtaaacgatgagtgctaagtgttagagggtttccgccctttagtgctgcagctaacgcattaagcactccgcctggggagtacggccgcaaggctgaaactcaaaggaattgacgggggcccgcacaagcggtggagcatgtggtttaattcgaagcaacgcgaagaaccttaccaggtcttgacatccttacgacctccctagagatagggatttccccttcgggggacggaagtgacaggtggtgcatggttgtcgtcagctcgtgtcgtgagatgttgggttaagtcccgcaacgagcgcaacccttgatcttagttgccagcattcagttgggcactctaaggtgactgccggtgacaaaccggaggaaggtggggatgacgtcaaatcatcatgccccttatgacctgggctacacacgtgttacaatggatggtacaaagggcagcgaaaccgcgaggtcgagccaatcccataaaaccattctcagttcggattgcaggctgcaactcgcctgcatgaagccggaatcgctagtaatcgcggatcagcatgccgcggtgaatacgttcccgggccttgtacacaccgcccgtcacaccacgagagtttgtaacacccgaagtcggtggggtaac

SEQ ID NO: 198 - DNA, 1505 bp, Bacillus alcalophilus
  modified_base (97)..(97): a, c, t, g, unknown or other
  modified_base (203)..(203): a, c, t, g, unknown or other
  modified_base (441)..(441): a, c, t, g, unknown or other
gacgaacgctggcggcgtgcctaatacatgcaagtcgagcggaccaaagggagcttgctcccagaggttagcggcggacgggtgagtaacacgtggncaacctgccctgtagactgggataacatcgagaaatcggtgctaataccggataatcaaaggaatcacatggttcttttgtaaaagatggctccggctatcactangggatgggcccgcggcgcattagctagttggtaaggtaatggcttaccaaggcgacgatgcgtagccgacctgagagggtgatcggccacactgggactgagacacggcccagactcctacgggaggcagcagtagggaatcttccgcaatggacgaaagtctgacggagcaacgccgcgtgagtgatgaaggttttcggatcgtaaagctctgttgttagggaagaacaagtgccgntcgaataggtcggcaccttgacggtacctaaccagaaagccacggctaactacgtgccagcagccgcggtaatacgtaggtggcaagcgttgtccggaattattgggcgtaaagcgcgcgcaggcggtcttttaagtctgatgtgaaatatcggggctcaaccccgaggggtcattggaaactgggagacttgagtacagaagaggagagtggaattccacgtgtagcggtgaaatgcgtagatatgtggaggaacaccagtggcgaaggcgactctctggtctgtaactgacgctgaggcgcgaaagcgtggggagcaaacaggattagataccctggtagtccacgccgtaaacgatgagtgctaggtgttaggggtttcgatgcccttagtgccgaagttaacacattaagcactccgcctggggagtacggccgcaaggctgaaactcaaaggaattgacgggggcccgcacaagcagtggagcatgtggtttaattcgaagcaacgcgaagaaccttaccaggtcttgacatcctttgaccactctagagatagagctttccccttcgggggacaaagtgacaggtggtgcatggttgtcgtcagctcgtgtcgtgagatgttgggttaagtcccgcaacgagcgcaacccttgatcttagttgccagcatttagttgggcactctaaggtgactgccggtgacaaaccggaggaaggtggggatgacgtcaaatcatcatgccccttatgacctgggctacacacgtgctacaatggatggtacaaagggcagcgaaaccgcgaggtcgagccaatcccataaagccattctcagttcggattgtaggctgcaactcgcctacatgaagccggaattgctagtaatcgcggatcagcatgccgcggtgaatacgttcccgggccttgtacacaccgcccgtcacaccacgagagtttgtaacacccgaagtcggtggggtaaccttttggagccagccgcctaaggtgggacagatgattggggtgaagtcgtaacaaggtagccgtatcggaaggtg

SEQ ID NO: 199 - DNA, 1410 bp, Bacillus amyloliquefaciens
  modified_base (965)..(965): a, c, t, g, unknown or other
  modified_base (1393)..(1393): a, c, t, g, unknown or other
  modified_base (1397)..(1398): a, c, t, g, unknown or other
tcgagcggacagatgggagcttgctccctgatgttagcggcggacgggtgagtaacacgtgggtaacctgcctgtaagactgggataactccgggaaaccggggctaataccggatggttgtttgaaccgcatggttcagacataaaaggtggcttcggctaccacttacagatggacccgcggcgcattagctagttggtgaggtaacggctcaccaaggcgacgatgcgtagccgacctgagagggtgatcggccacactgggactgagacacggcccagactcctacgggaggcagcagtagggaatcttccgcaatggacgaaagtctgacggagcaacgccgcgtgagtgatgaaggttttcggatcgtaaagctctgttgttagggaagaacaagtgccgttcaaatagggcggcaccttgacggtacctaaccagaaagccacggctaactacgtgccagcagccgcggtaatacgtaggtggcaagcgttgtccggaattattgggcgtaaagggctcgcaggcggtttcttaagtctgatgtgaaagcccccggctcaaccggggagggtcattggaaactggggaacttgagtgcagaagaggagagtggaattccacgtgtagcggtgaaatgcgtagagatgtggaggaacaccagtggcgaaggcgactctctggtctgtaactgacgctgaggagcgaaagcgtggggagcgaacaggattagataccctggtagtccacgccgtaaacgatgagtgctaagtgttagggggtttccgccccttagtgctgcagctaacgcattaagcactccgcctggggagtacggtcgcaagactgaaactcaaaggaattgacgggggcccgcacaagcggtggagcatgtggtttaattcgaagcaacgcgaagaaacttaccgcggttatacgtcggtggcaagcgttagacagnaatcgtccccttcgggggcagagtgacaggtggtgcatggttgtcgtcagctcgtgtcgtgagatgttgggttaagtcccgcaacgagcgcaacccttgatcttagttgccagcattcagttgggcactctaaggtgactgccggtgacaaaccggaggaaggtggggatgacgtcaaatcatcatgccccttatgacctgggctacacacgtgctacaatgggcagaacaaagggcagcgaaaccgcgaggttaagccaatcccacaaatctgttctcagttcggatcgcagtctgcaactcgactgcgtgaagctggaatcgctagtaatcgcggatcagcatgccgcggtgaatacgttcccgggccttgtacacaccgcccgtcacaccacgagagtttgtaacacccgaagtcggtgaggtancctnnaggagccagccg

SEQ ID NO: 200 - DNA, 1391 bp, Bacillus anthracis
  modified_base (9)..(11): a, c, t, g, unknown or other
  modified_base (1380)..(1380): a, c, t, g, unknown or other
cttgctctnnngaagttagcggcggacgggtgagtaacacgtgggtaacctgcccataagactgggataactccgggaaaccggggctaataccggataatattttgaactgcatggttcgaaattgaaaggcggcttcggctgtcacttatggatggacccgcgtcgcattagctagttggtgaggtaacggctcaccaaggcaacgatgcgtagccgacctgagagggtgatcggccacactgggactgagacacggcccagactcctacgggaggcagcagtagggaatcttccgcaatggacgaaagtctgacggagcaacgccgcgtgagtgatgaaggctttcgggtcgtaaaactctgttgttagggaagaacaagtgctagttgaataagctggcaccttgacggtacctaaccagaaagccacggctaactacgtgccagcagccgcggtaatacgtaggtggcaagcgtatccggaattattgggcgtaaagcgcgcgcaggtggtttcttaagtctgatgtgaaagccccggctcaaccgtggagggtcattggaaactgggagacttgagtgcagaagaggaaagtggaattccatgtgtagcggtgaaatgcgtagagatatggaggaacaccagtggcgaaggcgactttctggtctgtaactgacactgaggcgcgaaagcgtggggagcaaacaggattagataccctggtagtccacgccgtaaacgatgagtgctaagtgttagagggtttccgccctttagtgctgaagttaacgcattaagcactccgcctggggagtacggccgcaaggctgaaactcaaaggaattgacgggggcccgcacaagcggtggagcatgtggtttaattcgaagcaacgcgaagaaccttaccaggtcttgacatcctctgaaaaccctagagatagggcttctccttcgggagcagagtgacaggtggtgcatggttgtcgtcagctcgtgtcgtgagatgttgggttaagtcccgcaacgagcgcaacccttgatcttagttgccatcattaagttgggcactctaaggtgactgccggtgacaaaccggaggaaggtggggatgacgtcaaatcatcatgccccttatgacctgggctacacacgtgctacaatggacggtacaaagagctgcaagaccgcgaggtggagctaatctcataaaaccgttctcagttcggattgtaggctgcaactcgcctacatgaagctggaatcgctagtaatcgcggatcagcatgccgcggtgaatacgttcccgggccttgtacacaccgcccgtcacaccacgagagtttgtaacacccgaagtcggtggggtaacctttanggagccagccg

SEQ ID NO: 201 - DNA, 1411 bp, Bacillus atrophaeus
tcgagcggacagatgggagcttgctccctgatgttagcggcggacgggtgagtaacacgtgggtaacctgcctgtaagactgggataactccgggaaaccggggctaataccggatggttgtttgaaccgcatggttcaaacataaaaggtggcttcggctaccacttacagatggacccgcggcgcattagctagttggtgaggtaacggctcaccaaggcaacgatgcgtagccgacctgagagggtgatcggccacactgggactgagacacggcccagactcctacgggaggcagcagtagggaatcttccgcaatggacgaaagtctgacggagcaacgccgcgtgagtgatgaaggttttcggatcgtaaagctctgttgttagggaagaacaagtaccgttcgaatagggcggtaccttgacggtacctaaccagaaagccacggctaactacgtgccagcagccgcggtaatacgtaggtggcaagcgttgtccggaattattgggcgtaaagggctcgcaggcggtttcttaagtctgatgtgaaagcccccggctcaaccggggagggtcattggaaactggggaacttgagtgcagaagaggagagtggaattccacgtgtagcggtgaaatgcgtagagatgtggaggaacaccagtggcgaaggcgactctctggtctgtaactgacgctgaggagcgaaagcgtggggagcgaacaggattagataccctggtagtccacgccgtaaacgatgagtgctaagtgttagggggtttccgccccttagtgctgcagctaacgcattaagcactccgcctggggagtacggtcgcaagactgaaactcaaaggaattgacgggggcccgcacaagcggtggagcatgtggtttaattcgaagcaacgcgaagaaccttaccaggtcttgacatcctctgacaatcctagagataggacgtccccttcgggggcagagtgacaggtggtgcatggttgtcgtcagctcgtgtcgtgagatgttgggttaagtcccgcaacgagcgcaacccttgatcttagttgccagcattcagttgggcactctaaggtgactgccggtgacaaaccggaggaaggtggggatgacgtcaaatcatcatgccccttatgacctgggctacacacgtgctacaatggacagaacaaagggcagcgaaaccgcgaggttaagccaatcccacaaatctgttctcagttcggatcgcagtctgcaactcgactgcgtgaagctggaatcgctagtaatcgcggatcagcatgccgcggtgaatacgttcccgggccttgtacacaccgcccgtcacaccacgagagtttgtaacacccgaagtcggtgaggtaaccttttaggagccagccg

SEQ ID NO: 202 - DNA, 1442 bp, Bacillus badius
acgaacgctggcggcgtgcctaatacatgcaagtcgagcggacttgacggaagcttgcttccgttcaagttagcggcggacgggtgagtaacacgtgggtaacctgcctgtaagactgggataactccgggaaaccggggctaataccggatattctttttcttcgcatgaagaagaatggaaaggcggcttttaactgtcacttacagatggacccgcggcgcattagctagttggtgaggtaacggctcaccaaggcaacgatgcgtagccgacctgagagggtgatcggccacactgggactgagacacggcccagactcctacgggaggcagcagtagggaatcttccgcaatggacgaaagtctgacggagcaacgccgcgtgagtgaagaaggttttcggatcgtaaagctctgttgtcagggaagaacaagtacggaagtaactgtccgtaccttgacggtacctgaccagaaagccacggctaactacgtgccagcagccgcggtaatacgtaggtggcaagcgttgtccggaattattgggcgtaaagcgcgcgcaggcggcttcttaagtctgatgtgaaagcccacggctcaaccgtggagggtcattggaaactgggaggcttgagtgcagaagaggagagcggaattccacgtgtagcggtgaaatgcgtagagatgtggaggaacaccagtggcgaaggcggctctctggtctgtaactgacgctgaggcgcgaaagcgtggggagcgaacaggattagataccctggtagtccacgccgtaaacgatgagtgctaagtgttggagggtttccgcccttcagtgctgcagctaacgcattaagcactccgcctggggagtacggccgcaaggctgaaactcaaaggaattgacgggggccgcacaagcggtggagcatgtggtttaattcgaagcaacgcgaagaaccttaccaggtcttgacatcccgctgaccggtctggagacaggcctttcttcggggacagcggtgacaggtggtgcatggttgtcgtcagctcgtgtcgtgagatgttgggttaagtcccgcaacgagcgcaacccttgatcttagttgccagcattcagttgggcactctaaggtgactgccggtgacaaaccggaggaaggtggggatgacgtcaaatcatcatgccccttatgacctgggctacacacgtgctacaatggatggtacaaagggctgcaagaccgcaaggtttagccaatcccataaaaccattctcagttcggattgcaggctgcaactcgcctgcatgaagccggaatcgctagtaatcgcggatcagcatgccgcggtgaatacgttcccgggccttgtacacaccgcccgtcacaacacgagagtttgcaacacccgaagtcggtggggtaaccttacgggagcca

SEQ ID NO: 203 - DNA, 1389 bp, Bacillus cereus
tcgagcgaatggattaagagcttgctcttatgaagttagcggcggacgggtgagtaacacgtgggtaacctgcccataagactgggataactccgggaaaccggggctaataccggataacattttgaaccgcatggttcgaaattgaaaggcggcttcggctgtcacttatggatggacccgcgtcgcattagctagttggtgaggtaacggctcaccaaggcaacgatgcgtagccgacctgagagggtgatcggccacactgggactgagacacggcccagactcctacgggaggcagcagtagggaatcttccgcaatggacgaaagtctgacggagcaacgccgcgtgagtgatgaaggctttcgggtcgtaaaactctgttgttagggaagaacaagtgctagttgaataagctggcaccttgacggtacctaaccagaaagccacggctaactacgtgccagcagccgcggtaatacgtaggtggcaagcgttatccggaattattgggcgtaaagcgcgcgcaggtggtttcttaagtctgatgtgaaagcccacggctcaaccgtggagggtcattggaaactgggagacttgagtgcagaagaggaaagtggaattccatgtgtagcggtgaaatgcgtagagatatggaggaacaccagtggcgaaggcgactttctggtctgtaactgacactgaggcgcgaaagcgtggggagcaaacaggattagataccctggtagtccacgccgtaaacgatgagtgctaagtgttagagggtttccgccctttagtgctgaagttaacgcattaagcactccgcctggggagtacggccgcaaggctgaaactcaaaggaattgacgggggcccgcacaagcggtggagcatgtggtttaattcgaagcaacgcgaagaaccttaccaggtcttgacatcctctgaaaaccctagagatagggcttctccttcgggagcagagtgacaggtggtgcatggttgtcgtcagctcgtgtcgtgagatgttgggttaagtcccgcaacgagcgcaacccttgatcttagttgccatcattaagttgggcactctaaggtgactgccggtgacaaaccggaggaaggtggggatgacgtcaaatcatcatgccccttatgacctgggctacacacgtgctacaatggacggtacaaagagctgcaagaccgcgaggtggagctaatctcataaaaccgttctcagttcggattgtaggctgcaactcgcctacatgaagctggaatcgctagtaatcgcggatcagcatgccgcggtgaatacgttcccgggccttgtacacaccgcccgtcacaccacgagagtttgtaacacccgaagtcggtg

SEQ ID NO: 204 - DNA, 1371 bp, Bacillus circulans
aagcttgcttttaaagttagcggcggacgggtgagtaacacgtgggcaacctgcctgtaagactgggataacttcgggaaaccggagctaataccggataatccttttcctctcatgaggaaaagctgaaagacggtttacgctgtcacttacagatgggcccgcggcgcattagctagttggtgaggtaacggctcaccaaggcgacgatgcgtagccgacctgagagggtgatcggccacactgggactgagacacggcccagactcctacgggaggcagcagtagggaatcttccgcaatggacgaaagtctgacggagcaacgccgcgtgagtgatgaaggttttcggatcgtaaaactctgttgttagggaagaacaagtacaagagtaactgcttgtaccttgacggtacctaaccagaaagccacggctaactacgtgccagcagccgcggtaatacgtaggtggcaagcgttgtccggaattattgggcgtaaagcgcgcgcaggcggtcctttaagtctgatgtgaaagcccacggctcaaccgtggagggtcattggaaactgggggacttgagtgcagaagagaagagtggaattccacgtgtagcggtgaaatgcgtagagatgtggaggaacaccagtggcgaaggcgactctttggtctgtaactgacgctgaggcgcgaaagcgtggggagcaaacaggattagataccctggtagtccacgccgtaaacgatgagtgctaagtgttagagggtttccgccctttagtgctgcagcaaacgcattaagcactccgcctggggagtacggccgcaaggctgaaactcaaaggaattgacgggggcccgcacaagcggtggagcatgtggtttaattcgaagcaacgcgaaaaaccttaccaggtcttgacatcctctgacactcctagagataggacgttccccttcgggggacagagtgacaggtggtgcatggttgtcgtcagctcgtgtcgtgagatgttgggttaagtcccgcaacgagcgcaacccttgatcttagttgccagcattcagttgggcactctaaggtgactgccggtgacaaaccggaggaaggtggggatgacgtcaaatcatcatgccccttatgacctgggctacacacgtgctacaatggatggtacaaagggcagcaaaaccgcgaggtcgagcaaatcccataaaaccattctcagttcggattgtaggctgcaactcgcctacatgaagctggaatcgctagtaatcgcggatcagcatgccgcggtgaatacgttcccgggccttgtacacaccgcccgtcacaccacgagagtttgtaacacccgaagtcggtg

SEQ ID NO: 205 - DNA, 1351 bp, Bacillus clausii
  modified_base (230)..(230): a, c, t, g, unknown or other
  modified_base (1341)..(1342): a, c, t, g, unknown or other
ggacgggtgagtaacacgtgggcaacctgccctttagactgggataactccgggaaaccggagctaataccggataatccctttctccacctggagagagggtgaaagatggcttcggctatcactaggggatgggcccgcggcgcattatctagttggtaaggtaacggcttaccaaggcaacgatgcgtacccgacctgagagggtgatcggccacactgggactganacacggcccagactcctacgggaggcagcagtagggaatcttccgcaatggacgaaagtctgacggagcaacgccgcgtgagtgaggaaggccttcgggtcgtaaagctctgttgtgagggaagaagcggtaccgttcgaatagggcggtaccttgacggtacctcaccagaaaccacggctaactacgtgccagcagccgcggtaatacgtaggtggcaagcgttgtccggaattattgggcgtaaagcgcgcgcagcggcttcttaagtctgatgtgaaatctcggggctcaaccccgagcggccattgaaactggggagcttgagtgcaaagagagagtggaattccacgtgtagcggtgaaatgcgtagagatgtggaggaacaccagtggcaggactctctggtctgtaactgacctgagcgcgaaagcgtggagcaaacagattaataccctggtagtccacgccgtaaacgatgagtgctagtgttaggggtttccatgcccgtagtgccaaagttaacacattaagcactccgcctggggagtacggccgcaaggctgaaactcaaaggaattgacggggacccgcacaagcagtggagcatgtggtttaattcgaagcaacgcgaagaaccttaccaggtcttgacatcctttgaccacccaagagattgggcttccccttcgggggcaaagtgacaggtggtgcatggttgtcgtcagctcgtgtcgtgagatgttgggttaagtcccgcaacgagcgcaacccttgatcttagttgccagcattcagttgggcactctaaggtgactgccggtgacaaaccggaggaaggtggggatgacgtcaaatcatcatgccccttatgacctgggctacacacgtgctacaatggatggtacaaagggcagcgaaaccgcgaggtgaagccaatcccataaagccattctcagttcggattgcaggctgcaactcgcctgcatgaagccggaattgctagtaatcgcggatcagcatgccgcggtgaatacgttcccgggtcttgtacacaccgcccgtcacaccacgagagtttgtaacacccgaagtcggtgaggcaaccttnnggagccagc

SEQ ID NO: 206 - DNA, 1411 bp, Bacillus coagulans
  modified_base (10)..(10): a, c, t, g, unknown or other
tcgtgcggancttttaaagcttgcttttaaaaggttagcggcggacgggtgagtaacacgtgggcaacctgcctgtaagatcgggataacgccgggaaaccggggctaataccggatagttttttcctccgcatggaggaaaaaggaaagacggcttctgctgtcacttacagatgggcccgcggcgcattagctagttggtggggtaacggctcaccaaggcaacgatgcgtagccgacctgagagggtgatcggccacattgggactgagacacggcccaaactcctacgggaggcagcagtagggaatcttccgcaatggacgaaagtctgacggagcaacgccgcgtgagtgaagaaggccttcgggtcgtaaaactctgttgccggggaagaacaagtgccgttcgaacagggcggcgccttgacggtacccggccagaaagccacggctaactacgtgccagcagccgcggtaatacgtaggtggcaagcgttgtccggaattattgggcgtaaagcgcgcgcaggcggcttcttaagttgatgtgaaatcttgcggctcaaccgcaagcggtcattggaaactgggaggcttgagtgcagaagaggagagtggaattccacgtgtagcggtgaaatgcgtagagatgtggaggaacaccagtggcgaaggcggctctctggtctgtaactgacgctgaggcgcgaaagcgtggggagcaaacaggattagataccctggtagtcacgccgtaaacgatgagtgctaagtgttagagggtttccgccctttagtgctgcagctaacgcattaagcactccgcctggggagtacggccgcaaggctgaaactcaaaggaattgacgggggcccgcacaagcggtggagcatgtggtttaattcgaagcaacgcgaagaaccttaccaggtcttgacatcctctgacctccctggagacagggccttccccttcgggggacagagtgacaggtggtgcatggttgtcgtcagctcgtgtcgtgagatgttgggttaagtcccgcaacgagcgcaacccttgaccttagttgccagcattcagttgggcactctaaggtgactgccggtgacaaaccggaggaaggtggggatgacgtcaaatcatcatgccccttatgacctgggctacacacgtgctacaatggatggtacaaagggctgcgagaccgcgaggttaagccaatcccagaaaaccattcccagttcggattgcaggctgcaacccgcctgcatgaagccggaatcgctagtaatcgcggatcagcatgccgcggtgaatacgttcccgggccttgtacacaccgcccgtcacaccacgagagtttgtaacacccgaagtcggtgaggtaaccttacggagccagccg

SEQ ID NO: 207 - DNA, 1483 bp, Bacillus firmus
gacgaacgctggcggcgtgcctaatacatgcaagtcgagcggacggatgggagcttgctcacacgtcagcggcggacgggtgagtaacacgtgggcaacctgcctgtaagactgggataactccgggaaaccggggctaataccggataatgcttttcctcgcatgaggaaaagctgaaagatggcatctcgctatcacttacagatgggcccgcggcgcattagctagttggtgaggtaacggctcaccaaggcgacgatgcgtagccgacctgagagggtgatcggccacactgggactgagacacggcccagactcctacgggaggcagcagtagggaatcttccgcaatggacgaaagtctgacggagcaacgccgcgtgagtgatgaaggttttcggatcgtaaaactctgttgtcagggaagaacaagtaccggagtaactgccggtaccttgacggtacctgaccagaaagccacggctaactacgtgccagcagccgcggtaatacgtaggtggcaagcgttgtccggaattattgggcgtaaagcgcgcgcaggcggttccttaagtctgatgtgaaagcccccggctcaaccggggagggtcattggaaactggggaacttgagtgcagaagagaagagtggaattccacgtgtagcggtgaaatgcgtagagatgtggaggaacaccagtggcgaaggcgactctttggtctgtaactgacgctgaggcgcgaaagcgtggggagcaaacaggattagataccctggtagtccacgccgtaaacgatgagtgctaagtgttagagggtttccgccctttagtgctgcagcaaacgcattaagcactccgcctggggagtacggccgcaaggctgaaactcaaaggaattgacgggggcccgcacaagcggtggagcatgtggtttaattcgaagcaacgcgaagaaccttaccaggtcttgacatctcctgacaaccctagagatagggcgttccccttcgggggacaggatgacaggtggtgcatggttgtcgtcagctcgtgtcgtgagatgttgggttaagtcccgcaacgagcgcaacccttgatcttagttgccagcattcagttgggcactctaaggtgactgccggtgacaaaccggaggaaggtggggatgacgtcaaatcatcatgccccttatgacctgggctacacacgtgctacaatggatggtacaaagggctgcaagaccgcgaggttaagcgaatcccataaaaccattctcagttcggattgcaggctgcaactcgcctgcatgaagccggaatcgctagtaatcgcggatcagcatgccgcggtgaatacgttcccgggccttgtacacaccgcccgtcacaccacgagagtttgtaacacccgaagtcggtggggtaaccttttggagccagccgcctaaggtgggacagatgattggggtgaagtcgtaacaa

SEQ ID NO: 208 - DNA, 1529 bp, Bacillus flexus
gatcctggctcaggatgaacgctggcggcgtgcctaatacatgcaagtcgagcgaactgattagaagcttgcttctatgacgttagcggcggacgggtgagtaacacgtgggcaacctgcctgtaagactgggataactccgggaaaccggagctaataccggataacattttctcttgcataagagaaaattgaaagatggtttcggctatcacttacagatgggcccgcggtgcattagctagttggtgaggtaacggctcaccaaggcaacgatgcatagccgacctgagagggtgatcggccacactgggactgagacacggcccagactcctacgggaggcagcagtagggaatcttccgcaatggacgaaagtctgacggagcaacgccgcgtgagtgatgaaggctttcgggtcgtaaaactctgttgttagggaagaacaagtacaagagtaactgcttgtaccttgacggtacctaaccagaaagccacggctaactacgtgccagcagccgcggtaatacgtaggtggcaagcgttatccggaattattgggcgtaaagcgcgcgcaggcggtttcttaagtctgatgtgaaagcccacggctcaaccgtggagggtcattggaaactggggaacttgagtgcagaagagaaaagcggaattccacgtgtagcggtgaaatgcgtagagatgtggaggaacaccagtggcgaaggcggctttttggtctgtaactgacgctgaggcgcgaaagcgtggggagcaaacaggattagataccctggtagtccacgccgtaaacgatgagtgctaagtgttagagggtttccgccctttagtgctgcagctaacgcattaagcactccgcctggggagtacggtcgcaagactgaaactcaaaggaattgacgggggcccgcacaagcggtggagcatgtggtttaattcgaagcaacgcgaagaaccttaccaggtcttgacatcctctgacaactctagagatagagcgttccccttcgggggacagagtgacaggtggtgcatggttgtcgtcagctcgtgtcgtgagatgttgggttaagtcccgcaacgagcgcaacccttgatcttagttgccagcatttagttgggcactctaaggtgactgccggtgacaaaccggaggaaggtggggatgacgtcaaatcatcatgccccttatgacctgggctacacacgtgctacaatggatggtacaaagggctgcaagaccgcgaggtcaagccaatcccataaaaccattctcagttcggattgtaggctgcaactcgcctacatgaagctggaatcgctagtaatcgcggatcagcatgccgcggtgaatacgttcccgggccttgtacacaccgcccgtcacaccacgagagtttgtaacacccgaagtcggtggggtaacctttatggagccagccgcctaaggtgggacagatgattggggtgaagtcgtaacaaggtagccgtatcggaaggtgcggctggat

SEQ ID NO: 209 - DNA, 1462 bp, Bacillus fordii
gtgcctaatacatcgcaagtcgagcggatgaaagagagcttgctctctggattcagcggcggacgggtgagtaacacgtgggcaacctgcctgtaagactgggataactccgggaaaccggggctaataccggataacttcttttcccgcatggggagaggttgaaagacggttatgctgtcacttacagatgggcccgcggcgcattagctagttggtggggtaacggcctaccaaggcgacgatgcgtagccgacctgagagggtgatcggccacactgggactgagacacggcccagactcctacgggaggcagcagtagggaatcttccgcaatggacgaaagtctgacggagcaacgccgcgtgagtgacgaaggccttcgggtcgtaaaactctgttatcagggaagaacaagcatcgtttaactgacggtgccatgacggtacctgaccagaaagccacggctaactacgtgccagcagccgcggtaatacgtaggtggcaagcgttgtccggaattattgggccgtaaagcgcgcgcaggcggcttcttaagtctgatgtgaaagcccacggctcaaccgtggagggtcattggaaactgggaggcagttgtgcagaagaggagagcggaattccacgtgtagcggtgaaatgcgtaaagatgtggaggaacaccagtggcgaaggcggctctctggtctgtaactgacgctgaggcgcgaaagcgtgggtagcgaacaggattagataccctggtagtccacgccgtaaacgatgagtgctaagtgttagggggtttccgccccttagtgctgcagcaaacgcattaagcactccgcctggggagtacggccgcaaggctgaaactcaaaggaattgacgggggcccgcacaagcggtggagcatgtggtttaattcgaagcaacgcgaagaaccttaccaggtcttgacatcccgctgaccggtctggagacagatctttcccttcggggacagcggtgacaggtggtgcatggttgtcgtcagctcgtgtcgtgagatgttgggttaagtcccgcaacgagcgcaacccttgatcttagttgccagcattcagttgggcactctaaggtgactgccggtgacaaaccggaggaaggtggggatgacgtcaaatcatcatgccccttatgacctgggctacacacgtgctacaatggatggtacagagggcagcgagaccgcgaggtggagcgaatcccttaaaaccattctcagttcggattgcaggctgcaactcgcctgcatgaagccggaatcgctagtaatcgcggatcagcatgccgcggtgaatacgttcccgggccttgtacacaccgcccgtcacaccacgagagtttgtaacacccgaagtcggtggggtaaccttttggagccagccgccgaaggtgggacagatgattggggtgaagtcg

SEQ ID NO: 210 - DNA, 1485 bp, Bacillus gelatini
gacgaacgctggcggcgtgcctaatacatgcaagtcgagcggacggaaggagagcttgctctctggaagttagcggcggacgggtgagtaacacgtgggcaacctgcctcatagatggggataacaccgagaaatcggtgctaataccgaataatagagcggagcgcatgctccgcgcttgaaagtcggctttgagctgacactatgagatgggcccgcggcgcattagctagtaggtgaggtaacggctcacctaggcgacgatgcgtagccgacctgagagggtgatcggccacactgggactgagacacggcccagactcctacgggaggcagcagtagggaatcttcggcaatggacgaaagtctgaccgagcaacgccgcgtgagtgatgaaggttttcggatcgtaaaactctgttgtcagggaagaacaagtacgagagtaactgctcgtaccttgacggtacctgaccagaaagccacggctaactacgtgccagcagccgcggtaatacgtaggtggcaagcgttgtccggaattattgggcgtaaagcgcgcgcaggcggttctttaagtctgatgtgaaagcccacggctcaaccgtggagggtcattggaaactggggaacttgagtgcaggagagaaaagtggaattccacgtgtagcggtgaaatgcgtagagatgtggaggaacaccagtggcgaaggcggctttttggcctgtaactgacgctgaggcgcgaaagcgtggggagcaaacaggattagataccctggtagtccacgccgtaaacgatgagtgctaggtgttggggggttccaccctcagtgctgacgttaacacattaagcactccgcctggggagtacgaccgcaaggttgaaactcaaaggaattgacgggggcccgcacaagcagtggagcatgtggtttaattcgaagcaacgcgaagaaccttaccaggtcttgacatcctctgaccacttgagagatcaagctttccccttcgggggacagagtgacaggtggtgcatggttgtcgtcagctcgtgtcgtgagatgttgggttaagtcccgcaacgagcgcaacccttgaccttagttgccagcattcagttgggcactctaaggtgactgccggtgacaaaccggaggaaggtggggatgacgtcaaatcatcatgccccttatgacctgggctacacacgtgctacaatggatggtacaaagggctgcgaaaccgcaaggtggagccaatcccaaaaagccattctcagttcggattgtaggctgcaactcgcctacatgaagccggaattgctagtaatcgcggatcagcatgccgcggtgaatacgttcccgggccttgtacacaccgcccgtcacaccacgagagtttgtaacacccgaagtcggtgaggtaaccttttggagccagccgccgaaggtgggacagatgattggggtgaagtcgtaacaa

SEQ ID NO: 211 - DNA, 1504 bp, Bacillus halmapalus
  modified_base (46)..(46): a, c, t, g, unknown or other
  modified_base (661)..(661): a, c, t, g, unknown or other
gacgaacgctggcggcgtgcctaatacatgcaagtcgagcggactnacacaagcttgcttttgtaagttagcggcggacgggtgagtaacacgtgggcaacctgcccttaagactgggataacttcgggaaaccggagctaataccggataatataaagaacctcctggttctttattgaaagatggtttcggctatcgcttatggatgggcccgcggcgcattagctagttggtgaggtaacggctcaccaagccaacgatgcgtagccgacctgagagggtgatcggccacactgggactgagacacggcccagactcctacgggaggcagcagtagggaatcttccacaatggacgaaagtctgatggagcaacgccgcgtgagtgatgaaggccttcgggtcgtaaagctctgttgttagggaagaacaagtgcgagagtaactgctcgcaccttgacggtacctaaccagaaagccacggctaactacgtgccagcagccgcggtaatacgtaggtggcaagcgttgtccggaattattgggcgtaaagcgcgcgcaggtggtttcttaagtctgatgtgaaagcccacggctcaaccgtggagggtcattggaaactggggaacttgagtgcagaagaggaaagtggaattccangtgtagcggtgaaatgcgtagagatttggaggaacaccagtggcgaaggcgactttctggtctgtaactgacactgaggcgcgaaagcgtggggagcaaacaggattagataccctggtagtccacgccgtaaacgatgagtgctaagtgttagagggtttccgccctttagtgctgcagctaacgcattaagcactccgcctggggagtacggtcgcaagactgaaactcaaaggaattgacgggggcccgcacaagcggtggagcatgtggtttaattcgaagcaacgcgaagaaccttaccaggtcttgacatcctctgccaaccctagagatagggcgttccccttcgggggacagagtgacaggtggtgcatggttgtcgtcagctcgtgtcgtgagatgttgggttaagtcccgcaacgagcgcaacccttgatcttagttgccagcattcagttgggcactctaaggtgactgccggtgacaaaccggaggaaggtggggatgacgtcaaatcatcatgccccttatgacctgggctacacacgtgctacaatggacggtacaaagggcagcaaaaccgcgaggtcgagccaatcccagaaaaccgttctcagttcggattgcaggctgcaactcgcctgcatgaagccggaatcgctagtaatcgcggatcagcatgccgcggtgaatacgttcccgggccttgtacacaccgcccgtcacaccacgagagtttgtaacacccgaagtcggtggggtaaccttttggagccagccgcctaaggtgggacagatgattggggtgaagtcgtaacaaggtagccgtatcggaaggtg

SEQ ID NO: 212 - DNA, 1457 bp, Bacillus halodurans
acgctggcggcgtgcctaatacatgcaagtcgagcggaccaaagggagcttgctcctggaggttagcggcgaacgggtgagtaacacgtgggcaacctgcctgtaagactgggataacatcgagaaatcggtgctaataccggataataaaaagaactgcatggttcttttttgaaagatggtttcggctatcacttacagatgggcccgcggcgcattagctagttggtggggtaacggctcaccaaggcgacgatgcgtagccgacctgagagggtgatcggccacactgggactgagacacggcccagactcctacgggaggcagcagtagggaatcttccgcaatggacgaaagtctgacggagcaacgccgcgtgagtgatgaaggttttcggatcgtaaaactctgttgttagggaagaacaagtgccgttcgaaagggcggcaccttgacggtacctaacgagaaagccacggctaactacgtgccagcagccgcggtaatacgtaggtggcaagcgttgtccggaattattgggcgtaaagcgcgcgcaggcggtctcttaagtctgatgtgaaagcccccggctcaaccggggagggtcattggaaactgggagacttgagtacagaagaggagagtggaattccacgtgtagcggtgaaatgcgtagagatgtggaggaacaccagtggcgaaggcgactctctggtctgtaactgacgctgaggcgcgaaagcgtggggagcaaacaggattagataccctggtagtccacgccgtaaacgatgagtgctaggtgttaggggtttcgacgcccttagtgccgaagttaacacattaagcactccgcctggggagtacgaccgcaaggttgaaactcaaaggaattgacgggggcccgcacaagcagtggagcatgtggtttaattcgaagcaacgcgaagaaccttaccaggtcttgacatcctttgaccaccctagagatagggctttccccttcgggggacaaagtgacaggtggtgcatggttgtcgtcagctcgtgtcgtgagatgttgggttaagtcccgcaacgagcgcaacccttgaccttagttgccagcattcagttgggcactctaaggtgactgccggtgacaaaccggaggaaggtggggatgacgtcaaatcatcatgccccttatgacctgggctacacacgtgctacaatggatggtacaaagggttgcgaagccgcgaggtgaagccaatcccagaaagccattctcagttcggattgcaggctgcaactcgcctgcatgaagccggaattgctagtaatcgcggatcagcatgccgcggtgaatacgttcccgggccttgtacacaccgcccgtcacaccacgagagtttgtaacacccgaagtcggtggggtaaccttttggagccagccgcctaaggtgggacagat

SEQ ID NO: 213 - DNA, 1464 bp, Bacillus herbersteinensis
acgaacgctggcggcgtgcctaatacatgcaagtcgagcggacatttgagagcttgctctcaaatgttagcggcggacgggtgagtaacacgtgggtaacctgcctgtaagattgggataactccgggaaaccggagctaataccggataacattttgaaccgcatggttcgaaattgaaagatggctttcgrctatcacttacagatggacccgcggcgcattagctagttggtgaggtaatggctcaccaaggcgacgatgcgtagccgacctgagagggtgatcggccacactgggactgagacacggcccagactcctacgggaggcagcagtagggaatcttccgcaatggacgaaagtctgacggagcaacgccgcgtgaacgatgaaggccttcgggtcgtaaagttctgttgttagggaagaacaagtaccagagtaactgctggtaccttgacggtacctaaccagaaagccacggctaactacgtgccagcagccgcggtaatacgtaggtggcaagcgttgtccggaattattgggcgtaaagcgcgcgcaggcggttttttaagtctgatgtgaaagcccacggctcaaccgtggagggtcattggaaactggagaacttgagtgcagaagaggagagcggaattccacgtgtagcggtgaaatgcgtagagatgtggaggaacaccagtggcgaaggcggctctctggtctgtaactgacgctgaggcgcgaaagcgtggggagcaaacaggattagataccctggtagtccacgccgtaaacgatgagtgctaagtgttagagggtttccgccctttagtgctgcagcaaacgcattaagcactccgcctggggagtacggtcgcaagactgaaactcaaaggaattgacgggggcccgcacaagcggtggagcatgtggtttaattcgaagcaacgcgaagaaccttaccaggtcttgacatcctctgacaaccctagagatagggcgttccccttcgggggacagagtgacaggtggtgcatggttgtcgtcagctcgtgtcgtgagatgttgggttaagtcccgcaacgagcgcaacccttgatcttagttgccagcatttagttgggcactctaaggtgactgccggtgacaaaccggaggaaggtggggatgacgtcaaatcatcatgccccttatgacctgggctacacacgtgctacaatggatggtacaaagggctgcgaraccgcgaggttaagcgaatcccataaaaccattctcagttcggattgcaggctgcaactcgcctgcatgaagctggaatcgctagtaatcgcggatcagcatgccgcggtgaatacgttcccgggccttgtacacaccgcccgtcacaccacgagagtttgtaacacccgaagtcggtggggtaaccgtaaggagccagccgcctaaggtggacagatgat

SEQ ID NO: 214 - DNA, 1512 bp, Bacillus horti
  modified_base (761)..(763): a, c, t, g, unknown or other
gacgaacgctggcggcgtgcctaatacatgcaagtcgagcgagtgaaactgacggaagccttcgggtggaagacagtggatctagcggcggacgggtgagtaacacgtaggcaacctgcctgtaagatggggataactccgggaaaccggagctaataccgaataatcgttttgctcgcatgagcaaaaggtgaaaggtggcgcaastaccgcttacagatgggcctgcggcgcattagctagttggtgaggtaacggctcaccaaggcgacgatgcgtagccgacctgagagggtgatcggccacactgggactgagacacggcccagactctacgggaggcagcagtagggaatcttcggcaatggacgaaagtctgaccgagcaacgccgcgtgagtgaagaaggttttcggattgtaaaactctgttgttagggaagaacaagtatcggttgaataagccggtaccctgacggtacctaacgagaaagccccggctaactacgtgccagcagccgcggtaatacgtagggggcaagcgttgtccggaattattgggcgtaaagcgcgcgcaggcggtctcttaagtctgatgtgaaagcccacggctcaaccgtggagggtcattggaaactgggagacttgagtgtaggagaggaaagcggaattccacgtgtagcggtgaaatgcgtagagatgtggaggaacaccagtggcgaaggcggctttctggcctataactgacgctgaggcgcgaaannntggggagcaaacaggattagataccctggtagtccacgccgtaaacgatgagtgctaggtgttaggggtttcgatacccttagtgccgacgctaacgcaataagcactccgcctggggagtacggccgcaaggctgaaactcaaaggaattgacggggacccgcacaagcagtggagcatgtggtttaattcgaagcaacgcgaagaaccttaccaggacttgacatccctctgaatcctctagagatagaggcgaccttcgggacagaggtgacaggtggtgcatggttgtcgtcagctcgtgtcgtgagatgttgggttaagtcccgcaacgagcgcaacccttaatcttagttgccagcattcagttgggcactctaaggtgactgccggtgacaaaccggaggaaggtggggatgacgtcaaatcatcatgccccttatgtcctgggctacacacgtgctacaatgggcagtacaaagggtagcgaagcgcgaggtggagccaatcccataaagctgctctcagttcggattgcaggctgcaactcgcctgcatgaagccggaattgctagtaatcgcggatcagcatgccgcggtgaatacgttcccgggtcttgtacacaccgcccgtcacaccacgagagtttgtaacacccgaagtcggtgaggtaaccttttggagccagccgcctaaggtgggatagatgattggggtgaagtcgtaacaaggtagccgtatcggaagg

SEQ ID NO: 215 - DNA, 1437 bp, Bacillus idriensis
cctaatacatgcaagtcgagcggacttgctggagcttgctccagcaggttagcggcggacgggtgagtaacacgtgggcaacctgcctgtaagactgggataactccgggaaaccggagctaataccggatagtatcttgaaccgcatggttcaagttggaaagacggtttcggctgtcacttacagatgggcccgcggcgcattagctagttggtgaggtaatggctcaccaaggcaacgatgcgtagccgacctgagagggtgatcggccacactgggactgagacacggcccagactcctacgggaggcagcagtagggaatcttccgcaatggacgaaagtctgacggagcaacgccgcgtgagtgatgaaggttttcggatcgtaaaactctgttgttagggaagaacaagtgcgagagtaactgctcgcaccttgacggtacctaaccagaaagccacggctaactacgtgccagcagccgcggtaatacgtaggtggcaagcgttgtccggaattattgggcgtaaagcgcgcgcaggcggtttcttaagtctgatgtgaaagcccccggctcaaccggggagggtcattggaaactgggaaacttgagtgcagaagaggagagtggaattccacgtgtagcggtgaaatgcgtagagatgtggaggaacaccagtggcgaaggcgactctctggtctgtaactgacgctgaggcgcgaaagcgtggggagcgaacaggattagataccctggtagtccacgccgtaaacgatgagtgctaagtgttagagggtttccgccctttagtgctgcagctaacgcattaagcactccgcctggggagtacggtcgcaagactgaaactcaaaggaattgacgggggcccgcacaagcggtggagcatgtggtttaattcgaagcaacgcgaagaaccttaccaggtcttgacatcctttgccacttctagagatagaaggttccccttcgggggacaaagtgacaggtggtgcatggttgtcgtcagctcgtgtcgtgagatgttgggttaagtcccgcaacgagcgcaacccttgatcttagttgccagcattcagttgggcactctaaggtgactgccggtgacaaaccggaggaaggtggggatgacgtcaaatcatcatgccccttatgacctgggctacacacgtgctacaatggatggtacaaagggctgcgagaccgcgaggtttagccaatcccataaaaccattctcagttcggattgcaggctgcaactcgcctgcatgaagctggaatcgctagtaatcgcggatcagcatgccgcggtgaatacgttcccgggccttgtacacaccgcccgtcacaccacgagagtttgcaacacccgaagtcggtggggtaaccgcaaggagccagccagccgcctaagt

SEQ ID NO: 216 - DNA, 1535 bp, Bacillus lentus
agagtttgatcctggctcaggacgaacgctggcggcgtgcctaatacatgcaagtcgagcgaatggatgggagcttgctcccagaagttagcggcggacgggtgagtaacacgtgggcaacctacctgtaagactgggataacttcgggaaaccggagctaataccggataacttctttcttctcctggagaaaggttgaaagacggcttcggctgtcacttacagatgggcccgcggcgcattagctagttggtgaggtaacggctcaccaaggcaacgatgcgtagccgacctgagagggtgatcggccacactgggactgagacacggcccagactcctacgggaggcagcagtagggaatcttccgcaatggacgaaagtctgacggagcaacgccgcgtgagtgatgaaggttttcggatcgtaaaactctgttatcagggaagaacaagtatcggagtaactgccggtaccttgacggtacctgaccagaaagccacggctaactacgtgccagcagccgcggtaatacgtaggtggcaagcgttgtccggaattattgggcgtaaagcgcgcgcaggcggtttcttaagtctgatgtgaaagcccacggctcaaccgtggaaggtcattggaaactgggagacttgagtgcagaagagaagagcggaattccacgtgtagcggtgaaatgcgtagagatgtggaggaacaccagtggcgaaggcggctctttggtctgtaactgacgctgaggcgcgaaagcgtggggagcgaacaggattagataccctggtagtccacgccgtaaacgatgagtgctaagtgttagagggtttccgccctttagtgctgcagttaacgcattaagcactccgcctggggagtacggccgcaaggctgaaactcaaaggaattgacgggggcccgcacaagcggtggagcatgtggtttaattcgaagcaacgcgaagaaccttaccaggtcttgacatcctctgaccaccctagagatagggacttccccttcgggggacagagtgacaggtggtgcatggttgtcgtcagctcgtgtcgtgagatgttgggttaagtcccgcaacgagcgcaacccttaaccttagttgccagcattcagttgggcactctaaggtgactgccggtgacaaaccggaggaaggtggggatgacgtcaaatcatcatgccccttatgacctgggctacacacgtgctacaatggatggtacaaagggttgcaagaccgcgaggtttagctaatcccataaaaccattctcagttcggattgcaggctgcaactcgcctgcatgaagccggaatcgctagtaatcgtggatcagcatgccacggtgaatacgttcccgggccttgtacacaccgcccgtcacaccacgagagtttgtaacacccgaagtcggtggggtaacccttacgggagccagccgccgaaggtgggacagatgattggggtgaagtcgtaacaaggtagcgtatcggaaggtgcggtggatca

SEQ ID NO: 217 - DNA, 1548 bp, Bacillus licheniformis
ggagagtttgatcctggctcaggacgaacgctggcggcgtgcctaatacatgcaagtcgagcggaccgacgggagcttgctcccttaggtcagcggcggacgggtgagtaacacgtgggtaacctgcctgtaagactgggataactccgggaaaccggggctaataccggatgcttgattgaaccgcatggttccaatcataaaaggtggcttttagctaccacttacagatggacccgcggcgcattagctagttggtgaggtaacggctcaccaaggcgacgatgcgtagccgacctgagagggtgatcggccacactgggactgagacacggcccagactcctacgggaggcagcagtagggaatcttccgcaatggacgaaagtctgacggagcaacgccgcgtgagtgatgaaggttttcggatcgtaaaactctgttgttagggaagaacaagtaccgttcgaatagggcggcaccttgacggtacctaaccagaaagccacggctaactacgtgccagcagccgcggtaatacgtaggtggcaagcgttgtccggaattattgggcgtaaagcgcgcgcaggcggtttcttaagtctgatgtgaaagcccccggctcaaccggggagggtcattggaaactggggaacttgagtgcagaagaggagagtggaattccacgtgtagcggtgaaatgcgtagagatgtggaggaacaccagtggcgaaggcgactctctggtctgtaactgacgctgaggcgcgaaagcgtggggagcgaacaggattagataccctggtagtccacgccgtaaacgatgagtgctaagtgttagagggtttccgccctttagtgctgcagcaaacgcattaagcactccgcctggggagtacggtcgcaagactgaaactcaaaggaattgacgggggcccgcacaagcggtggagcatgtggtttaattcgaagcaacgcgaagaaccttaccaggtcttgacatcctctgacaaccctagagatagggcttccccttcgggggcagagtgacaggtggtgcatggttgtcgtcagctcgtgtcgtgagatgttgggttaagtcccgcaacgagcgcaacccttgatcttagttgccagcattcagttgggcactctaaggtgactgccggtgacaaaccggaggaaggtggggatgacgtcaaatcatcatgccccttatgacctgggctacacacgtgctacaatgggcagaacaaagggcagcgaagccgcgaggctaagccaatcccacaaatctgttctcagttcggatcgcagtctgcaactcgactgcgtgaagctggaatcgctagtaatcgcggatcagcatgccgcggtgaatacgttcccgggccttgtacacaccgcccgtcacaccacgagagtttgtaacacccgaagtcggtgaggtaaccttttggagccagccgccgaaggtgggacagatgattggggtgaagtcgtaacaaggtagccgtatcggaaggtgcggctggatcacctcctttct

SEQ ID NO: 218 - DNA, 1404 bp, Bacillus megaterium
tcgagcgaactgattagaagcttgcttctatgacgttagcggcggacgggtgagtaacacgtgggcaacctgcctgtaagactgggataacttcgggaaaccgaagctaataccggataggatcttctccttcatgggagatgattgaaagatggtttcggctatcacttacagatgggcccgcggtgcattagctagttggtgaggtaacggctcaccaaggcaacgatgcatagccgacctgagagggtgatcggccacactgggactgagacacggcccagactcctacgggaggcagcagtagggaatcttccgcaatggacgaaagtctgacggagcaacgccgcgtgagtgatgaaggctttcgggtcgtaaaactctgttgttagggaagaacaagtacgagagtaactgctcgtaccttgacggtacctaaccagaaagccacggctaactacgtgccagcagccgcggtaatacgtaggtggcaagcgttatccggaattattgggcgtaaagcgcgcgcaggcggtttcttaagtctgatgtgaaagcccacggctcaaccgtggagggtcattggaaactggggaacttgagtgcagaagagaaaagcggaattccacgtgtagcggtgaaatgcgtagagatgtggaggaacaccagtggcgaaggcggctttttggtctgtaactgacgctgaggcgcgaaagcgtggggagcaaacaggattagataccctggtagtccacgccgtaaacgatgagtgctaagtgttagagggtttccgccctttagtgctgcagctaacgcattaagcactccgcctggggagtacggtcgcaagactgaaactcaaaggaattgacgggggcccgcacaagcggtggagcatgtggtttaattcgaagcaacgcgaagaaccttaccaggtcttgacatcctctgacaactctagagatagagcgttccccttcgggggacagagtgacaggtggtgcatggttgtcgtcagctcgtgtcgtgagatgttgggttaagtcccgcaacgagcgcaacccttgatcttagttgccagcatttagttgggcactctaaggtgactgccggtgacaaaccggaggaaggtggggatgacgtcaaatcatcatgccccttatgacctgggctacacacgtgctacaatggatggtacaaagggctgcaagaccgcgaggtcaagccaatcccataaaaccattctcagttcggattgtaggctgcaactcgcctacatgaagctggaatcgctagtaatcgcggatcagcatgccgcggtgaatacgttcccgggccttgtacacaccgcccgtcacaccacgagagtttgtaacacccgaagtcggtggagtaaccgtaagg

SEQ ID NO: 219 - DNA, 878 bp, Bacillus nealsonii
  modified_base (121)..(121): a, c, t, g, unknown or other
gcggactttaaaagcttgcttttaaagttagcggcggacgggtgagtaacacgtgggcaacctgcctgtaagactgggataacttcgggaaaccggagctaataccggataattctttccnccacatggtggaaagctgaaagacggcatctcgctgtcacttacagatgggcccgcggcgcattagctagttggtgaggtaacggctcaccaaggcaacgatgcgtagccgacctgagagggtgatcggccacactgggactgaaacacggcccaaactcctacgggaggcagcagtagggaatcttccgcaatggacgaaagtctgacggagcaacgccgcgtgagtgatgaaggttttcggatcgtaaagctctgttgttagggaagaacaagtacaagagtaactgcttgtaccttgacggtacctaaccagaaagccacggctaactacgtgccagcagccgcggtaatacgtaggtggcaagcgttgtccggaattattgggcgtaaagcgcgcgcaggcggtcctttaagtctgatgtgaaagcccacggctcaaccgtggagggtcattggaaactgggggacttgagtgcagaagagaagagtggaattccacgtgtagcggtgaaatgcgtagagatgtggaggaacaccagtggcgaaggcgactctttggtctgtaactgacgctgaggcgcgaaagcgtggggagcaaacaggattagataccctggtagtccacgccgtaaacgatgagtgctaagtgttagagggtttccgccctttagtgctgcagcaaacgcattaagcactccgcctggggagtacggccgcaaggctgaaactcaaaggaattgacgggggcccgcaca

SEQ ID NO: 220 - DNA, 950 bp, Bacillus niabensis
  modified_base (37)..(37): a, c, t, g, unknown or other
  modified_base (43)..(43): a, c, t, g, unknown or other
  modified_base (80)..(80): a, c, t, g, unknown or other
  modified_base (85)..(85): a, c, t, g, unknown or other
  modified_base (939)..(939): a, c, t, g, unknown or other
gccagcagccgcggtaatacgtaggtggcaagcgttntccggnaattattgggcgtaaagcgcgcgcaggcggttccttnaagtntgatgtgaaagcccacggctcaaccgtggagggtcattggaaactggggaacttgagtgcagaagaggagagcggaattccacgtgtagcggtgaaatgcgtagagatgtggaggaacaccagtggcgaaggcggctctctggtctgtaactgacgctgaggcgcgaaagcgtggggagcgaacaggattagataccctggtagtccacgccgtaaacgatgagtgctaagtgttagagggtttccgccctttagtgctgcagcaaacgcattaagcactccgcctggggagtacggtcgcaagactgaaactcaaaggaattgacggggacccgcacaagcggtggagcatgtggtttaattcgaagcaacgcgaagaaccttaccaggtcttgacatcctctgctacttctagagatagaaggttcccttcggggacagagtgacaggtggtgcatggttgtcgtcagctcgtgtcgtgagatgttgggttaagtcccgcaacgagcgcaacccttgatcttagttgccagcattcagttgggcactctaaggtgactgccggtgacaaaccggaggaaggtggggatgacgtcaaatcatcatgccccttatgacctgggctacacacgtgctacaatggatggtacaaagggctgcaaaaccgtgaggtcgagccaatcccataaaaccattctcagttcggattgtaggctgcaactcgcctacatgaagccggaatcgctagtaatcgcggatcagcatgccgcggtgaatacgttcccgggtcttgtacacaccgcccgtcacaccacgagagtttgtaacacccgaagtcggtgaggtaacctttnggagccagccg

SEQ ID NO: 221 - DNA, 929 bp, Bacillus niacini
  modified_base (76)..(76): a, c, t, g, unknown or other
gccgcggtaatacgtaggtggcaagcgttgtccggaattattgggcgtaaagcgcgcgcaggcggtcctttaagtntgatgtgaaagctcacggctcaaccgtggagggtcattggaaactgggggacttgagtgcagaagaggaaagcggaattccacgtgtagcggtgaaatgcgtagagatgtggaggaacaccagtggcgaaggcggctttctggtctgtaactgacgctgaggcgcgaaagcgtggggagcaaacaggattagataccctggtagttcacgccgtaaacgatgagtgctaagtgttagagggtttccgccctttagtgctgcagctaacgcattaagcactccgcctggggagtacggccgcaaggctgaaactcaaaggaattgacgggggcccgcacaagcggtggagcatgtggtttaattcgaagcaacgcgaagaaccttaccaggtcttgacatccttacgacctccctagagatagggatttccccttcgggggacggaagtgacaggtggtgcatggttgtcgtcagctcgtgtcgtgagatgttgggttaagtcccgcaacgagcgcaacccttgatcttagttgccagcattcagttgggcactctaaggtgactgccggtgacaaaccggaggaaggtggggatgacgtcaaatcatcatgccccttatgacctgggctacacacgtgttacaatggatggtacaaagggcagcgaaaccgcgaggtcgagccaatcccataaaaccattctcagttcggattgcaggctgcaactcgcctgcatgaagccggaatcgctagtaatcgcggatcagcatgccgcggtgaatacgttcccgggccttgtacacaccgcccgtcacaccacgagagtttgtaacacccgaagtcggtggggtaac

SEQ ID NO: 222 - DNA, 1495 bp, Bacillus pocheonensis
aggacgaacgctggcggcgtgcctaatacatgcaagtcgagcgaatcattaggagcttgctcctattggttagcggcggacgggtgagtaacacgtgggcaacctgcctgtaagactgggataacttcgggaaaccggagctaataccggataatccttttcctctcatgagggaaagttgaaagatggcgtcagctatcacttacagatgggcccgcggcgcattagctagttggtgaggtaacggctcaccaaggcgacgatgcgtagccgacctgagagggtgatcggccacactgggactgagacacggcccagactcctacgggaggcagcagtagggaatcttccgcaatggacgaaagtctgacggagcaacgccgcgtgagcgatgaaggccttcgggtcgtaaagctctgttgttagggaagaacaagtatcggagtaactgccggtaccttgacggtacctaaccagaaagccacggctaactacgtgccagcagccgcggtaatacgtaggtggcaagcgttgtccggaattattgggcgtaaagcgcgcgcaggcggtcctttaagtctgatgtgaaagcccacggctcaaccgtggagggtcattggaaactgggggacttgagtgcagaagaggaaagtggaattccacgtgtagcggtgaaatgcgtagagatgtggaggaacaccagtggcgaaggcgactttctggtctgtaactgacgctgaggcgcgaaagcgtggggagcaaacaggattagataccctggtagtccacgccgtaaacgatgagtgctaagtgttagagggtttccgccctttagtgctgcagctaacgcattaagcactccgcctggggagtacggccgcaaggctgaaactcaaaggaattgacgggggcccgcacaagcggtggagcatgtggtttaattcgaagcaacgcgaagaaccttaccaggtcttgacatcctctgacaatcctagagataggacgttccccttcgggggacagagtgacaggtggtgcatggttgtcgtcagctcgtgtcgtgagatgttgggttaagtcccgcaacgagcgcaacccttgatcttagttgccagcattcagttgggcactctaaggtgactgccggtgacaaaccggaggaaggtggggatgacgtcaaatcatcatgccccttatgacctgggctacacacgtgctacaatggatggtacaaagggctgcaaaaccgcaaggttaagccaatcccataaaaccattctcagttcggattgtaggctgcaactcgcctacatgaagccggaatcgctagtaatcgcggatcagcatgccgcggtgaatacgttcccgggccttgtacacaccgcccgtcacaccacgagagtttgtaacacccgaagtcggtggggtaaccgtaaggagccagccgcctaaggtgggacagatgattggggtgaagtcgtaacaaggtagccgt

SEQ ID NO: 223 - DNA, 1410 bp, Bacillus pumilus
  modified_base (1399)..(1399): a, c, t, g, unknown or other
tcgagcgaacagaagggagcttgctcccggatgttagcggcggacgggtgagtaacacgtgggtaacctgcctgtaagactgggataactccgggaaaccggagctaataccggatagttccttgaaccgcatggttcaaggatgaaagacggtttcggctgtcacttacagatggacccgcggcgcattagctagttggtggggtaatggctcaccaaggcgacgatgcgtagccgacctgagagggtgatcggccacactgggactgagacacggcccagactcctacgggaggcagcagtagggaatcttccgcaatggacgaaagtctgacggagcaacgccgcgtgagtgatgaaggttttcggatcgtaaagctctgttgttagggaagaacaagtgcgagagtaactgctcgcaccttgacggtacctaaccagaaagccacggctaactacgtgccagcagccgcggtaatacgtaggtggcaagcgttgtccggaattattgggcgtaaagggctcgcaggcggtttcttaagtctgatgtgaaagcccccggctcaaccggggagggtcattggaaactgggaaacttgagtgcagaagaggagagtggaattccacgtgtagcggtgaaatgcgtagagatgtggaggaacaccagtggcgaaggcgactctctggtctgtaactgacgctgaggagcgaaagcgtggggagcgaacaggattagataccctggtagtccacgccgtaaacgatgagtgctaagtgttagggggtttccgccccttagtgctgcagctaacgcattaagcactccgcctggggagtacggtcgcaagactgaaactcaaaggaattgacgggggcccgcacaagcggtggagcatgtggtttaattcgaagcaacgcgaagaaccttaccaggtcttgacatcctctgacaaccctagagatagggctttcccttcggggacagagtgacaggtggtgcatggttgtcgtcagctcgtgtcgtgagatgttgggttaagtcccgcaacgagcgcaacccttgatcttagttgccagcatttagttgggcactctaaggtgactgccggtgacaaaccggaggaaggtggggatgacgtcaaatcatcatgccccttatgacctgggctacacacgtgctacaatggacagaacaaagggctgcgagaccgcaaggtttagccaatcccataaatctgttctcagttcggatcgcagtctgcaactcgactgcgtgaagctggaatcgctagtaatcgcggatcagcatgccgcggtgaatacgttcccgggccttgtacacaccgcccgtcacaccacgagagtttgcaacacccgaagtcggtgaggtaacctttanggagccagccg

SEQ ID NO: 224 - DNA, 1411 bp, Bacillus safensis
  modified_base (1400)..(1400): a, c, t, g, unknown or other
gtcgagcggacagaagggagcttgctcccggatgttagcggcggacgggtgagtaacacgtgggtaacctgcctgtaagactgggataactccgggaaaccggagctaataccggatagttccttgaaccgcatggttcaaggatgaaagacggtttcggctgtcacttacagatggacccgcggcgcattagctagttggtggggtaatggctcaccaaggcgacgatgcgtagccgacctgagagggtgatcggccacactgggactgagacacggcccagactcctacgggaggcagcagtagggaatcttccgcaatggacgaaagtctgacggagcaacgccgcgtgagtgatgaaggttttcggatcgtaaagctctgttgttagggaagaacaagtgcgagagtaactgctcgcaccttgacggtacctaaccagaaagccacggctaactacgtgccagcagccgcggtaatacgtaggtggcaagcgttgtccggaattattgggcgtaaagggctcgcaggcggtttcttaagtctgatgtgaaagcccccggctcaaccggggagggtcattggaaactgggaaacttgagtgcagaagaggagagtggaattccacgtgtagcggtgaaatgcgtagagatgtggaggaacaccagtggcgaaggcgactctctggtctgtaactgacgctgaggagcgaaagcgtggggagcgaacaggattagataccctggtagtccacgccgtaaacgatgagtgctaagtgttagggggtttccgccccttagtgctgcagctaacgcattaagcactccgcctggggagtacggtcgcaagactgaaactcaaaggaattgacgggggcccgcacaagcggtggagcatgtggtttaattcgaagcaacgcgaagaaccttaccaggtcttgacgtcctctgacaacctctgagatagggctttcccttcggggacagagtgacaggtggtgcatggttgtcgtcagctcgtgtcgtgagatgttgggttaagtcccgcaacgagcgcaacccttgatcttagttgccagcattcagttgggcactctaaggtgactgccggtgacaaaccggaggaaggtggggatgacgtcaaatcatcatgccccttatgacctgggctacacacgtgctacaatggacagaacaaagggctgcaagaccgcaaggtttagccaatcccataaatctgttctcagttcggatcgcagtctgcaactcgactgcgtgaagctggaatcgctagtaatcgcggatcagcatgccgcggtgaatacgttcccgggccttgtacacaccgcccgtcacaccacgagagtttgcaacacccgaagtcggtgaggtaacctttanggagccagccg

SEQ ID NO: 225 - DNA, 1522 bp, Bacillus simplex
cctggctcaggacgaacgctggcggcgtgcctaatacatgcaagtcgagcgaatcgatgggagcttgctccctgagattagcggcggacgggtgagtaacacgtgggcaacctgcctataagactgggataacttcgggaaaccggagctaataccggatacgttcttttctcgcatgagagaagatggaaagacggtttacgctgtcacttatagatgggcccgcggcgcattagctagttggtgaggtaatggctcaccaaggcgacgatgcgtagccgacctgagagggtgatcggccacactgggactgagacacggcccagactcctacgggaggcagcagtagggaatcttccgcaatggacgaaagtctgacggagcaacgccgcgtgaacgaagaaggccttcgggtcgtaaagttctgttgttagggaagaacaagtaccagagtaactgctggtaccttgacggtacctaaccagaaagccacggctaactacgtgccagcagccgcggtaatacgtaggtggcaagcgttgtccggaattattgggcgtaaagcgcgcgcaggtggttccttaagtctgatgtgaaagcccacggctcaaccgtggagggtcattggaaactggggaacttgagtgcagaagaggaaagtggaattccaagtgtagcggtgaaatgcgtagagatttggaggaacaccagtggcgaaggcgactttctggtctgtaactgacactgaggcgcgaaagcgtggggagcaaacaggattagataccctggtagtccacgccgtaaacgatgagtgctaagtgttagagggtttccgccctttagtgctgcagctaacgcattaagcactccgcctggggagtacggccgcaaggctgaaactcaaaggaattgacgggggccgcacaagcggtggagcatgtggtttaattcgaagcaacgcgaagaaccttaccaggtcttgacatcctctgacaaccctagagatagggctttccccttcgggggacagagtgacaggtggtgcatggttgtcgtcagctcgtgtcgtgagatgttgggttaagtcccgcaacgagcgcaacccttgatcttagttgccagcattcagttgggcactctaaggtgactgccggtgacaaaccggaggaaggtggggatgacgtcaaatcatcatgccccttatgacctgggctacacacgtgctacaatggatggtacaaagggctgcaaacctgcgaaggtaagcgaatcccataaagccattctcagttcggattgtaggctgcaactcgcctacatgaagccggaatcgctagtaatcgcggatcagcatgccgcggtgaatacgttcccgggccttgtacacaccgcccgtcacaccacgagagtttgtaacacccgaagtcggtgaggtaacctttatggaagccagccgcctaaggtgggacagatgattggggtgaagtcgtaacaaggtagccgtatcggaaggtgcggctgg

SEQ ID NO: 226 - DNA, 971 bp, Bacillus sonorensis
tcgagcgaaccgacgggagcttgctcccttaggttagcggcggacgggtgagtaacacgtgggtaacctgcctgtaagactgggataactccgggaaaccggggctaataccggatgcttgattgaaccgcatggttcaattataaaaggtggcttttagctaccacttacagatggacccgcggcgcattagctagttggtgaggtaacggctcaccaaggcgacgatgcgtagccgacctgagagggtgatcggccacactgggactgagacacggcccagactcctacgggaggcagcagtagggaatcttccgcaatggacgaaagtctgacggagcaacgccgcgtgagtgatgaaggttttcggatcgtaaaactctgttgttagggaagaacaagtaccgttcgaacagggcggtgccttgacggtacctaaccagaaagccacggctaactacgtgccagcagccgcggtaatacgtaggtggcaagcgttgtccggaattattgggcgtaaagcgcgcgcaggcggtttcttaagtctgatgtgaaagcccccggctcaaccggggagggtcattggaaactggggaacttgagtgcagaagaggagagtggaattccacgtgtagcggtgaaatgcgtagagatgtggaggaacaccagtggcgaaggcgactctctggtctgtaactgacgctgaggcgcgaaagcgtggggagcgaacaggattagataccctggtagtccacgccgtaaacgatgagtgctaagtgttagagggtttccgccctttagtgctgcagcaaacgcattaagcactccgcctggggagtacggtcgcaagactgaaactcaaaggaattgacgggggcccgcacaagcggtggagcatgtggtttaattcgaagcaacgcgaagaaccttaccaggtcttgacatcctctgacacccctagagatagggct

SEQ ID NO: 227 - DNA, 935 bp, Bacillus sp.
  10403023 MM10403188
  modified_base (843)..(843): a, c, t, g, unknown or other
  modified_base (926)..(926): a, c, t, g, unknown or other
tcgagcggagatttgaaaagcttgcttttcaaatcttagcggcggacgggtgagtaacacgtgggcaacctgcccttgagacggggataactccgggaaaccggagctaataccggataacacatatcttcgcatgaggatatgttagaaggtggcttttagctaccactcaaggatgggcccgcggcgcattagctagttggtgaggtaacggctcaccaaggcgacgatgcgtagccgacctgagagggtgatcggccacactgggactgagacacggcccagactcctacgggaggcagcagtagggaatcttccgcaatggacgaaagtctgacggagcaacgccgcgtgagtgatgaaggttttcggatcgtaaagctctgttgttagggaagaacaagtacctgttgaataagcaggtaccttgacggtacctaaccagaaagccacggctaactacgtgccagcagccgcggtaatacgtaggtggcaagcgttgtccggaattattgggcgtaaagcgcgcgcaggcggttccttaagtctgatgtgaaagcccacggctcaaccgtggagggtcattggaaactggggaacttgagtgcagaagaggagagcggaattccacgtgtagcggtgaaatgcgtagagatgtggaggaacaccagtggcgaaggcggctctctggtctgtaactgacgctgaggcgcgaaagcgtggggagcgaacaggattagataccctggtagtccacgccgtaaacgatgagtgctaagtgttagagggtttccgccctttagtgctgcagcaaacgcattaagcactccgcctggggagtanggtcgcaagactgaaactcaaaggaattgacggggacccgcacaagcggtggagcatgtggtttaattcgaagcaacgcgaanaaccttacc

SEQ ID NO: 228 - DNA, 1485 bp, Bacillus sp.
  2008724126
ggctcaggacgaacgctggcggcgtgcctaatacatgcaagtcgagcgaatcgaygggagcttgctccctgagattagcggcggacgggtgagtaacacgtgggcaacctgcctataagactgggataacttcgggaaaccggagctaataccggatacgttcttytctcgcatgagagaagatggaaagacggtttacgctgtcacttatagatgggcccgcggcgcattagctagttggtgaggtaatggctcaccaaggcgacgatgcgtagccgacctgagagggtgatcggccacactgggactgagacacggcccagactcctacgggaggcagcagtagggaatcttccgcaatggacgaaagtctgacggagcaacgccgcgtgaacgaagaaggccttcgggtcgtaaagttctgttgttagggaagaacaagtaccagagtaactgctggtaccttgacggtacctaaccagaaagccacggctaactacgtgccagcagccgcggtaatacgtaggtggcaagcgttgtccggaattattgggcgtaaagcgcgcgcaggtggttccttaagtctgatgtgaaagcccacggctcaaccgtggagggtcattggaaactggggaacttgagtgcagaagaggaaagtggaattccaagtgtagcggtgaaatgcgtagagatttggaggaacaccagtggcgaaggcgactttctggtctgtaactgacactgaggcgcgaaagcgtggggagcaaacaggattagataccctggtagtccacgccgtaaacgatgagtgctaagtgttagagggtttccgccctttagtgctgcagctaacgcattaagcactccgcctggggagtacggccgcaaggctgaaactcaaaggaattgacgggggcccgcacaagcggtggagcatgtggtttaattcgaagcaacgcgaagaaccttaccaggtcttgacatcctctgacaaccctagagatagggctttccccttcgggggacagagtgacaggtggtgcatggttgtcgtcagctcgtgtcgtgagatgttgggttaagtcccgcaacgagcgcaacccttgatcttagttgccagcattcagttgggcactctaaggtgactgccggtgacaaaccggaggaaggtggggatgacgtcaaatcatcatgccccttatgacctgggctacacacgtgctacaatggatggtacaaagggctgcaaacctgcgaaggtaagcgaatcccataaagccattctcagttcggattgcaggctgcaactcgcctgcatgaagccggaatcgctagtaatcgcggatcagcatgccgcggtgaatacgttcccgggccttgtacacaccgcccgtcacaccacgagagtttgtaacacccgaagtcggtgaggtaaccttcatggagccagccgcctaaggtgggacagatgattggggtgaagtc

SEQ ID NO: 229 - DNA, 1495 bp, Bacillus sp.
  2008724139
gttgatcctggctcaggacgaacgctggcggcgtgcctaatacatgcaagtcgagcgaatcgacgggagcttgctccctgagattagcggcggacgggtgagtaacacgtgggcaacctgcctataagactgggataacttcgggaaaccggagctaataccggatacgttcttttctcgcatgagagaagatggaaagacggtttacgctgtcacttatagatgggcccgcggcgcattagctagttggtgaggtaatggctcaccaaggcgacgatgcgtagccgacctgagagggtgatcggccacactgggactgagacacggcccagactcctacgggaggcagcagtagggaatcttccgcaatggacgaaagtctgacggagcaacgccgcgtgaacgaagaaggccttcgggtcgtaaagttctgttgttagggaagaacaagtaccagagtaactgctggtaccttgacggtacctaaccagaaagccacggctaactacgtgccagcagccgcggtaatacgtaggtggcaagcgttgtccggaattattgggcgtaaagcgcgcgcaggtggttccttaagtctgatgtgaaagcccacggctcaaccgtggagggtcattggaaactggggaacttgagtgcagaagaggaaagtggaattccaagtgtagcggtgaaatgcgtagagatttggaggaacaccagtggcgaaggcgactttctggtctgtaactgacactgaggcgcgaaagcgtggggagcaaacaggattagataccctggtagtccacgccgtaaacgatgagtgctaagtgttagagggtttccgccctttagtgctgcagctaacgcattaagcactccgcctggggagtacggccgcaaggctgaaactcaaaggaattgacgggggcccgcacaagcggtggagcatgtggtttaattcgaagcaacgcgaagaaccttaccaggtcttgacatcctctgacaaccctagagatagggctttccccttcgggggacagagtgacaggtggtgcatggttgtcgtcagctcgtgtcgtgagatgttgggttaagtcccgcaacgagcgcaacccttgatcttagttgccagcattcagttgggcactctaaggtgactgccggtgacaaaccggaggaaggtggggatgacgtcaaatcatcatgccccttatgacctgggctacacacgtgctacaatggatggtacaaagggctgcaaacctgcgaaggtaagcgaatcccataaagccattctcagttcggattgcaggctgcaactcgcctgcatgaagccggaatcgctagtaatcgcggatcagcatgccgcggtgaatacgttcccgggccttgtacacaccgcccgtcacaccacgagagtttgtaacacccgaagtcggtgaggtaaccttyatggagccagccgcctaaggtgggacagatgattggggtgaagtcg

SEQ ID NO: 230 - DNA, 1547 bp, Bacillus sp.
  2_A_57_CT2
ggagagtttgatcctggctcaggacgaacgctggcggcgtgcctaatacatgcaagtcgagcggacagatgggagcttgctccctgaagtcagcggcggacgggtgagtaacacgtgggcaacctgcctgtaagactgggataactccgggaaaccggggctaataccggataattctttccctcacatgagggaaagctgaaagatggtttcggctatcacttacagatgggcccgcggcgcattagctagttggtgaggtaacggctcaccaaggcaacgatgcgtagccgacctgagagggtgatcggccacactgggactgagacacggcccagactcctacgggaggcagcagtagggaatcttccgcaatggacgaaagtctgacggagcaacgccgcgtgagtgatgaaggttttcggatcgtaaaactctgttgttagggaagaacaagtaccggagtaactgccggtaccttgacggtacctaaccagaaagccacggctaactacgtgccagcagccgcggtaatacgtaggtggcaagcgttgtccggaattattgggcgtaaagcgcgcgcaggcggttccttaagtctgatgtgaaagcccccggctcaaccggggagggtcattggaaactggggaacttgagtgcagaagagaagagtggaattccacgtgtagcggtgaaatgcgtagagatgtggaggaacaccagtggcgaaggcgactctttggtctgtaactgacgctgaggcgcgaaagcgtggggagcaaacaggattagataccctggtagtccacgccgtaaacgatgagtgctaagtgttagagggtttccgccctttagtgctgcagcaaacgcattaagcactccgcctggggagtacggccgcaaggctgaaactcaaaggaattgacgggggcccgcacaagcggtggagcatgtggtttaattcgaagcaacgcgaagaaccttaccaggtcttgacatctcctgacaaccctagagatagggcgttccccttcgggggacaggatgacaggtggtgcatggttgtcgtcagctcgtgtcgtgagatgttgggttaagtcccgcaacgagcgcaacccttgatcttagttgccagcattcagttgggcactctaaggtgactgccggtgacaaaccggaggaaggtggggatgacgtcaaatcatcatgccccttatgacctgggctacacacgtgctacaatggatggtacaaagggctgcgagaccgcgaggttaagcgaatcccataaaaccattctcagttcggattgcaggctgcaactcgcctgcatgaagccggaatcgctagtaatcgcggatcagcatgccgcggtgaatacgttcccgggccttgtacacaccgcccgtcacaccacgagagtttgtaacacccgaagtcggtggggtaaccttttggagccagccgcctaaggtgggacagatgattggggtgaagtcgtaacaaggtagccgtatcggaaggtgcggctggatcacctcctttct

SEQ ID NO: 231 - DNA, 1493 bp, Bacillus sp.
  7-16AIA
tggctcaggacgaacgctggcggcgtgcctaatacatgcaagtcgagcggatgacgaggagcttgctcctctgattcagcggcggacgggtgagtaacacgtgggcaacctgcctgtaagactgggataactccgggaaaccggggctaataccggataggtgatgtcttcgcatgaagagatcaggaaagatggcttcggctatcacttacagatgggcccgcggcgcattagctagttggtgaggtaacggctcaccaaggcgacgatgcgtagccgacctgagagggtgatcggccacactgggactgagacacggcccagactcctacgggaggcagcagtagggaatcttccgcaatggacgaaagtctgacggagcaacgccgcgtgagcgaagaaggtcttcggatcgtaaagctctgttgttagggaagaacaagtaccgttcgaatagggcggtaccgtgacggtacctaaccagaaagccacggctaactacgtgccagcagccgcggtaatacgtaggtggcaagcgttgtccggaattattgggcgtaaagcgcgcgcaggcggcttcttaagtctgatgtgaaagcccgcagctcaactgcggagggtcattggaaactgggaagcttgagtgcagaagaggagagtggaattccacgtgtagcggtgaaatgcgtagagatgtggaggaacaccagtggcgaaggcggctctctggtctgtaactgacgctgaggcgcgaaagcgtggggagcaaacaggattagataccctggtagtccacgccgtaaacgatgagtgctaagtgttagagggtttccgccctttagtgctgcagctaacgcattaagcactccgcctggggagtacggccgcaaggctgaaactcaaaggaattgacgggggcccgcacaagcggtggagcatgtggtttaattcgaagcaacgcgaagaaccttaccaggtcttgacatcctctgctacttctagagatagaaggttccccttcgggggacggagtgacaggtggtgcatggttgtcgtcagctcgtgtcgtgagatgttgggttaagtcccgcaacgagcgcaacccttgaccttagttgccagcattcagttgggcactctaaggtgactgccggtgacaaaccggaggaaggtggggatgacgtcaaatcatcatgccccttatgacctgggctacacacgtgctacaatggacggtacaaagggctgcgaaaccgcgaggtggagccaatcccagaaaaccgttctcagttcggattgcaggctgcaactcgcctgcatgaagccggaatcgctagtaatcgcggatcagcatgccgcggtgaatacgttcccgggccttgtacacaccgcccgtcacaccacgagagtttgtaacacccgaagtcggtgaggtaaccgcaaggagccagccgccgaaggtgggacagatgattggggtgaagtcgtaacaa

SEQ ID NO: 232 - DNA, 1503 bp, Bacillus sp.
  9-3AIA
tggcaggacgaacgctggcggcgtgcctaatacatgcaagtcgagcgagtgaaacgatcagaagccttcgggtggacgatcgtggatctagcggcggacgggtgagtaacacgtaggcaacctgcctgtaagacggggataactccgggaaaccggagctaataccggatgaaccttcagctcgcatgagctggagttgaaaggtggcgcaagctaccacttacagatgggcctgcggcgcattagctagttggtgaggtaagggctcaccaaggcgacgatgcgtagccgacctgagagggtgatcggccacactgggactgagacacggcccagactcctacgggaggcagcagtagggaatcttcggcaatggacgcaagtctgaccgagcaacgccgcgtgagtgaggaaggttttcggattgtaaaactctgttgttagggaagaacaagtaccgtttgaataaggcggtaccttgacggtacctaacgagaaagccccggctaactacgtgccagcagccgcggtaatacgtagggggcaagcgttgtccggaattattgggcgtaaagcgcgcgcaggcggtttcttaagtctgatgtgaaagcccacggctcaaccgtggagggtcattggaaactgggaaacttgagtgtaggagaggaaagcggaattccacgtgtagcggtgaaatgcgtagagatgtggaggaacaccagtggcgaaggcggctttctggcctataactgacgctgaggcgcgaaagcgtggggagcaaacaggattagataccctggtagtccacgccgtaaacgatgagtgctaggtgttaggggtttcgatacccttagtgccgacgttaacacaataagcactccgcctggggagtacggccgcaaggctgaaactcaaaggaattgacggggacccgcacaagcagtggagcatgtggtttaattcgaagcaacgcgaagaaccttaccaggacttgacatccctctgaatcctctagagatagaggcggccttcgggacagaggtgacaggtggtgcatggttgtcgtcagctcgtgtcgtgagatgttgggttaagtcccgcaacgagcgcaacccttaatcttagttgccagcattcagttgggcactctaaggtgactgccggtgacaaaccggaggaaggtggggatgacgtcaaatcatcatgccccttatgtcctgggctacacacgtgctacaatgggcagtacaacgggtagcgaagccgtgaggtggagccaatcccataaagctgctctcagttcggattgcaggctgcaactcgcctgcatgaagccggaattgctagtaatcgcggatcagcatgccgcggtgaatacgttcccgggtcttgtacacaccgcccgtcacaccacgagagcttgtaacacccgaagtcggtgaggtaaccttttggagccagccgccgaaggtgggataggtgattggggtgaagtcgtaacaa

SEQ ID NO: 233 - DNA, 1514 bp, Bacillus sp.
  AP8
tagagtttgatcctggctcaggacgaacgctggcggcgtgcctaatacatgcaagtcgagcgaacggaggagagcttgctctccgaagttagcggcggacgggtgagtaacacgtgggcaacctgcctataagactgggataactccgggaaaccggggctaataccggatagttcttttctccwcatggagaaaaggggaaagatggtttcggctatcacttatagatgggcccgcggcgcattagctagttggtagggtaacggcctaccaaggcgacgatgcgtagccgacctgagagggtgatcggccacactgggactgagacacggcccagactcctacgggaggcagcagtagggaatcttccgcaatggacgaaagtctgacggagcaacgccgcgtgaacgatgaaggtcttcggatcgtaaagttctgttgttagggaagaacaagtacgagagtaactgctcgtaccttgacggtacctaaccagaaagccacggctaactacgtgccagcagccgcggtaatacgtaggtggcaagcgttgtccggaattattgggcgtaaagcgcgcgcaggtggttccttaagtctgatgtgaaagcccacggctcaaccgtggaaggtcattggaaactggggaacttgagtgcagaagaggaaagtggaattccaagtgtagcggtgaaatgcgtagatatttggaggaacaccagtggcgaaggcgactttctggtctgtaactgacactgaggcgcgaaagcgtggggagcaaacaggattagataccctggtagtccacgccgtaaacgatgagtgctaagtgttagagggtttccgccctttagtgctgcagctaacgcattaagcactccgcctggggagtacggtcgcaagactgaaactcaaaggaattgacgggggcccgcacaagcggtggagcatgtggtttaattcgaagcaacgcgaagaaccttaccaggtcttgacatcctctgccactcctagagataggacgttccccttcgggggacagagtgacaggtggtgcatggttgtcgtcagctcgtgtcgtgagatgttgggttaagtcccgcaacgagcgcaacccttgatcttagttgccagcattcagttgggcactctaaggtgactgccggtgacaaaccggaggaaggtggggatgacgtcaaatcatcatgccccttatgacctgggctacacacgtgctacaatggatggtacaaagggcagcgaaaccgcgaggtttagccaatcccataaagccattctcagttcggattgtaggctgcaactcgcctacatgaagccggaatcgctagtaatcgcggatcagcatgccgcggtgaatacgttcccgggccttgtacacaccgcccgtcacaccacgagagtttgtaacacccgaagtcggtggggtaaccgcaaggagccagccgcctaaggtgggacagatgattggggtgaagtcgtaacaaggtagccgt

SEQ ID NO: 234 - DNA, 1402 bp, Bacillus sp.
  B27(2008)
  modified_base (1389)..(1389): a, c, t, g, unknown or other
agcggacagatgggagcttgctccctgatgttagcggcggacgggtgagtaacacgtgggtaacctgcctgtaagactgggataactccgggaaaccggggctaataccggatggttgtttgaaccgcatggttcaaacataaaaggtggcttcggctaccacttacagatggacccgcggcgcattagctagttggtgaggtaatggctcaccaaggcaacgatgcgtagccgacctgagagggtgatcggccacactgggactgagacacggcccagactcctacgggaggcagcagtagggaatcttccgcaatggacgaaagtctgacggagcaacgccgcgtgagtgatgaaggttttcggatcgtaaagctctgttgttagggaagaacaagtaccgttcgaatagggcggtaccttgacggtacctaaccagaaagccacggctaactacgtgccagcagccgcggtaatacgtaggtggcaagcgttgtccggaattattgggcgtaaagggctcgcaggcggtttcttaagttgatgtgaaagcccccggctcaaccggggagggtcattggaaactggggaacttgagtgcagaagaggagagtggaattccacgtgtagcggtgaaatgcgtagagatgtggaggaacaccagtggcgaaggcgactctctggtctgtaactgacgctgaggagcgaaagcgtggggagcgaacaggattagataccctggtagtccacgccgtaaacgatgagtgctaagtgttagggggtttccgccccttagtgctgcagctaacgcattaagcactccgcctggggagtacggtcgcaagactgaaactcaaaggaattgacgggggcccgcacaagcggtggagcatgtggtttaattcgaagcaacgcgaagaaccttaccaggtcttgacatcctctgacaatcctagagataggacgtccccttcgggggcagagtgacaggtggtgcatggttgtcgtcagctcgtgtcgtgagatgttgggttaagtcccgcaacgagcgcaacccttgatcttagttgccagcattcagttgggcactctaaggtgactgccggtgacaaaccggaggaaggtggggatgacgtcaaatcatcatgccccttatgacctgggctacacacgtgctacaatggacagaacaaagggcagcgaaaccgcgaggttaagccaatcccacaaatctgttctcagttcggatcgcagtctgcaactcgactgcgtgaagctggaatcgctagtaatcgcggatcagcatgccgcggtgaatacgttcccgggccttgtacacaccgcccgtcacaccacgagagtttgtaacacccgaagtcggtgaggtanccttttaggagcc

SEQ ID NO: 235 - DNA, 1411 bp, Bacillus sp.
  BT1B_CT2
  modified_base (1400)..(1400): a, c, t, g, unknown or other
gtcgagcggaccgacgggagcttgctcccttaggtcagcggcggacgggtgagtaacacgtgggtaacctgcctgtaagactgggataactccgggaaaccggggctaataccggatgcttgtttgaaccgcatggttcaaacataaaaggtggcttttcgctaccacttacagatggacccgcggcgcattagctagttggtggggtaacggctcaccaaggcgacgatgcgtagccgacctgagagggtgatcggccacactgggactgagacacggcccagactcctacgggaggcagcagtagggaatcttccgcaatggacgaaagtctgacggagcaacgccgcgtgagtgatgaaggttttcggatcgtaaaactctgttgttagggaagaacaagtaccgttcgaacagggcggtaccttgacggtacctaaccagaaagccacggctaactacgtgccagcagccgcggtaatacgtaggtggcaagcgttgtccggaattattgggcgtaaagcgcgcgcaggcggtttttaagtctgatgtgaaagcccccggctcaaccggggagggtcattggaaactggggaacttgagtgcagaagaggagagtggaattccacgtgtagcggtgaaatgcgtagagatgtggaggaacaccagtggcgaaggcgactctctggtctgtaactgacgctgaggcgcgaaagcgtggggagcgaacaggattagataccctggtagtccacgccgtaaacgatgagtgctaagtgttagagggtttccgccctttagtgctgcagcaaacgcattaagcactccgcctggggagtacggtcgcaagactgaaactcaaaggaattgacgggggcccgcacaagcggtggagcatgtggtttaattcgaagcaacgcgaagaaccttaccaggtcttgacatcctctgacaaccctagagatagggcttccccttcgggggcagagtgacaggtggtgcatggttgtcgtcagctcgtgtcgtgagatgttgggttaagtcccgcaacgagcgcaacccttgatcttagttgccagcattcagttgggcactctaaggtgactgccggtgacaaaccggaggaaggtggggatgacgtcaaatcatcatgccccttatgacctgggctacacacgtgctacaatgggcagaacaaagggcagcgaagccgcgaggctaagccaatcccacaaatctgttctcagttcggatcgcagtctgcaactcgactgcgtgaagctggaatcgctagtaatcgcggatcagcatgccgcggtgaatacgttcccgggccttgtacacaccgcccgtcacaccacgagagtttgtaacacccgaagtcggtgaggtaacctttnggagccagccg

SEQ ID NO: 236 - DNA, 1429 bp, Bacillus sp.
  GB1.1
ggggaggagagggactgctcctgagtcagcggcggacgggtgagtaacacgtgggcaacctgcctgtaagactgggataacttcgggaaaccggagctaataccggataatgcacagcctctcatgaggctatgctgaaagatggtttcggctatcacttacagatgggcccgcggcgcattagctagttggtgaggtaacggctcaccaaggcaacgatgcgtagccgacctgagagggtgatcggccacactgggactgagacacggcccagactcctacgggaggcagcagtagggaatcttccgcaatggacgaaagtctgacggagcaacgccgcgtgagtgatgaaggttttcggatcgtaaaactctgttgtcagggaagaacaagtgccggagtaactgccggcaccttgacggtacctgaccagaaagccacggctaactacgtgccagcagccgcggtaatacgtaggtggcaagcgttgtccggaattattgggcgtaaagcgcgcgcaggcggtctcttaagtctgatgtgaaagcccacggctcaaccgtggagggtcattggaaactgggggacttgagtgcagaagaggaaagtggaattccacgtgtagcggtgaaatgcgtagagatgtggaggaacaccagtggcgaaggcgactttctggtctgtaactgacgctgaggcgcgaaagcgtggggagcaaacaggattagataccctggtagtccacgccgtaaacgatgagtgctaagtgttagagggtttccgccctttagtgctgcagcaaacgcattaagcactccgcctggggagtacggccgcaaggctgaaactcaaaggaattgacgggggcccgcacaagcggtggagcatgtggtttaattcgaagcaacgcgaagaaccttaccaggtcttgacatctcctgacaaccctagagatagggcgttccccttcgggggacaggatgacaggtggtgcatggttgtcgtcagctcgtgtcgtgagatgttgggttaagtcccgcaacgagcgcaacccttgatcttagttgccagcattaggttgggcactctaaggtgactgccggtgacaaaccggaggaaggtggggatgacgtcaaatcatcatgccccttatgacctgggctacacacgtgctacaatggatggtacaaagggctgcaagaccgcgaggttaagcgaatcccataaaaccattctcagttcggattgcaggctgcaactcgcctgcatgaagctggaatcgctagtaatcgcggatcagcatgccgcggtgaatacgttcccgggccttgtacacaccgcccgtcacaccacgagagtttgtaacacccgaagtcggtggggtaacctttggagccagccgcctaaggtggacagagatgggatcctt

SEQ ID NO: 237 - DNA, 1218 bp, Bacillus sp.
  GB9
  modified_base (1162)..(1162): a, c, t, g, unknown or other
ggggggagagaagggactgctcctgagtcagcggcggacgggtgagtaacacgtgggcaacctgcctgtaagactgggataactccgggaaaccggggctaataccggataattctttccctcacatgagggaaagctgaaagatggtttcggctatcacttacagatgggcccgcggcgcattagctagttggtgaggtaacggctcaccaaggcaacgatgcgtagccgacctgagagggtgatcggccacactgggactgagacacggcccagactcctacgggaggcagcagtagggaatcttccgcaatggacgaaagtctgacggagcaacgccgcgtgagtgatgaaggttttcggatcgtaaaactctgttgttagggaagaacaagtaccggagtaactgccggtaccttgacggtacctaaccagaaagccacggctaactacgtgccagcagccgcggtaatacgtaggtggcaagcgttgtccggaattattgggcgtaaagcgcgcgcaggcggttccttaagtctgatgtgaaagcccccggctcaaccggggagggtcattggaaactggggaacttgagtgcagaagagaagagtggaattccacgtgtagcggtgaaatgcgtagagatgtggaggaacaccagtggcgaaggcgactctttggtctgtaactgacgctgaggcgcgaaagcgtggggagcaaacaggattagataccctggtagtccacgccgtaaacgatgagtgctaagtgttagagggtttccgccctttagtgctgcagcaaacgcattaagcactccgcctggggagtacggccgcaaggctgaaactcaaaggaattgacgggggcccgcacaagcggtggagcatgtggtttaattcgaagcaacgcgaagaaccttaccaggtcttgacatctcctgacaaccctagagatagggcgttccccttcgggggacaggatgacaggtggtgcatggttgtcgtcagctcgtgtcgtgagatgttgggttaagtcccgcaacgagcgcaacccttgatcttagttgccagcattcagttgggcactctaaggtgactgccggtgacaaaccggaggaaggtggggatgacgtcaaatcatcatgccccttatgacctgngctacacacgtgctacaatggatggtacaaagggctgcgagaccgcgaggtaagcg

SEQ ID NO: 238 - DNA, 1413 bp, Bacillus sp.
  HU19.1
agctcttcggagatcagcggcggacgggtgagtaacacgtgggcaacctgcctgtaagactgggataactccgggaaaccggagctaataccggatactatgtcaaaccgcatggtttgacattcaaagacggtttcggctgtcacttacagatgggcccgcggcgcattagctagttggtgaggtaatggctcaccaaggcgacgatgcgtagccgacctgagagggtgatcggccacactgggactgagacacggcccagactcctacgggaggcagcagtagggaatcttccgcaatggacgaaagtctgacggagcaacgccgcgtgagtgatgaaggttttcggatcgtaaaactctgttgtcagggaagaacaagtgccggagtaactgccggcgccttgacggtacctgaccagaaagccacggctaactacgtgccagcagccgcggtaatacgtaggtggcaagcgttgtccggaattattgggcgtaaagcgcgcgcaggcggtttcttaagtctgatgtgaaagcccccggctcaaccggggagggtcattggaaactgggaaacttgagtgcagaagaggagagtggaattccacgtgtagcggtgaaatgcgtagagatgtggaggaacaccagtggcgaaggcgactctctggtctgtaactgacgctgaggcgcgaaagcgtggggagcgaacaggattagataccctggtagtccacgccgtaaacgatgagtgctaagtgttagagggtttccgccctttagtgctgcagctaacgcattaagcactccgcctggggagtacggtcgcaagactgaaactcaaaggaattgacgggggcccgcacaagcggtggagcatgtggtttaattcgaagcaacgcgaagaaccttaccaggtcttgacatcctttgccacttctagagatagaaggttccccttcgggggacaaagtgacaggtggtgcatggttgtcgtcagctcgtgtcgtgagatgttgggttaagtcccgcaacgagcgcaacccttgatcttagttgccagcattcagttgggcactctaaggtgactgccggtgacaaaccggaggaaggtggggatgacgtcaaatcatcatgccccttatgacctgggctacacacgtgctacaatggatggtacaaagggctgcgagaccgcgaggtttagccaatcccataaaaccattctcagttcggattgcaggctgcaactcgcctgcatgaagctggaatcgctagtaatcgcggatcagcatgccgcggtgaatacgttcccgggccttgtacacaccgcccgtcacaccacgagagtttgcaacacccgaagtcggtggggtaaccgcaaggagccagccgcctaaggtggggtagattgatc

SEQ ID NO: 239 - DNA, 1428 bp, Bacillus sp.
  HU29
acggaagggagcttgctcatacgtcagcggcggacgggtgagtaacacgtgggcaacctgcctgtaagactgggataactccgggaaaccggggctaataccggataatgcttttcctcacatgagggaaagctgaaagatggcttctcgctatcacttacagatgggcccgcggcgcattagctagttggtgaggtaacggctcaccaaggcaacgatgcgtagccgacctgagagggtgatcggccacactgggactgagacacggcccagactcctacgggaggcagcagtagggaatcttccgcaatggacgaaagtctgacggagcaacgccgcgtgagtgatgaaggttttcggatcgtaaaactctgttgttagggaagaacaagtaccggagtaactgccggtaccttgacggtacctaaccagaaagccacggctaactacgtgccagcagccgcggtaatacgtaggtggcaagcgttgtccggaattattgggcgtaaagcgcgcgcaggcggttccttaagtctgatgtgaaagcccccggctcaaccggggagggtcattggaaactggggaacttgagtgcagaagagaagagtggaattccacgtgtagcggtgaaatgcgtagagatgtggaggaacaccagtggcgaaggcgactctttggtctgtaactgacgctgaggcgcgaaagcgtggggagcaaacaggattagataccctggtagtccacgccgtaaacgatgagtgctaagtgttagagggtttccgccctttagtgctgcagcaaacgcattaagcactccgcctggggagtacggccgcaaggctgaaactcaaaggaattgacgggggcccgcacaagcggtggagcatgtggtttaattcgaagcaacgcgaagaaccttaccaggtcttgacatctcctgacaaccctagagatagggcgttccccttcgggggacaggatgacaggtggtgcatggttgtcgtcagctcgtgtcgtgagatgttgggttaagtcccgcaacgagcgcaacccttgatcttagttgccagcattcagttgggcactctaaggtgactgccggtgacaaaccggaggaaggtggggatgacgtcaaatcatcatgccccttatgacctgggctacacacgtgctacaatggatggtacaaagggctgcaagaccgcgaggttaagcgaatcccataaaaccattctcagttcggattgcaggctgcaactcgcctgcatgaagccggaatcgctagtaatcgcggatcagcatgccgcggtgaatacgttcccgggccttgtacacaccgcccgtcacaccacgagagtttgtaacacccgaagtcggtggggtaaccttttggagccagccgcctaaggtgggacagatgattgggat

SEQ ID NO: 240 - DNA, 1418 bp, Bacillus sp.
  HU33.1
gatcgctttggagtcagcggcggacgggtgagtaacacgtgggcaacctgcctgtaagactgggataactccgggaaaccggagctaataccggatactatgtcaaaccgcatggtttgacattcaaagacggtttcggctgtcacttacagatgggcccgcggcgcattagctagttggtgaggtaatggctcaccaaggcgacgatgcgtagccgacctgagagggtgatcggccacactgggactgagacacggcccagactcctacgggaggcagcagtagggaatcttccgcaatggacgaaagtctgacggagcaacgccgcgtgagtgatgaaggttttcggatcgtaaaactctgttgtcagggaagaacaagtgccggagtaactgccggcgccttgacggtacctgaccagaaagccacggctaactacgtgccagcagccgcggtaatacgtaggtggcaagcgttgtccggaattattgggcgtaaagcgcgcgcaggcggtttcttaagtctgatgtgaaagcccccggctcaaccggggagggtcattggaaactgggaaacttgagtgcagaagaggagagtggaattccacgtgtagcggtgaaatgcgtagagatgtggaggaacaccagtggcgaaggcgactctctggtctgtaactgacgctgaggcgcgaaagcgtggggagcgaacaggattagataccctggtagtccacgccgtaaacgatgagtgctaagtgttagagggtttccgccctttagtgctgcagctaacgcattaagcactccgcctggggagtacggtcgcaagactgaaactcaaaggaattgacgggggcccgcacaagcggtggagcatgtggtttaattcgaagcaacgcgaagaaccttaccaggtcttgacatcctttgccacttctagagatagaaggttccccttcgggggacaaagtgacaggtggtgcatggttgtcgtcagctcgtgtcgtgagatgttgggttaagtcccgcaacgagcgcaacccttgatcttagttgccagcattcagttgggcactctaaggtgactgccggtgacaaaccggaggaaggtggggatgacgtcaaatcatcatgccccttatgacctgggctacacacgtgctacaatggatggtacaaagggctgcgagaccgcgaggtttagccaatcccataaaaccattctcagttcggattgcaggctgcaactcgcctgcatgaagctggaatcgctagtaatcgcggatcagcatgccgcggtgaatacgttcccgggccttgtacacaccgcccgtcacaccacgagagtttgcaacacccgaagtcggtggggtaaccgcaaggagccagccgcctaaggtggggtagatgattgggatg

SEQ ID NO: 241 - DNA, 1475 bp, Bacillus sp.
  JC6
tagagttttgatcctggctcaggacgaacgctggcggcgtgcctaatacatgcaagtcgagcggatctgagggagcttgctcccaaagattagcggcggacgggtgagtaacacgtgggcaacctgcctataagactgggataacttcgggaaaccggagctaataccggataatgcttttggacacatgtccggaagctgaaagatggcttctcgctatcacttatagatgggcccgcggcgcattagctagttggtgaggtaacggctcaccaaggcaacgatgcgtagccgacctgagagggtgatcggccacactgggactgagacacggcccagactcctacgggaggcagcagtagggaatcttccgcaatggacgaaagtctgacggagcaacgccgcgtgagtgatgaaggttttcggatcgtaaaactctgttgttagggaagaacaagtaccggagtaactgccggtaccttgacggtacctaaccagaaagccacggctaactacgtgccagcagccgcggtaatacgtaggtggcaagcgttgtccggaattattgggcgtaaagcgcgcgcaggcggttctttaagtctgatgtgaaagcccccggctcaaccggggagggtcattggaaactggggaacttgagtgcagaagagaagagcggaattccacgtgtagcggtgaaatgcgtagagatgtggaggaacaccagtggcgaaggcggctctttggtctgtaactgacgctgaggcgcgaaagcgtggggagcaaacaggattagataccctggtagtccacgccgtaaacgatgagtgctaagtgttagagggtttccgccctttagtgctgcagcaaacgcattaagcactccgcctggggagtacggccgcaaggctgaaactcaaaggaattgacgggggcccgcacaagcggtggagcatgtggtttaattcgaagcaacgcgaagaaccttaccaggtcttgacatccttatgccatccctagagatagggctttcccttcggggacataagtgacaggtggtgcatggttgtcgtcagctcgtgtcgtgagatgttgggttaagtcccgcaacgagcgcaacccttgatcttagttgccagcattgagttgggcactctaaggtgactgccggtgacaaaccggaggaaggtggggatgacgtcaaatcatcatgccccttatgacctgggctacacacgtgctacaatggatggtacaaagggcagcgaagccgcgaggtgaagcgaatcccataaaaccattctcagttcggattgtaggctgcaactcgcctacatgaagccggaatcgctagtaatcgcggatcagcatgccgcggtgaatacgttcccgggccttgtacacaccgcccgtcacaccacgagagtttgtaacacccgaagtcggtggggtaaccgtaaggagccagccgcctaagg

SEQ ID NO: 242 - DNA, 1525 bp, Bacillus sp.
  SRC_DSF10
agagtttgatcctggctcaggatgaacgctggcggcgtgcctaatacatgcaagtcgagcgaactgattagaagcttgcttctatgacgttagcggcggacgggtgagtaacacgtgggcaacctgcctgtaagactgggataactccgggaaaccggagctaataccggataacattttctcttgcataagagaaaattgaaagatggtttcggctatcacttacagatgggcccgcggtgcattagctagttggtgaggtaacggctcaccaaggcaacgatgcatagccgacctgagagggtgatcggccacactgggactgagacacggcccagactcctacgggaggcagcagtagggaatcttccgcaatggacgaaagtctgacggagcaacgccgcgtgagtgatgaaggctttcgggtcgtaaaactctgttgttagggaagaacaagtacaagagtaactgcttgtaccttgacggtacctaaccagaaagccacggctaactacgtgccagcagccgcggtaatacgtaggtggcaagcgttatccggaattattgggcgtaaagcgcgcgcaggcggtttcttaagtctgatgtgaaagcccacggctcaaccgtggagggtcattggaaactggggaacttgagtgcagaagagaaaagcggaattccacgtgtagcggtgaaatgcgtagagatgtggaggaacaccagtggcgaaggcggctttttggtctgtaactgacgctgaggcgcgaaagcgtggggagcaaacaggattagataccctggtagtccacgccgtaaacgatgagtgctaagtgttagagggtttccgccctttagtgctgcagctaacgcattaagcactccgcctggggagtacggtcgcaagactgaaactcaaaggaattgacgggggcccgcacaagcggtggagcatgtggtttaattcgaagcaacgcgaagaaccttaccaggtcttgacatcctctgacaactctagagatagagcgttccccttcgggggacagagtgacaggtggtgcatggttgtcgtcagctcgtgtcgtgagatgttgggttaagtcccgcaacgagcgcaacccttgatcttagttgccagcatttagttgggcactctaaggtgactgccggtgacaaaccggaggaaggtggggatgacgtcaaatcatcatgccccttatgacctgggctacacacgtgctacaatggatggtacaaagggctgcaagaccgcgaggtcaagccaatcccataaaaccattctcagctcggattgtaggctgcaactcgcctacatgaagctggaatcgctagtaatcgcggatcagcatgccgcggtgaatacgttcccgggccttgtacacaccgcccgtcacaccacgagagtttgtaacacccgaagtcggtggggtaacctttatggagccagccgcctaaggtgggacagatgattggggtgaagtcgtaacaaggtaaccgtagcggccgc

SEQ ID NO: 243 - DNA, 934 bp, Bacillus sp.
  SRC_DSF1
  modified_base (76)..(76): a, c, t, g, unknown or other
  modified_base (233)..(233): a, c, t, g, unknown or other
gccgcggtaatacgtaggtggcaagcgttatccggaattattgggcgtaaagcgcgcgcaggcggtttcttaagtntgatgtgaaagcccacggctcaaccgtggagggtcattggaaactggggaacttgagtgcagaagagaaaagcggaattccacgtgtagcggtgaaatgcgtagagatgtggaggaacaccagtggcgaaggcggctttttggtctgtaactgacgntgaggcgcgaaagcgtggggagcaaacaggattagataccctggtagtccacgccgtaaacgatgagtgctaagtgttagagggtttccgccctttagtgctgcagctaacgcattaagcactccgcctggggagtacggtcgcaagactgaaactcaaaggaattgacgggggcccgcacaagcggtggagcatgtggtttaattcgaagcaacgcgaagaaccttaccaggtcttgacatcctctgacaactctagagatagagcgttccccttcgggggacagagtgacaggtggtgcatggttgtcgtcagctcgtgtcgtgagatgttgggttaagtcccgcaacgagcgcaacccttgatcttagttgccagcattcagttgggcactctaaggtgactgccggtgacaaaccggaggaaggtggggatgacgtcaaatcatcatgccccttatgacctgggctacacacgtgctacaatggatggtacaaagggctgcaagaccgcgaggtcaagccaatcccataaaaccattctcagttcggattgtaggctgcaactcgcctacatgaagctggaatcgctagtaatcgcggatcagcatgccgcggtgaatacgttcccgggccttgtacacaccgcccgtcacaccacgagagtttgtaacacccgaagtcggtggagtaaccgtaagg

SEQ ID NO: 244 - DNA, 1526 bp, Bacillus sp.
  SRC_DSF2
agagtttgatcatggctcaggatgaacgctggcggcgtgcctaatacatgcaagtcgagcgaactgattagaagcttgcttctatgacgttagcggcggacgggtgagtaacacgtgggcaacctgcctgtaagactgggataactccgggaaaccggagctaataccggataacattttctcttgcataagagaaaattgaaagatggtttcggctatcacttacagatgggcccgcggtgcattagctagttggtgaggtaacggctcaccaaggcaacgatgcatagccgacctgagagggtgatcggccacactgggactgagacacggcccagactcctacgggaggcagcagtagggaatcttccgcaatggacgaaagtctgacggagcaacgccgcgtgagtgatgaaggctttcgggtcgtaaaactctgttgttagggaagaacaagtacaagagtaactgcttgtaccttgacggtacctaaccagaaagccacggctaactacgtgccagcagccgcggtaatacgtaggtggcaagcgttatccggaattattgggcgtaaagcgcgcgcaggcggtttcttaagtctgatgtgaaagcccacggctcaaccgtggagggtcattggaaactggggaacttgagtgcagaagagaaaagcggaattccacgtgtagcggtgaaatgcgtagagatgtggaggaacaccagtggcgaaaggcggctttttggtctgtaactgacgctgaggcgcgaaagcgtggggagcaaacaggattagataccctggtagtccacgccgtaaacgatgagtgctaagtgttagagggtttccgccctttagtgctgcagctaacgcattaagcactccgcctggggagtacggtcgcaagactgaaactcaaaggaattgacgggggcccgcacaagcggtggagcatgtggtttaattcgaagcaacgcgaagaaccttaccaggtcttgacatcctctgacaactctagagatagagcattccccttcgggggacagagtgacaggtggtgcatggttgtcgtcagctcgtgtcgtgagatgttgggttaagtcccgcaacgagcgcaacccttgatcttagttgccagcatttagttgggcactctaaggtgactgccggtgacaaaccggaggaaggtggggatgacgtcaaatcatcatgccccttatgacctgggctacacacgtgctacaatggatggtacaaagggctgcaagaccgcgaggtcaagccaatcccataaaaccattctcagttcggattgtaggctgcaactcgcctacatgaagctggaatcgctagtaatcgcggatcagcatgccgcggtgaatacgttcccaggccttgtacacaccgcccgtcacaccacgagagtttgtaacacccgaagtcggtggggtaacctttatggagccagccgcctaaggtgggacagatgattggggtgaagtcgtaacaaggtaaccgtagcggccgc

SEQ ID NO: 245 - DNA, 1525 bp, Bacillus sp.
  SRC_DSF6
agagtttgatcatggctcaggatgaacgctggcggcgtgcctaatacatgcaagtcgagcgaactgattagaagcttgcttctatgacgttagcggcggacgggtgagtaacacgtgggcaacctgcctgtaagactgggataactccgggaaaccggagctaataccggataacattttctcttgcataagagaaaattgaaagatggtttcggctatcacttacagatgggcccgcggtgcattagctagttggtgaggtaacggctcaccaaggcaacgatgcatagccgacctgagagggtgatcggccacactgggactgagacacggcccagactcctacgggaggcagcagtagggaatcttccgcaatggacgaaagtctgacggagcaacgccgcgtgagtgatgaaggctttcgggtcgtaaaactctgttgttagggaagaacaagtacaagagtaactgcttgtaccttgacggtacctaaccagaaagctacggctaactacgtgccagcagccgcggtaatacgtaggtggcaagcgttatccggaattattgggcgtaaagcgcgcgcaggcggtttcttaagtctgatgtgaaagcccacggctcaaccgtggagggtcattggaaactggggaacttgagtgcagaagagaaaagcggaattccacgtgtagcggtgaaatgcgtagagatgtggaggaacaccagtggcgaaggcggctttttggtctgtaactgacgctgaggcgcgaaagcgtggggagcaaacaggattagataccctggtagtccacgccgtaaacgatgagtgctaagtgttagagggtttccgccctttagtgctgcagctaacgcattaagcactccgcctggggagtacggtcgcaagactgaaactcaaaggaattgacgggggcccgcacaagcggtggagcatgtggtttaattcgaagcaacgcgaagaaccttaccaggtcttgacatcctctgacaactctagagatagagcattccccttcgggggacagagtgacaggtggtgcatggttgtcgtcagctcgtgtcgtgagatgttgggttaagtcccgcaacgagcgcaacccttgatcttagttgccagcatttagttgggcactctaaggtgactgccggtgacaaaccggaggaaggtggggatgacgtcaaatcatcatgccccttatgacctgggctacacacgtgctacaatggatggtacaaagggctgcaagaccgcgaggtcaagccaatcccataaaaccattctcagttcggattgtaggctgcaactcgcctacatgaagctggaatcgctagtaatcgcggatcagcatgccgcggtgaatacgttcccgggccttgtacacaccgcccgtcacaccacgagagtttgtaacacccgaagtcggtggggtaacctttatggagccagccgcctaaggtgggacagatgattggggtgaagtcgtaacaaggtaaccgtagcggccgc

SEQ ID NO: 246 - DNA, 1552 bp, Bacillus sp.
  oral taxon F26
agagtttgatcctggctcaggacgaacgctggcggcgtgcctaatacatgcaagtcgagcggagatttaaaagcttgcttttaaatcttagcggcggacgggtgagtaacacgtgggcaacctgccctgtagactgggataacttcgggaaaccgaagctaataccggataatcgaagggacctcatggttctttagtaaaagttgggtttacctaacactacaggatgggcccgcgtcgcattagctagttggtagggtaatggcctaccaaggcgacgatgcgtagccgacctgagagggtgatcggccacactgggactgagacacggcccagactcctacgggaggcagcagtagggaatcttccgcaatggacgaaagtctgacggagcaacgccgcgtgagcgatgaaggccttcgggtcgtaaagctctgttgttagggaagaacaagtactgttcaaatagggcagtaccttgacggtacctaacgagaaagccacggctaactacgtgccagcagccgcggtaatacgtaggtggcaagcgttgtccggaattattgggcgtaaagcgcgcgcaggcggtttcttaagtctgatgtgaaagcccccggctcaaccggggagggtcattggaaactgggagacttgagtgcagaagaggagagtggaattccatgtgtagcggtgaaatgcgtagatatatggaggaacaccagtggcgaaggcgactctctggtctgtaactgacgctgaggcgcgaaagcgtggggagcaaacaggattagataccctggtagtccacgccgtaaacgatgagtgctaggtgttaggggtttcgatgcccttagtgccgaagttaacacattaagcactccgcctggggagtacgaccgcaaggttgaaactcaaaggaattgacgggggcccgcacaagcagtggagcatgtggtttaattcgaagcaacgcgaagaaccttaccaggtcttgacatccccatgacctctctagagatagagatttcccttcggggacatgggtgacaggtggtgcatggttgtcgtcagctcgtgtcgtgagatgttgggttaagtcccgcaacgagcgcaacccttgatcttagttgccagcattaagttgggcactctaaggtgactgccggtgacaaaccggaggaaggtggggatgacgtcaaatcatcatgccccttatgacctgggctacacacgtgctacaatggatggtacaaagggctgcgagaccgcgaggttaagccaatcccataaagccattctcagttcggattgtaggctgcaactcgcctacatgaagccggaattgctagtaatcgcggatcagcatgccgcggtgaatacgttcccgggccttgtacacaccgcccgtcacaccacgagagtttgtaacacccgaagtcggtggggtaacctaagagtttgcggagcaatcttgcttcgtaagcgttgacctaggagccagccgcctaaggtgggacagatgattggggtgaagtcgtaacaaggtagccgt

SEQ ID NO: 247 - DNA, 1478 bp, Bacillus sp.
  oral taxon F28
agagtttgatcctggctcaggacgaacgctggcggcgtgcctaatacatgcaagtcgagcgcgggaagcttgcggaatccttcgggaggaagtgagcggaccgagcggcggacgggtgagtaacacgtgggcaacctgcccgtaagacggggataaccccgggaaaccggggctaataccggataggtgacctttctgcatggaggggtcatgaaaggcggcggaagccgtcgcttacggaggggcccgcggcgcattagctagttggtgagggaagggctcaccaaggcgacgatgcgtagccggcctgagagggtgaacggccacactgggactgagacacggcccagactcctacgggaggcagcagtagggaatcttccgcaatggacggaagtctgacggagcaacgccgcgtgagtgaggaaggccttcgggtcgtaaagctctgttgttcgtgaagaaggggttggccaggaaatgggccgacattgacggtagcgaaccagaaagccccggctaactacgtgccagcagccgcggtaacacgtagggggcaagcgttgtccggaatgattgggcgtaaagggcgcgcaggcggcctcttaagtctgatgtgaaagcccacggctcaaccgtggagggacattggaaactggggggcttgagtgcaggagaggggagtggaattccacgtgtagcggtgaaatgcgtagagatgtggaggaacaccagtggcgaaggcggctctctggcctgtgactgacgctgaggcgcgaaagcgtggggagcgaacaggattagataccctggtagtccacgccgtaaacgatgagtgctaggtgttaggggggagcaccccttagtgctgaagtcaacacattaagcactccgcctggggagtacgaccgcaaggttgaaactcaaaggaattgacgggggcccgcacaagcagtggagcatgtggtttaattcgaagcaacgcgaagaaccttaccaggtcttgacatccctctgatgggttcagagatggaccgttccttcgggacagaggagacaggtggtgcatggttgtcgtcagctcgtgtcgtgagatgttgggttaagtcccgcaacgagcgcaacccttgacctttgttgccagcattaagttgggcactcagaggtgactgccggtgacaaaccggaggaaggtggggatgacgtcaaatcatcatgcccctgatgacctgggcgacacacgtgctacaatgggcggtacagagggcagcgaagccgcgaggcggagcgaatcccagaaagccgctctcagttcggattgcaggctgcaactcgcctgcatgaaggaggaattgctagtaatcgcggatcagcatgccgcggtgaatccgttcccgggccttgtacacaccgcccgtcacaccacgagagtctgtaacacccgaagtcggtgaggcaaccggaaggagccagccgcc

SEQ ID NO: 248 - DNA, 1507 bp, Bacillus sp.
  oral taxon F79
  modified_base (880)..(880): a, c, t, g, unknown or other
agagtttgatcctggctcaggacgaacgctggcggcgtgcctaatacatgcaagtcgagcgcttgcatattgaaagcttgctttcaatatgcttgagcggcggacgggtgagtaacacgtgggcaacctgcctgtaagactgggataacttcgggaaaccggagctaataccggataatgcttttgaacacatgttcgaaagctgaaagatggtttcggctatcacttacagatgggcccgcggcgcattagctagttggtgaggtaacggctcaccaaggcgacgatgcgtagccgacctgagagggtgatcggccacactgggactgagacacggcccagactcctacgggaggcagcagtagggaatcttccgcaatggacgaaagtctgacggagcaacgccgcgtgagtgatgaaggttttcggatcgtaaaactctgttgttagggaagaacaagtaccggagtaactgccggtaccttgacggtacctaaccagaaagccacggctaactacgtgccagcagccgcggtaatacgtaggtggcaagcgttgtccggaattattgggcgtaaagcgcgcgcaggcggtcttttaagtctgatgtgaaagcccccggctcaaccggggagggtcattggaaactgggagacttgagtgcagaagagaagagcggaattccacgtgtagcggtgaaatgcgtagagatgtggaggaacaccagtggcgaaggcggctctttggtctgtaactgacgctgaggcgcgaaagcgtggggagcaaacaggattagataccctggtagtccacgccgtaaacgatgagtgctaagtgttagagggtttccgccctttagtgctgcagcaaacgcattaancactccgcctggggagtacggccgcaaggctgaaactcaaaggaattgacgggggcccgcacaagcggtggagcatgtggtttaattcgaagcaacgcgaagaaccttaccaggtcttgacatcctctgacaaccctagagatagggcgttccccttcgggggacagagtgacaggtggtgcatggttgtcgtcagctcgtgtcgtgagatgttgggttaagtcccgcaacgagcgcaacccttgatcttagttgccagcatttagttgggcactctaaggtgactgccggtgacaaaccggaggaaggtggggatgacgtcaaatcatcatgccccttatgacctgggctacacacgtgctacaatggatggtacaaagggcagcaaaaccgcgaggtcgagccaatcccataaaaccattctcagttcggattgtaggctgcaactcgcctacatgaagccggaatcgctagtaatcgcggatcagcatgccgcggtgaatacgttcccgggccttgtacacaccgcccgtcacaccacgagagtttgtaacacccgaagtcggtggggtaaccgtaaggagccagccgcctaaggtgggacagatgattggggtgaagtcgtaa

SEQ ID NO: 249 - DNA, 1405 bp, Bacillus sp.
  tc09
tgcagtcgagcgaatggattaagagcttgctcttatgaagttagcggcggacgggtgagtaacacgtgggtaacctgcccataagactgggataactccgggaaaccggggctaataccggataacattgaaccgcatggttcgaaattgaaaggcggcttcggctgtcacttatggatggacccgcgtcgcattagctagttggtgaggtaacggctcaccaaggcaacgatgcgtagccgacctgagaggggtcggccacactgggactgagacacggcccagactcctacgggaggcagcagtagggaatcttccgcaatggacgaaagtctgacggagcaacgccgcgtgagtgatgaaggctttcgggtcgtaaacctgttgttagggaagaacaagtgctagttgaataagctggcaccttgacggtacctaaccagaaagccacggctaactacgtgccagcagccgcggtaatacgtaggtggcaagcgttatccggattttgggcgtaaagcgcgcgcaggtggtttcttaagtctgatgtgaaagcccacggctcaaccgtggagggtcattggaaactgggagacttgagtgcagaagaggaaagtggaattccatgtgtgcgggaaatgcgtagagatatggaggaacaccagtggcgaaggcgactttctggtctgtaactgacactgaggcgcgaaagcgtggggagcaaacaggattagataccctggtagtccacgccgtaacgatagtgctaagtgttagagggtttccgccctttagtgctgaagttaacgcattaagcactccgcctggggagtacggccgcaagggtgaaacttaaaggaattgacgggggcccgcaccagcgtggagctgtggtttaatttgaagcaacgggaagaaccttaccaggttttgacatcctttgacaaccctagagataggggttttcctttgggagcagagtgacaggtggtgcatggttgttgtcagccgtgttggagatgttgggttaagtcccgcaacgagcgcaacccttgattttagttgccatcattaagttgggcactttaaggtgactgccggtgacaaaccggaggaaggtggggaagacgtcaaacatcatgcccttatgacctgggctacccacgtggtacaatggacggtacaaagaggtgcaagaccccgagggggagctaatttcataaaaccgttttcagtttggattgtagggtgcaacttgcctcatgaagccgaatcgctagtaatcgcggatcagcctgccgcggggaatacgttcccgggccttgtacaccccccccgtcaccccccgagagtttgtaacacccgaagtcggtggggtaacctttttgagccagccgctaaggtg

SEQ ID NO: 250 - DNA, 725 bp, Bacillus sp.
  zh168
  modified_base (105)..(106): a, c, t, g, unknown or other
  modified_base (112)..(112): a, c, t, g, unknown or other
  modified_base (134)..(135): a, c, t, g, unknown or other
cttcggctaccacttacagatggacccgcggcgcattagctagttggtgaggtaacggctcaccaaggcaacgatgcgtagccgacctgagagggtgatcggccnnactggnactgagacacggcccagactcnnacgggaggcagcagtagggaatcttccgcaatggacgaaagtctgacggagcaacgccgcgtgagtgatgaaggttttcggatcgtaaagctctgttgttagggaagaacaagtaccgttcgaatagggcggtaccttgacggtacctaaccagaaagccacggctaactacgtgccagcagccgcggtaatacgtaggtggcaagcgttgtccggaattattgggcgtaaagggctcgcaggcggtttcttaagtctgatgtgaaagcccccggctcaaccggggagggtcattggaaactggggaacttgagtgcagaagaggagagtggaattccacgtgtagcggtgaaatgcgtagagatgtggaggaacaccagtggcgaaggcgactctctggtctgtaactgacgctgaggagcgaaagcgtggggagcgaacaggattagataccctggtagtccacgccgtaaacgatgagtgctaagtgttagggggtttccgccccttagtgctgcagctaacgcattaagcactccgcctggggagtacggtcgcaagactgaaactcaaaggaattgacgggggcc

SEQ ID NO: 251 - DNA, 1430 bp, Bacillus sphaericus
taatacatgcaagtcgagcgaacagagaaggagcttgctcctttgacgttagcggcggacgggtgagtaacacgtgggcaacctaccttatagtttgggataactccgggaaaccggggctaataccgaataatctgtttcacctcatggtgaaatattgaaagacggtttcggctgtcgctataggatgggcccgcggcgcattagctagttggtgaggtaacggctcaccaaggcgacgatgcgtagccgacctgagagggtgatcggccacactgggactgagacacggcccagactcctacgggaggcagcagtagggaatcttccacaatgggcgaaagcctgatggagcaacgccgcgtgagtgaagaaggatttcggttcgtaaaactctgttgtaagggaagaacaagtacagtagtaactggctgtaccttgacggtaccttattagaaagccacggctaactacgtgccagcagccgcggtaatacgtaggtggcaagcgttgtccggaattattgggcgtaaagcgcgcgcaggtggtttcttaagtctgatgtgaaagcccacggctcaaccgtggagggtcattggaaactgggagacttgagtgcagaagaggatagtggaattccaagtgtagcggtgaaatgcgtagagatttggaggaacaccagtggcgaaggcgactatctggtctgtaactgacactgaggcgcgaaagcgtggggagcaaacaggattagataccctggtagtccacgccgtaaacgatgagtgctaagtgttagggggtttccgccccttagtgctgcagctaacgcattaagcactccgcctggggagtacggtcgcaagactgaaactcaaaggaattgacgggggcccgcacaagcggtggagcatgtggtttaattcgaagcaacgcgaagaaccttaccaggtcttgacatcccgttgaccactgtagagatatggtttccccttcgggggcaacggtgacaggtggtgcatggttgtcgtcagctcgtgtcgtgagatgttgggttaagtcccgcaacgagcgcaacccttgatcttagttgccatcatttagttgggcactctaaggtgactgccggtgacaaaccggaggaaggtggggatgacgtcaaatcatcatgccccttatgacctgggctacacacgtgctacaatggacgatacaaacggttgccaactcgcgagagggagctaatccgataaagtcgttctcagttcggattgtaggctgcaactcgcctacatgaagccggaatcgctagtaatcgcggatcagcatgccgcggtgaatacgttcccgggccttgtacacaccgcccgtcacaccacgagagtttgtaacacccgaagtcggtgaggtaaccttttggagccagccgccga

SEQ ID NO: 252 - DNA, 1497 bp, Bacillus sporothermodurans
ctggcggcgtgcctaatacatgcaagtcgagcgaacttgatgggagcttgctccctgagagttagcggcggacgggtgagtaacacgtgggtaacctgcctgtaagactgggataactccgggaaaccggggctaataccggataacttttttcttcgcatgaaggagaattgaaagacggctttaagctaccacttacagatggacccgcggcgcattagctagttggtgaggtaacggctcaccaaggcgacgatgcgtagccgacttgagagggtgatcggccacactgggactgagacacggcccagactcctacgggaggcagcagtagggaatcttccgcaatggacgaaagtctgacggagcaacgccgcgtgagtgatgaaggttttcggatcgtaaaactctgttgttagggaagaacaagtatcgttcgaatagggcggtaccttgacggtacctaaccagaaagccacggctaactacgtgccagcagccgcggtaatacgtaggtggcaagcgttgtccggaattattgggcgtaaagcgcgcgcaggcggtttcttaagtctgatgtgaaagcccacggctcaaccgtggagggtcattggaaactgggagacttgagtgcagaagagaagagcggaattccacgtgtagcggtgaaatgcgtagagatgtggaggaacaccagtggcgaaggcggctctttggtctgtaactgacgctgaggcgcgaaagcgtggggagcgaacaggattagataccctggtagtccacgccgtaaacgatgagtgctaagtgttagagggtttccgccctttagtgctgcagctaacgcattaagcactccgcctggggagtacggccgcaaggctgaaactcaaaggaattgacgggggcccgcacaagcggtggagcatgtggtttaattcgaagcaacgcgaagaaccttaccaggtcttgacatcctcttgacctccctagagatagggatttcccttcggggacaagagtgacaggtggtgcatggttgtcgtcagctcgtgtcgtgagatgttgggttaagtcccgcaacgagcgcaacccttgaccttagttgccagcattcagttgggcactctaaggtgactgccggtgacaaaccggaggaaggtggggatgacgtcaaatcatcatgccccttatgacctgggctacacacgtgctacaatggatggtacaaagggttgctagaccgcgaggttacgccaatcccataaaaccattctcagttcggattgtaggctgcaactcgcctacatgaagccggaatcgctagtaatcgcggatcagcatgccgcggtgaatacgttcccgggccttgtacacaccgcccgtcacaccacgagagtttgtaacacccgaagtcggtgaggtaaccttttggagccagccgccgaaggtgggacagatgattggggtgaagtcgtaacaaggtagccgtatcggaag

SEQ ID NO: 253 - DNA, 965 bp, Bacillus subtilis
  modified_base (857)..(857): a, c, t, g, unknown or other
  modified_base (919)..(919): a, c, t, g, unknown or other
  modified_base (929)..(929): a, c, t, g, unknown or other
  modified_base (938)..(938): a, c, t, g, unknown or other
ggagcttgctccctgatgttagcggcggacgggtgagtaacacgtgggtaacctgcctgtaagactgggataactccgggaaaccggggctaataccggatggttgtttgaaccgcatggttcaaacataaaaggtggcttcggctaccacttacagatggacccgcggcgcattagctagttggtgaggtaacggctcaccaaggcaacgatgcgtagccgacctgagagggtgatcggccacactgggactgagacacggcccagactcctacgggaggcagcagtagggaatcttccgcaatggacgaaagtctgacggagcaacgccgcgtgagtgatgaaggttttcggatcgtaaagctctgttgttagggaagaacaagtaccgttcgaatagggcggtaccttgacggtacctaaccagaaagccacggctaactacgtgccagcagccgcggtaatacgtaggtggcaagcgttgtccggaattattgggcgtaaagggctcgcaggcggtttcttaagtctgatgtgaaagcccccggctcaaccggggagggtcattggaaactggggaacttgagtgcagaagaggagagtggaattccacgtgtagcggtgaaatgcgtagagatgtggaggaacaccagtggcgaaggcgactctctggtctgtaactgacgctgaggagcgaaagcgtggggagcgaacaggattagataccctggtagtccacgccgtaaacgatgagtgctaagtgttagggggtttccgccccttagtgctgcagctaacgcattaagcactccgcctggggagtacggtcgcaagactgaaactcaaaggaattgacnggggcccgcacaagcggtggagcatgtggtttaattcgaagcaacgcgaagaacccttaccnggtcttgacntcctctganatcctagagataggacgtccccttcgg

SEQ ID NO: 254 - DNA, 1412 bp, Bacillus thermoamylovorans
tcgagcgaaccaataagaagcttgctttttgttggttagcggcggacgggtgagtaacacgtgggtaacctgcctgtaagaccgggataactccgggaaaccggtgctaataccggatagattatctttccgcctggagagataaggaaagatggcttttgccatcacttacagatgggcccgcggcgcattagctagttggtgaggtaacggctcaccaaggcgacgatgcgtagccgacctgagagggtgatcggccacactgggactgagacacggcccagactcctacgggaggcagcagtagggaatcttccgcaatggacgaaagtctgacggagcaacgccgcgtgagcgaagaaggtcttcggatcgtaaagctctgttgttagggaagaacaagtatcggaggaaatgccggtaccttgacggtacctgacgagaaagccacggctaactacgtgccagcagccgcggtaatacgtaggtggcaagcgttgtccggatttattgggcgtaaagcgcgcgcaggcggtcctttaagtctgatgtgaaatcttgcggctcaaccgcaagcggtcattggaaactgggggacttgagtgcagaagaggaaagcggaattccacgtgtagcggtgaaatgcgtagagatgtggaggaacaccagtggcgaaggcggctttctggtctgtaactgacgctgaggcgcgaaagcgtggggagcaaacaggattagataccctggtagtccacgccgtaaacgatgagtgctaagtgttggagggtttccgcccttcagtgctgcagctaacgcattaagcactccgcctggggagtacggtcgcaagactgaaactcaaaggaattgacgggggcccgcacaagcggtggagcatgtggtttaattcgaagcaacgcgaagaaccttaccaggtcttgacatctcctgaccgccctggagacagggtcttcccttcggggacaggatgacaggtggtgcatggttgtcgtcagctcgtgtcgtgagatgttgggttaagtcccgcaacgagcgcaacccttggttctagttgccagcattcagttgggcactctagagcgactgccggcgacaagtcggaggaaggtggggatgacgtcaaatcatcatgccccttatgacctgggctacacacgtgctacaatggatggtacaaagggcagcgaagcggcgacgcatgagcgaatcccagaaaaccattctcagttcggattgcaggctgcaactcgcctgcatgaagccggaatcgctagtaatcgcggatcagcatgccgcggtgaatacgttcccgggccttgtacacaccgcccgtcacaccacgagagtttgtaacacccgaagtcggtgaggtaaccgtaaggagccagccg

SEQ ID NO: 255 - DNA, 1554 bp, Bacillus thuringiensis
ttattggagagtttgatcctggctcaggatgaacgctggcggcgtgcctaatacatgcaagtcgagcgaatggattaagagcttgctcttatgaagttagcggcggacgggtgagtaacacgtgggtaacctgcctataagactgggataactccgggaaaccggggctaataccggataacattttgaaccgcatggttcgaaattgaaaggcggcttcggctgtcacttatggatggacccgcgtcgcattagctagttggtgaggtaacggctcaccaaggcaacgatgcgtagccgacctgagagggtgatcggccacactgggactgagacacggcccagactcctacgggaggcagcagtagggaatcttccgcaatggacgaaagtctgacggagcaacgccgcgtgagtgatgaaggctttcgggtcgtaaaactctgttgttagggaagaacaagtgctagttgaataagctggcaccttgacggtacctaaccagaaagccacggctaactacgtgccagcagccgcggtaatacgtaggtggcaagcgttatccggaattattgggcgtaaagcgcgcgcaggtggtttcttaagtctgatgtgaaagcccacggctcaaccgtggagggtcattggaaactgggagacttgagtgcagaagaggaaagtggaattccatgtgtagcggtgaaatgcgtagagatatggaggaacaccagtggcgaaggcgactttctggtctgtaactgacactgaggcgcgaaagcgtggggagcaaacaggattagataccctggtagtccacgccgtaaacgatgagtgctaagtgttagagggtttccgccctttagtgctgaagttaacgcattaagcactccgcctggggagtacggccgcaaggctgaaactcaaaggaattgacgggggcccgcacaagcggtggagcatgtggtttaattcgaagcaacgcgaagaaccttaccaggtcttgacatcctctgacaaccctagagatagggcttctccttcgggagcagagtgacaggtggtgcatggttgtcgtcagctcgtgtcgtgagatgttgggttaagtcccgcaacgagcgcaacccttgatcttagttgccatcatttagttgggcactctaaggtgactgccggtgacaaaccggaggaaggtggggatgacgtcaaatcatcatgccccttatgacctgggctacacacgtgctacaatggacggtacaaagagctgcaagaccgcgaggtggagctaatctcataaaaccgttctcagttcggattgtaggctgcaactcgcctacatgaagctggaatcgctagtaatcgcggatcagcatgccgcggtgaatacgttcccgggccttgtacacaccgcccgtcacaccacgagagtttgtaacacccgaagtcggtggggtaacctttttggagccagccgcctaaggtgggacagatgattggggtgaagtcgtaacaaggtagccgtatcggaaggtgcggctggatcacctcctttct

SEQ ID NO: 256 - DNA, 1545 bp, Bacillus weihenstephanensis
agagtttgatcctggctcaggatgaacgctggcggcgtgcctaatacatgcaagtcgagcggatggattaagagcttgctcttatgaagttagcggcggacgggtgagtaacacgtgggtaacctacccataagactgggataactccgggaaaccggggctaataccggataatattttgaactgcatagttcgaaattgaaaggcggcttcggctgtcacttatggatggacccgcgtcgcattagctagttggtgaggtaacggctcaccaaggcgacgatgcgtagccgacctgagagggtgatcggccacactgggactgagacacggcccagactcctacgggaggcagcagtaggggatcttccgcaatggacgaaagtctgacggagcaacgccgcgtgagtgatgaaggctttcgggtcgtaaaactctgttgttagggaagaacaagtgctagttgaataagctggcaccttgacggtacctaaccagaaagccacggctaactacgtgccagcagccgcggtaatacgtaggtggcaagcgttatccggaattattgggcgtaaagcgcgcgcaggtggtttcttaagtctgatgtgaaagcccacggctcaaccgtggagggtcattggaaactgggagacttgagtgcagaagaggaaagtggaattccatgtgtagcggtgaaatgcgtagagatatggaggaacaccagtggcgaaggcgactttctggtctgtaactgacactgaggcgcgaaagcgtggggagcaaacaggattagataccctggtagtccacgccgtaaacgatgagtgctaagtgttagagggtttccgccctttagtgctgaagttaacgcattaagcactccgcctggggagtacggccgcaaggctgaaactcaaaggaattgacgggggcccgcacaagcggtggagcatgtggtttaattcgaagcaacgcgaagaaccttaccaggtcttgacatcctctgaaaactctagagatagagcttctccttcgggagcagagtgacaggtggtgcatggttgtcgtcagctcgtgtcgtgagatgttgggttaagtcccgcaacgagcgcaacccttgatcttagttgccatcattaagttgggcactctaaggtgactgccggtgacaaaccggaggaaggtggggatgacgtcaaatcatcatgccccttatgacctgggctacacacgtgctacaatggacggtacaaagagctgcaagaccgcgaggtggagctaatctcataaaaccgttctcagttcggattgtaggctgcaactcgcctacatgaagctggaatcgctagtaatcgcggatcagcatgccgcggtgaatacgttcccgggccttgtacacaccgcccgtcacaccacgagagtttgtaacacccgaagtcggtggggtaacctttatggagccagccgcctaaggtgggacagatgattggggtgaagtcgtaacaaggtagccgtatcggaaggtgcggctggatcacctccttt

SEQ ID NO: 257 - DNA, 1388 bp, Bacteroidales bacterium ph8
gcagcatgaaagtagcaatacttttgatggcgaccggcggacgggtgcgtaacgcgtatgcaacctaccctttacagggggataacactgagaaatcggtactaataccccataatattccgggaggcatctttcggagttgaaagctttggtggtaaaggatgggcatgcgttgtattagctagttggtaaggtaacggcttaccaaggcgacgatacatagggggactgagaggttaaccccccacattggtactgagacacggaccaaactcctacgggaggcagcagtgaggaatattggtcaatggacggaagtctgaaccagccatgccgcgtgcaggaagacggctctatgagttgtaaactgcttttgtacgagggtaaacgcagatacgtgtatctgcctgaaagtatcgtacgaataaggatcggctaactccgtgccagcagccgcggtaatacggaggatccaagcgttatccggatttattgggtttaaagggtgcgtaggcggtttagtaagtcagcggtgaaattttggtgcttaacaccaaacgtgccgttgatactgctgggctagagagtagttgcggtaggcggaatgtatggtgtagcggtgaaatgcttagagatcatacagaacaccgattgcgaaggcagcttaccaaactatatctgacgttgaggcacgaaagcgtggggagcaaacaggattagataccctggtagtccacgcagtaaacgatgatagctcgttgtcggcgatacacagtcggtgactaagagaaatcgataagctatccacctggggagtacgttcgcaagaatgaaactcaaaggaattgacgggggcccgcacaagcggaggaacatgtggtttaattcgatgatacgcgaggaaccttacccgggcttgaaagttactgacgattctggaaacaggatttcccttcggggcaggaaactaggtgctgcatggttgtcgtcagctcgtgccgtgaggtgtcgggttaagtcccataacgagcgcaacccctactgatagttgccatcagagcgtttgagcgatcaaacaagctgggcactctatcgggactgccggtgtaagccgagaggaaggtggggatgacgtcaaatcagcacggcccttacgtccggggcgacacacgtgttacaatggtaggtacagagggcagccacccagtgatggggagcgaatctcgaaagcctatctcagttcggattggaggctgaaactcgcctccatgaagttggattcgctagtaatcgcgcatcagccatggcgcggtgaatacgttcccgggccttgtacacaccgcccgtcaagccatgggagttgggggtgcctgaagttcgtgaccgag

SEQ ID NO: 258 - DNA, 1285 bp, Bacteroidales sp.
  P1
atgaacgctagcggcaggcttaacacatgcaagtcgagggaccggcgtaagggtgcgtaacgcgtgagcaacctgcccgtatcagggggataaccgatggaaacgtcgcctaataccccataataaaagtcagatacggatgggctcgcgtgacattagctagttggtgtggtaacggcacaccaaggcaacgatgtctaggggttctgagaggaagaccccccacactggaactgagacacggtccagactcctacgggaggcagcagtgaggaatattggtcaatgggcggaagcctgaaccagccatgccgcgtgaaggaataaggtctatggatcgtaaacttcttttgagcgggagcatgagagtaccgttcgaataagcatcggctaactccgtgccagcagccgcggtaatacggaggatgcaagcgttatccggatttattgggtttaaagggtgcgtaggccgttgtgcaagtcagaggtgaaatcgcggggctcaaccccgtgtctgcctttgatactgtatgacttgaatgttgttgccgtgtgaggaatgagtagtgtagcggtgaaatgcatagatattactcagaacaccgattgcgaaggcatctcacgaaacaaattgacgctgaggcacgaaagcgtgggtatccaacaggattagataccctggtagtccacgctgtaaacgatgataactaaccgtcggcgagtcggtggccaagcgaaagcgataagttatccacctggggagtacgaccgcaaggttgaaactcaaaggaattgacgggggcccgcacaagcggaggaacatgtggtttaattcgatgatacgcgaggaaccttacccgggctcgaacggtcgaggtgctgcatggttgtcgtcagctcgtgtcgtgagatgttggctcaagtgccataacgagcgcaacccttgtcattagttgccatcggccgggctctctaatgagactgccaccgcaaggtggaggaaggagtggatgacgtcaaatcagcacggcccttacgtccggggcgacacacgtgttacaatggtgaccagagggtagccagccggcgacggcgcgcaaatctcagtcatctcagttcggatggagtctgcaacccgactccagaagctggattcgctagtaatcgcgcatcagccatggtgcggtgaatacgttcccgggccttgtacacaccgcccgtcaagccatgaaagccgagggcgcctgaagtccggccggcctaaggcgaacttggtaattggggc

SEQ ID NO: 259 - DNA, 1289 bp, Bacteroidales sp.
  P2 oral clone MB1_G13
gatgaacgctagcggcaggcttaacacatgcaagtcgagggaccggcgaaagggtgcgtaacgcgtgagtaacatacccgttacagagggatagtcgatggaaacgtcgtataatacctcatagttaaatgaggtaacggagtggctcgcgtcccattagttagttggcgtggtaacggcacaccaagacaacgatgggtaggggttctgagaggaaggtcccccacactggaactgagacacggtccagactcctacgggaggcagcagtgaggaatattggtcaatgggcggaagcctgaaccagccatgccgcgtgcaggaatagatcctatgggacataaactgcttttgatactgagcatgagagtaagtatcgaataagcatcggctaactccgtgccagcagccgcggtaatacgggggatgcaagcgttatccggaattattgggtttaaagggtgcgtaggctgtgcggtgcgtctgtggttaaaggcctctgcttaacggagcgtatgccatagaaacggccgtgcttgagagtgattgccgtgggaggaatgtgtggtgtagcggtgaaatgcatagatatcacacagaacaccgattgcgaaggcatctcacgaagtcatctgacgctgaagcacgaaagcgtgggaatcaaacaggattagataccctggtagtccacgctgtaaacgatgataactaaccgccggcgatcggtggctaagcgaaagcgataagttatccacctggggagtacgaccgcaaggttgaaactcaaaggaattgacgggggcccgcacaagcggaggaacatgtggtttaattcgatgatacgcgaggaaccttacccgggctcgaacggtcgaggtgctgcatggttgtcgtcagctcgtgccgtgaggtgtcggcttaagtgccataacgagcgcaacccttgcctgctgttaccaacgtacggggactcagcagggactgccaccgtaaggtggaggaagggggggatgacgtcaaatcagcacggcccttacgtccggggcgacacacgtgtcacaatggcggtcagagagttgcttgacagtgatgtttggctaatctataccgtctcagttcggatggagtctgcaacccgactccagaagctggattcgctagtaatcgcgcatcagccatggcgcggtgaatacgttcccgggccttgtacacaccgcccgtcaagccatggaagtcattggcgcctgaagcttgtccgagcgagcgaaggcgaaaatggtaactggggc

SEQ ID NO: 260 - DNA, 1282 bp, Bacteroidales sp.
  P3 oral clone MB1_G34
  modified_base (908)..(908): a, c, t, g, unknown or other
gatgaacgcttgcggcaggcataatacatgcaagtcgaacgagtggcggatgggtgagtaacgcgtatgcaacctacctcacaccgagaacaagcgactgaaaagttgaatatctcgtgatgatagttggtgtgagatgggcatgcgtatcattagctagttggcggggtaatagcccaccaaggcgacgatgattcgggggcctgagagggtggtcccccacactgggactgagacacggcccagactcctacgggaggcagcagtagggaatatcggtcaatgggcggaagcctgaaccagccatgccgcgtgatggatgacggccttagggttgtaaacatcttttctactagaggacgactgtatagtaggaataaggatcggctaactccgtgccagcagccgcggtaatacggaggattcgagcgttatccggatttactgggtttgaagggtgcgcaggcgggctcttaagtcagcggtgaaatgtccgggcttaccctgggccttgccgttgatactgggagtcttggataagataaggacggcggaatgcgtagtgtagcggtgaaatgcttagatattacgtagaagaccgattgcgaaggcagctgtctgggtctatcgacgctcaagcacgaaagcgtgggtagcgaacaggattagataccctggtagtccacgccgtaaacgatgatcactcgctcttggcgtgtcaggggctaagcgaaagcgttaagtgatccacctggggagtacgaccgcaaggttgaaactcaaaggaattgacgggggcccgcacaagcggaggaacatgtggtttaattcgatgatacgcgaggaaccttacctgggctagaacggtcgaggtgctgcatggttgtcgtcagctcgtgccgtgaggngtcgggttaagtcccataacgagcgcaacccttatcgtcagttaccatcaattggggactctggcgagactgccggtgcaaaccggaggaaggtggggatgacgtcaaatcagcacggcccttacgtccagggcgacacacgtgttacaatgggtagcggagagttgccagccagcgatggtgagctaatctatctatcctcagttcggacggagtctgcaactcgactccggaagctggattcgctagtaatcgcgcatcagccatggcgcggtgaatacgttcccgggccttgtacacaccgcccgtcaagccatgaaagtcatgggtgcctgaagttcgtcgcaacctagggcaaacttggtgattagggc

SEQ ID NO: 261 - DNA, 1286 bp, Bacteroidales sp.
  P4 oral clone MB2_G17
gatgaacgcttgcggcaggcttaatacatgcaagtcgaacgagtggcggatgggtgagtaacgcgtatgcaacctacctcgtgtcgagaaaaagtcgactgaaaagtcgattaaagtttcgtagtgatagttggcgcgagatgggcatgcgtatcattagctagttggtagggtaacggcctaccaaggcgacgatgattaggggttctgagagggaggtcccccacactgggactgagacacggcccagactcctacgggaggcagcagtagggaatattggtcaatgggcggaagcctgaaccagccatgccgcgtgatggacgacggccttcgggttgtaaacatcttttctgctagaggatgactgtatagcaggaataaggatcggctaactccgtgccagcagccgcggtaatacggaggatccgagcgttatccggatttactgggtttaaagggtgcgcaggcgggctcttaagtcagtggtgaaaagcctaggcttaccctaggtcgtgccattgatactgggagtcttggataagataaggaaggcggaatgcgtagtgtagcggtgaaatgcttagatattacgtagaagaccgattgcgaaggcagctttctgggtctatcgacgctcaagcacgaaagcgtgggtagcgaacaggattagataccctggtagtccacgccgtaaacgatgatcactcgctcttggcgtgtcaggggccaagcgaaagcgttaagtgatccacctgggagtacggccgcaaggctgaaactcaaaggaattgacgggggcccgcacaagcggaggaacatgtggtttaattcgatgatacgcgaggaaccttacctgggctagaactgcagaggtgctgcatggttgtcgtcagctcgtgccgtgaggtgtcgggttaagtcccataacgagcgcaacccctatcgtcagttaccatcagctggggactctggcgagactgccggtgcaaaccggaggaaggtggggatgacgtcaaatcagcacggcccttacgtccagggcgacacacgtgttacaatgggtagcagcgagttgccaaccagcaatggtgcgctaatctatactaccctcagttcggacggagtctgcaactcgactccggaagctggattcgctagtaatcgcgcatcagccatggcgcggtgaatacgttcccgggccttgtacacaccgcccgtcaagccatgaaagtcgtgggtgcctgaagttcgtagcgacctaaggcaaactcaatgattagggc

SEQ ID NO: 262 - DNA, 1265 bp, Bacteroidales sp.
  P5 oral clone MB2_P04
gcataacacatgcaagtcgagggaccggcggatgggtgagtagcgcgtacgtaacctaccttgtacagtgggataggcattggaaacggtgtataataccacgtaatggaagttggtataagatgggcgtgcgtaggattagatagatggtagggtaaaggcttaccatgtctatgatctttaggggttctgagaggaaggtcccccacattgcaactgagatacggtgcaaactcttacgggaggcagcagtgaggaatattggtcaatgggcggaagcttgaaccagccataccgcgtgcaggaaggcggcctatgggttgtaaactgcttttatatttgaataggaaattagggtacgaataagtatcggctaactccgtgccagcagccgcggtaatacggaggatacgagcgttgtccggatttattgggtttaaagggtgcgtaggcggttaattaggtctatggtaaaatagttatgcttaacatgattatgctgtggataccggttggctagaatataagtggcgtaggcggaatgaagcgagtagaggtgacattcatagatatgctttggaacaccgttcgcgtaggcggcttacgataattgacgctgaggcacgagagcgtgggtatcgaacagaattagatactctggtagtccacgctgtaaacgatgataactatatgtcggcgtgtcggtgtaggagtgaaagcgataagttatccacctggggagtacgattgcaaggttgaaactcaaaggaattgacgggggcccgcacaagcggaggagcatgtggtttaattcgatgatacgcgaggaaccttacccgggcttgaacgtgcgaggtgctgcatggttgtcgtcagctcgtgccgtgaggtgtcaggttaagtcctataacgagcgtaacccttgttgatagttaccagcgcgtggggactctattgatactgccggtgtaagccggaggaagggggggatgacgtcaaatcagcacggcccttacgtccggggcgacacacgtgctacaatggttaacagagggcagttatacagagatgtaacacgaatctttttagtcatagtacggatggagtctgcaactcgacttcagaagatggattcgctagtaatcgcagatcagccatgctgcggtgaatacgttcccgggccttgtacacaccgcccgtcaagccatgggagttggtggtacctaaagagcgtagcgtttaagggtaatgctaataactggggc

SEQ ID NO: 263 - DNA, 1287 bp, Bacteroidales sp.
  P6 oral clone MB3_C19
gatgaacgcttgcggcaggcttaatacatgcaagtcgaacgagtggcggatgggtgagtaacgcgtatgcaaccttcctcacaccgagaaaaagtcgactgaaaagttgaataaagtctcgtgatgatagttggtgtgagatgggcatgcgtatcattagctagttggtagggtaacggcttaccaaggcgacgatgattagggggcctgagagggtggtcccccacactgggactgagacacggcccagactcctacgggaggcagcagtagggaatattggtcaatgggcggaagcctgaaccagccatgccgcgtgatggatgacggccttagggttgtaaacatcttttctgctagaggacgactgtatagcaggaataaggatcggctaactccgtgccagcagccgcggtaatacggaggattcgagcgttatccggatttactgggtttaaagggtgcgcaggcgggctcttaagtcagcggtgaaatgtctgggcttaccctaggaattgccgttgatactgggagtcttggataagataaggacggcggaatgcgtagtgtagcggtgaaatgcttagatattacgtagaagaccaattgcgaaggcagctatctgggtctatcgacgctcaagcacgaaagcgtggggagcaaacaggattagataccctggtagtccacgccgtaaacgatgatcactcgctcttggcgtgtcaggggccaagcgaaagcgttaagtgatccacctggggagtacggccgcaaggctgaaactcaaaggaattgacgggggcccgcacaagcggaggaacatgtggtttaattcgatgatacgcgaggaaccttacctgggctagaacggtcgaggtgctgcatggttgtcgtcagctcgtgccgtgaggtgtcgggttaagtcccataacgagcgcaacccttatcgtcagttaccatcaattggggactctggcgagactgccggtgcaaaccggaggaaggtggggatgacgtcaaatcagcacggcccttacgtccagggcgacacacgtgttacaatgggtagcagagagttgccagccagcgatggtgagctaatctattctaccctcagttcggatggagtctgcaactcgactccagaagctggattcgctagtaatcgcgcatcagccatggcgcggtgaatacgttcccgggccttgtacacaccgcccgtcaagccatgaaagtcgtgggtgcctgaagttcgtagcgacctaaggcaaactcgatgattagggc

SEQ ID NO: 264 - DNA, 1267 bp, Bacteroidales sp.
  P7 oral clone MB3_P19
gcttaacacatgcaagtcgagggaccggcggatgggtgagtaacgcgtatgcaatctaccttttacccggggatagcccatggaaacgtggattaatacccgatgcataaagtcggtaagagatgagcatgcgttccattaggaagttggtaaggtaacggcttaccaatccgatgatggatgggggttctgagaggaaggtcccccacactggaattgagatacggtccagactcctacgggaggcagcagtgaggaatattggtcaatggtcgtaagactgaaccagccaagtcgcgtgaaggaaactgcctatgggttttcaacttcttttgtcagggaagatgccggtacctgacgaataaggatcggctaacgccgtgccagcagccgcggtaatacggaggatccgagcgttatccggatttattgggtttaaagggtgcttaggcggcatattaagttagtggtcaaatggtccggctcaaccggatttcgccattaaaactgatgtgctagagattaaacgaggtaggcggaataagttaagtagcggtgaaatgcatagatataacttagaactccgatagcgaaggcagcttaccaggctatctgacgctgaatcacgagagcgtgggtatcgaacaggattagataccctggtagtccacgccgtaaacgatgctcaccggctctatgcgtgtatggggctaatagaaataattaagtgagccacctggggagtacgtcggcaacgatgaaactcaaaggaattgacgggggcccgcacaagcggaggaacatgtggtttaattcgatgatacgcgaggaaccttacccgggtttaaatgtacaaggtgctgcatggttgtcgtcagctcgtgccgtgaggtgtcgggttaagtcccataacgagcgcaacccttatgattagttgctaacggccgagcactctattcacactgccaccgtaaggtggaggaaggaggggatgatgtcaaatcagcacggcccttatatccggggctacacacgtgttacaatggtcggcagagggttgcatttacgagagtaacagctaatcccttcggtcacagttcggatggagtctgcgactcgactccagaagttggattcgctagtaatcgcacatcagccatggtgcggtgaatacgttcccgggccttgtacacaccgcccgtcaagccatgggagctgagggtgcctgaagttcgtagcgacctagggcaaacttggtaactggggc

SEQ ID NO: 265 - DNA, 1292 bp, Bacteroidales sp.
  P8 oral clone MB4_G15
gatgaacgctagcggcaggcctaacacatgcaagtcgagggaccggcgaacgggtgcgtaacgcgtgaacaacttgccggacacagggggataatcgtcggaaacgtcgtctaatatcccataacgaaaggcggtgtctgataggttcgcgtgacattagctagtcggtggggcaacggcccaccgaggcgacgatgtctaggggttctgagaggaaggccccccacactgggactgagacacggcccagactcctacgggaggcagcagtgagggatattggacaatgggcggaagcctgatccagccatgccgcgtgaaggaataaggcctatgggtcgtaaacttcttttgacgcagagcatgagagtatgcgtcgaataagcatcggctaactccgtgccagcagccgcggtaatacggaggatgcgagcgttatccggatttattgggtttaaagggtgcgtaggctgttggataagtcagcggtgaaatcaccacgcttaacgtgttgtgtgccgttgaaactgtctggcttgaatgcgctcgtcgtgagaggaatgtgtggtgtagcggtgaaatgcatagatatcacacagaacaccgattgcgaaggcatctcacgagagcgattgacgctgatgcacgaaagcgcgggtatcgaacaggattagataccctggtagtccgcgctgtaaacgatgatgactaactgttggttgatcagtggtcaagcgaaagcgttaagtcatccacctggggagtacggccgcaaagctgaaactcaaaggaattgacgggggcccgcacaagcggaggaacatgtggtttaattcgatgatacgcgaggaaccttacccgggctcgaacggtcgaggtgctgcatggttgtcgtcagctcgtgccgtgaggtgtcggcttaagtgccataacgagcgcaacccttgccgtcagttgccatcagctggggactctgtcgggactgccaccgcaaggtggaggaagggggggatgacgtcaaatcagcacggcccctacgtccggggctacacacgtgttacaatggcgaccagaggggtgccacccggtgacggggcgccgatctccgtcgtctcagttcggatggagtctgcaacccgactccagaagctggattcgctagtaatcgcacatcagccatggtgcggtgaatacgttcccgggccttgtacacaccgcccgtcaagccatgagagccaggggcgcctgaagcgcgtaccggagcgttcaagggcgaaccaggtgattggggc

SEQ ID NO: 266 - DNA, 1495 bp, Bacteroides acidifaciens
tatcatggctcaagatgaacgctagctacaggcttaacacatgcaagtcgaggggcagcatgaaagtttgcttgcaaacttttgatggcgaccggcgcacgggtgagtaacacgtatccaacctgcctcatactcggggatagcctttcgaaagaaagattaatacccgatgtcatagtcctaccgcatgatgggattattaaagaatttcggtatgggatggggatgcgttccattagttagttggcggggtaacggcccaccaagacaacgatggataggggttctgagaggaaggtcccccacattggaactgagacacggtccaaactctacgggaggcagcagtgaggaatattggtcaatggacgagagtctgaaccagccaagtagcgtgaaggatgactgccctatgggttgtaaacttcttttatatgggaataaaatgttccacgtgtgggattttgtatgtaccatatgaataaggatcggctaactccgtgccagcagccgcggtaatacggaggatccgagcgttatccggatttattgggtttaaagggagcgtaggtggattgttaagtcagttgtgaaagtttgcggctcaaccgtaaaattgcagttgaaactggcagtcttgagtacagtagaggtgggcggaattcgtggtgtagcggtgaaatgcttagatatcacgaagaactccgattgcgaaggcagctcactggactgcaactgacactgaggctcgaaagtgtgggtatcaaacaggattagataccctggtagtccacacagtaaacgatgaatactcgctgtttgcgatatacggcaagcggccaagcgaaagcattaagtattccacctggggagtacgccggcaacggtgaaactcaaaggaattgacgggggccgcacaagcggaggaacatgtggtttaattcgatgatacgcgaggaaccttacccgggcttaaattgcacctgaataatgtggaaacatgttagccgtaaggcaggtgtgaaggtgctgcatggttgtcgtcagctcgtgccgtgaggtgtcggcttaagtgccataacgagcgcaacccttatcttcagttactaacaggtcatgctgaggactctggagagactgccgtcgtaagatgtgaggaaggtggggatgacgtcaaatcagcacggcccttacgtccggggctacacacgtgttacaatgggaggtacagaaggccgctacctggcgacaggatgccaatccccaaaacctctctcagttcggatcgaagtctgcaacccgacttcgtgaagctggattcgctagtaatcgcgcatcagccatggcgcggtgaatacgttcccgggccttgtacacaccgcccgtcaagccatgaaagccgggggtacctgaagtacgtaaccgcaagatcgtcctagggtaaaactggtaattggggctaagtcgtaacaaggtagccgtaccggaaggtgcg

SEQ ID NO: 267 - DNA, 1456 bp, Bacteroides barnesiae
tcaggatgaacgctagctacaggcttaacacatgcaagtcgaggggcagcgggaagtcagcttgctgactttgccggcgaccggcgcacgggtgagtaacacgtatccaaccttccgcatactctggaatagcctttcgaaagaaagattaatgcccgatggtatcaagagattgcatgatatctcgaataaagattcatcggtatgcgatggggatgcgttccattaggcagttggcggggtaacggcccaccaaaccgacgatggataggggttctgagaggaaggtcccccacattggaactgagacacggtccaaactcctacgggaggcagcagtgaggaatattggtcaatgggcgagagcctgaaccagccaagtagcgtgaaggatgactgccctacgggttgtaaacttcttttataagggaataaagttctctacgtgtagagttttgtatgtaccttatgaataagcatcggctaactccgtgccagcagccgcggtaatacggaggatgcgagcgttatccggatttattgggtttaaagggagcgtagacggcggtttaagtcagctgtgaaatggtgcggctcaaccgtagcactgcagttgaaactggacggcttgagtgcagttgaggcaggcggaattcgtggtgtagcggtgaaatgcttagatatcacgaagaaccccgattgcgaaggcagcctgctaagctgcaactgacgttgaggctcgaaagtgtgggtatcaaacaggattagataccctggtagtccacacggtaaacgatggatactcgctgttggcgatatactgtcagcggccaagtgaaaacgttaagtatcccacctggggagtacgccggcaacggtgaaactcaaaggaattgacgggggcccgcacaagcggaggaacatgtggtttaattcgatgatacgcgaggaaccttacccgggcttgaattgcagacgaatcatccggagacggatgagccgcaaggcgtctgtgaaggtgctgcatggttgtcgtcagctcgtgccgtgaggtgtcggcttaagtgccataacgagcgcaaccctttccgccggttactaacaggtgatgctgaggactccgacggtactgccatcgtaagatgtgaggaaggtggggatgacgtcaaatcagcacggcccttacgtccggggctacacacgtgttacaatggggggtacagaaggcagcgaccgggcgaccggaagcgaatccctaaagcccctctcagttcggactggagtctgcaacccgactccacgaagctggattcgctagtaatcgcgcatcagccacggcgcggtgaatacgttcccgggccttgtacacaccgcccgtcaagccatgaaagccgggggtacctgaagtgcgtaaccgcgaggagcgccctagggtaaaaccggtaattggggctaa

SEQ ID NO: 268 - DNA, 1383 bp, Bacteroides caccae
tcgaggggcatcagtttggtttgcttgcaaaccaaagctggcgaccggcgcacgggtgagtaacacgtatccaacctgcctcatactcggggatagcctttcgaaagaaagattaatatccgatagcatatatttcccgcatgggttttatattaaagaaattcggtatgagatggggatgcgttccattagtttgttggcggggtaacggcccaccaagactacgatggataggggttctgagaggaaggtcccccacattggaactgagacacggtccaaactcctacgggaggcagcagtgaggaatattggtcaatggacgcgagtctgaaccagccaagtagcgtgaaggatgactgccctatgggttgtaaacttcttttatatgggaataaagtggtccacgtgtggatttttgtatgtaccatatgaataaggatcggctaactccgtgccagcagccgcggtaatacggaggatccgagcgttatccggatttattgggtttaaagggagcgtaggcggattgttaagtcagttgtgaaagtttgcggctcaaccgtaaaattgcagttgatactggcagtcttgagtgcagtagaggtgggcggaattcgtggtgtagcggtgaaatgcttagatatcacgaagaactccgattgcgaaggcagctcactggagtgtaactgacgctgatgctcgaaagtgtgggtatcaaacaggattagataccctggtagtccacacagtaaacgatgaatactcgctgtttgcgatatacagtaagcggccaagcgaaagcattaagtattccacctggggagtacgccggcaacggtgaaactcaaaggaattgacgggggcccgcacaagcggaggaacatgtggtttaattcgatgatacgcgaggaaccttacccgggcttaaattgcaaatgaattatggggaaacccatacgccgcaaggcatttgtgggtgaaatgcttagttgtcaccaagtcgtgccgtgaggtgtcggcttaagtgccataacgagcgcaacccttatcttcagttactaacaggtcatgctgaggactctggagagactgccgtcgtaagatgtgaggaaggtggggatgacgtcaaatcagcacggcccttacgtccggggctacacacgtgttacaatggggggtacagaaggccgctacctggtgacaggatgccaatcccaaaaacctctctcagttcggatcgaagtctgcaacccgacttcgtgaagctggattcgctagtaatcgcgcatcagccatggcgcggtgaatacgttcccgggccttgtacacaccgcccgtcaagccatgaaagccgggggtacctgaagtacgtaaccgcaa

SEQ ID NO: 269 - DNA, 1377 bp, Bacteroides cellulosilyticus
  modified_base (24)..(24): a, c, t, g, unknown or other
tcgaggggcagcatgacctagcantaggttgatggcgaccggcgcacgggtgagtaacacgtatccaacctaccggttattccgggatagcctttcgaaagaaagattaataccggatagtataacgagaaggcatctttttgttattaaagaatttcgataaccgatggggatgcgttccattagtttgttggcggggtaacggcccaccaagacatcgatggataggggttctgagaggaaggtcccccacattggaactgagacacggtccaaactcctacgggaggcagcagtgaggaatattggtcaatggacgagagtctgaaccagccaagtagcgtgaaggatgactgccctatgggttgtaaattcttttatatgggaataaagtgagccacgtgtggctttttgtatgtaccatacgaataaggatcggctaactccgtgccagcagccgcggtaatacggaggatccgagcgttatccggatttattgggtttaaagggagcgtaggcggactattaagtcagctgtgaaagtttgcggctcaaccgtaaaattgcagttgatactggtcgtcttgagtgcagtagaggtaggcggaattcgtggtgtagcggtgaaatgcttagatatcacgaagaactccgattgcgaaggcagcttactggactgtaactgacgctgatgctcgaaagtgtgggtatcaaacaggattagataccctggtagtccacacagtaaacgatgaatactcgctgtttgcgatatacagcaagcggccaagcgaaagcattaagtattccacctggggagtacgccggcaacggtgaaactcaaaggaattgacgggggcccgcacaagcggaggaacatgtggtttaattcgatgatacgcgaggaaccttacccgggcttaaattgcatctgaataatttggaaacagattagccgtaaggcagatgtgaaggtgctgcatggttgtcgtcagctcgtgccgtgaggtgtcggcttaagtgccataacgagcgcaacccttatctttagttactaacaggtcatgctgaggactctagagagactgccgtcgtaagatgtgaggaaggtggggatgacgtcaaatcagcacggcccttacgtccggggctacacacgtgttacaatggggggtacagaaggcagctacacagcgatgtgatgctaatcccaaaagcctctctcagttcggattggagtctgcaacccgactccatgaagctggattcgctagtaatcgcgcatcagccacggcgcggtgaatacgttcccgggccttgtacacaccgcccgtcaagccatgaaagccgggggtacctgaagtccgtaaccgcaag

SEQ ID NO: 270 - DNA, 1531 bp, Bacteroides clarus
ttacaatgaagagtttgatcctggctcaggatgaacgctagctacaggcttaacacatgcaagtcgaggggcagcggggttgaagcttgcttcaaccgccggcgaccggcgcacgggtgagtaacacgtatccaacctgccgataactccgggatagcctttcgaaagaaagattaataccggatggcatagttttcccgcatggaataactattaaagaatttcggttatcgatggggatgcgttccattaggcagttggcggggtaacggcccaccaaaccgacgatggataggggttctgagaggaaggtcccccacattggaactgagacacggtccaaactcctacgggaggcagcagtgaggaatattggtcaatggacgagagtctgaaccagccaagtagcgtgaaggatgactgccctatgggttgtaaacttcttttatacgggaataaagttagccacgtgtggttttttgcatgtaccgtatgaataaggatcggctaactccgtgccagcagccgcggtaatacggaggatccgagcgttatccggatttattgggtttaaagggagcgtaggcggggtattaagtcagttgtgaaagtttgcggctcaaccgtaaaattgcagttgatactggtatccttgagtgcagcagaggtgggcggaattcgtggtgtagcggtgaaatgcttagatatcacgaagaactccgattgcgaaggcagctcactggagtgtaactgacgctgatgctcgaaagtgtgggtatcaaacaggattagataccctggtagtccacacagtaaacgatgaatactcgctgttggcgatacaatgtcagcggccaagcgaaagcattaagtattccacctggggagtacgccggcaacggtgaaactcaaaggaattgacgggggcccgcacaagcggaggaacatgtggtttaattcgatgatacgcgaggaaccttacccgggcttgaattgcaactgacggaattggaaacagttctttcttcggacagttgtgaaggtgctgcatggttgtcgtcagctcgtgccgtgaggtgtcggcttaagtgccataacgagcgcaacccttatcgatagttaccatcaggtcatgctggggactctatcgagactgccgtcgtaagatgtgaggaaggtggggatgacgtcaaatcagcacggcccttacgtccggggctacacacgtgttacaatggggggtacagaaggcagctacacggcgacgtgatgctaatccccaaaacctctctcagttcggattggagtctgcaacccgactccatgaagctggattcgctagtaatcgcgcatcagccacggcgcggtgaatacgttcccgggccttgtacacaccgcccgtcaagccatgaaagccgggggtacctgaagtacgtaaccgcaaggagcgtcctagggtaaaactggtgattggggctaagtcgtaacaaggtagccgtaccggaaggtgcggctggaacacctcctttct

SEQ ID NO: 271 - DNA, 1489 bp, Bacteroides coagulans
ggctcaggacgaacgctggcggcgtgcttaacacatgcaagtcgaacgatgaagaaaagaatcgaagcttcggcagaaattcatttcggattagtggcagacgggtgagtaacgcgtgagcaacctacctcttacaaagggatagcctcgggaaaccgggattaataccatataacattgcgacgaagcatttcgatgcaatcaaagctacggcggtaagagatgggctcgcgtcccattaaccagatggtgaggtaacggctcaccatagtaacgatgggtaaccggcctgagagggtgaacggtcacactggaactgagacacggtccagactcctacgggaggcagcagtggggaatattgcacaatggagggaactctgatgcagcgacgccgcgtgagtgatgaaggaattcgtttcgtaaaactctgttctatgggaagaaaaggactgtaccataggagaaagctccggctaaatacgtgccagcagccgcggtaatacgtatggagcgagcgttgtccggaattattgggcgtaaagggtgcgcaggcggctttacaagttggatgtgaaatattgtggctcaaccacaaacgtgcatccaaaactgcaaagcttgagttaaggagaggtaagtggaattcctggtgtagcggtggaatgcgtagatatcaggaggaataccggtggcgaaggcgacttactggacttaaactgacgctcaggcacgaaagcgtggggagcaaacaggattagataccctggtagtccacgccgtaaacgatgagtgctaggtgttgggggtcaaacctcggtgccgcaagcaaacgcaataagcactccgcctggggagtacgtgcacaagcatgaaactcaaaggaattgacggggacccgcacaagcagcggagcatgtggtttaattcgtggctacgcgaagaaccttaccagggcttgacatatatatgaggggacatagagatatgaaaccagtaagagcttgctcttaacatatatacaggtggtgcatggttgtcgtcagctcgtgtcgtgagatgttgggttaagtcccgcaacgagcgcaacccttgcaattagttactaacagatcatgctgaggactctaattggactgccgatgataaatcggaggaaggtggggatgacgtcaaatcatcatgccctttatgtcctgggctacacacgtgctacaatggtcggaacaaagaggagcgaaatggtgacatcaagcaaatctcaaaaaaccgatcccagttcggattgtactctgcaactcgagtacatgaagtcggagttgctagtaatcgcggatcagaatgccgcggtgaatgcgttcccgggtcttgtacacaccgcccgtcacaccatggaagttggcaatacccgaagccgatggcctaaccgcaaggaaggagtcgtcgaaggtagggtcaatgactggggtgaagtcgtaacaaggtaacc

SEQ ID NO: 272 - DNA, 1532 bp, Bacteroides coprocola
ttacaatgaagagtttgatcctggctcaggatgaacgctagctacaggcttaacacatgcaagtcgaggggcagcatgaacttagcttgctaagtttgatggcgaccggcgcacgggtgagtaacacgtatccaaccttccgtttactcagggatagcctttcgaaagaaagattaatacctgatagtatggtgagattgcatgatggcaccattaaagatttattggtaaacgatggggatgcgttccattaggtagtaggcggggtaacggcccacctagcctgcgatggataggggttctgagaggaaggtcccccacattggaactgagacacggtccaaactcctacgggaggcagcagtgaggaatattggtcaatgggcgagagcctgaaccagccaagtagcgtgaaggatgaaggtcctacggattgtaaacttcttttatacgggaataaagtttcctacgtgtaggattttgtatgtaccgtatgaataagcatcggctaactccgtgccagcagccgcggtaatacggaggatgcgagcgttatccggatttattgggtttaaagggagcgcagacgggagattaagtcagttgtgaaagtttgcggctcaaccgtaaaattgcagttgatactggtttccttgagtgcagttgaggcaggcggaattcgtggtgtagcggtgaaatgcttagatatcacgaagaaccccgattgcgaaggcagcttgctaaactgtaactgacgttcatgctcgaaagtgtgggtatcaaacaggattagataccctggtagtccacacggtaaacgatggatactcgctgttggcgatatactgtcagcggccaagcgaaagcattaagtatcccacctggggagtacgccggcaacggtgaaactcaaaggaattgacgggggcccgcacaagcggaggaacatgtggtttaattcgatgatacgcgaggaaccttacccgggcttaaattgcagacgaattacgaggaaacttgtaagccgcaaggcgtctgtgaaggtgctgcatggttgtcgtcagctcgtgccgtgaggtgtcggcttaagtgccataacgagcgcaaccctcgtggtcagttactaacaggttaagctgagggctctggccagactgccatcgtaagatgtgaggaaggtggggatgacgtcaaatcagcacggcccttacgtccggggctacacacgtgttacaatgggaggtacagaaggccgctacccggcaacgggatgccaatccccaaaacctctctcagttcggactggagtctgcaacccgactccacgaagctggattcgctagtaatcgcgcatcagccacggcgcggtgaatacgttcccgggccttgtacacaccgcccgtcaagccatgaaagccgggggtacctgaagtgcgtaaccgcaaggagcgccctagggtaaaaccggtaattggggctaagtcgtaacaaggtagccgtaccggaaggtgcggctggaacacctcctttct

SEQ ID NO: 273 - DNA, 1535 bp, Bacteroides coprophilus
ttacaatgaagagtttgatcctggctcaggatgaacgctagctacaggcttaacacatgcaagtcgaggggcagcgggattgaagcttgcttcaattgccggcgaccggcgcacgggtgagtaacgcgtatccaaccttccgcttactcggggatagcctttcgaaagaaagattaatacccgatggtatcttaagcacgcatgagattaagattaaagatttatcggtaagcgatggggatgcgttccattaggcagttggcggggtaacggcccaccaaacctacgatggataggggttctgagaggaaggtcccccacattggaactgagacacggtccaaactcctacgggaggcagcagtgaggaatattggtcaatgggcgagagcctgaaccagccaagtagcgtgaaggatgacggccctacgggttgtaaacttcttttgtgcgggaataaaggaacctacgtgtaggtttttgcatgtaccgtaacgaataagcatcggctaactccgtgccagcagccgcggtaatacggaggatgcgagcgttatccggatttattgggtttaaagggagcgtagacgggtttttaagtcagctgtgaaagtttggggctcaaccttaaaattgcagttgaaactggagaccttgagtacggttgaggcaggcggaattcgtggtgtagcggtgaaatgcttagatatcacgaagaaccccgattgcgaaggcagcctgctaagccgccactgacgttgaggctcgaaagtgcgggtatcaaacaggattagataccctggtagtccgcacggtaaacgatggatactcgctgttggcgatagacagtcagcggccaagcgaaagcgttaagtatcccacctggggagtacgccggcaacggtgaaactcaaaggaattgacgggggcccgcacaagcggaggaacatgtggtttaattcgatgatacgcgaggaaccttacccgggcttgaactgcagtggaattatccggaaacggataagcgagcaatcgccgctgtggaggtgctgcatggttgtcgtcagctcgtgccgtgaggtgtcggcttaagtgccataacgagcgcaacccttgctgccagttactaacaggtcatgctgaggactctggcaggactgccatcgtaagatgcgaggaaggtggggatgacgtcaaatcagcacggcccttacgtccggggctacacacgtgttacaatggggagtacagagggcagctaccgggcgaccggatgcgaatcccgaaagctcctctcagttcggactggagtctgcaacccgactccacgaagctggattcgctagtaatcgcgcatcagccacggcgcggtgaatacgttcccgggccttgtacacaccgcccgtcaagccatgaaagccgggggtacctgaagtacgtaaccgcgaggatcgtcctagggtaaaaccggtaattggggctaagtcgtaacaaggtagccgtaccggaaggtgcggctggaacacctcctttct

SEQ ID NO: 274 - DNA, 1384 bp, Bacteroides dorei
gaggggcagcatggtcttagcttgctaaggctgatggcgaccggcgcacgggtgagtaacacgtatccaacctgccgtctactcttggccagccttctgaaaggaagattaatccaggatggcatcatgagttcacatgtccgcatgattaaaggtattttccggtagacgatggggatgcgttccattagatagtaggcggggtaacggcccacctagtcaacgatggataggggttctgagaggaaggtcccccacattggaactgagacacggtccaaactcctacgggaggcagcagtgaggaatattggtcaatgggcgatggcctgaaccagccaagtagcgtgaaggatgactgccctatgggttgtaaacttcttttataaaggaataaagtcgggtatgcatacccgtttgcatgtactttatgaataaggatcggctaactccgtgccagcagccgcggtaatacggaggatccgagcgttatccggatttattgggtttaaagggagcgtagatggatgtttaagtcagttgtgaaagtttgcggctcaaccgtaaaattgcagttgatactggatgtcttgagtgcagttgaggcaggcggaattcgtggtgtagcggtgaaatgcttagatatcacgaagaactccgattgcgaaggcagcctgctaagctgcaactgacattgaggctcgaaagtgtgggtatcaaacaggattagataccctggtagtccacacggtaaacgatgaatactcgctgtttgcgatatacggcaagcggccaagcgaaagcgttaagtattccacctggggagtacgccggcaacggtgaaactcaaaggaattgacgggggcccgcacaagcggaggaacatgtggtttaattcgatgatacgcgaggaaccttacccgggcttaaattgcactcgaatgatccggaaacggttcagctagcaatagcgagtgtgaaggtgctgcatggttgtcgtcagctcgtgccgtgaggtgtcggcttaagtgccataacgagcgcaacccttgttgtcagttactaacaggtgatgctgaggactctgacaagactgccatcgtaagatgtgaggaaggtggggatgacgtcaaatcagcacggcccttacgtccggggctacacacgtgttacaatggggggtacagagggccgctaccacgcgagtggatgccaatccctaaaacccctctcagttcggactggagtctgcaacccgactccacgaagctggattcgctagtaatcgcgcatcagccacggcgcggtgaatacgttcccgggccttgtacacaccgcccgtcaagccatgggagccgggggtacctgaagtgcgtaaccgcga

SEQ ID NO: 275 - DNA, 1382 bp, Bacteroides eggerthii
tcgaggggcagcatgattgaagctgtgcttcaattgatggcgaccggcgcacgggtgagtaacacgtatccaacctgccgataactcggggatagcctttcgaaagaaagattaatacccgatagtatagtatttccgcatggtttcactattaaagaatttcggttatcgatggggatgcgttccattagatagttggcggggtaacggcccaccaagtcaacgatggataggggttctgagaggaaggtcccccacattggaactgagacacggtccaaactcctacgggaggcagcagtgaggaatattggtcaatggacgagagtctgaaccagccaagtagcgtgaaggatgactgccctatgggttgtaaacttcttttatacgggaataaagtggagtatgcatactcctttgtatgtaccgtatgaataaggatcggctaactccgtgccagcagccgcggtaatacggaggatccgagcgttatccggatttattgggtttaaagggagcgtaggcgggtgcttaagtcagttgtgaaagtttgcggctcaaccgtaaaattgcagttgatactgggcgccttgagtgcagcataggtaggcggaattcgtggtgtagcggtgaaatgcttagatatcacgaagaactccgattgcgaaggcagcttactggactgtaactgacgctgatgctcgaaagtgtgggtatcaaacaggattagataccctggtagtccacacagtaaacgatgaatactcgctgttggcgatacacagtcagcggccaagcgaaagcattaagtattccacctggggagtacgccggcaacggtgaaactcaaaggaattgacgggggcccgcacaagcggaggaacatgtggtttaattcgatgatacgcgaggaaccttacccgggcttaagttgtgaaggtttgcggctcaaccgtaacatcgcactggatactgggcggcttgagtgtagtatacgtaggcggaagccgtgaggtgtcggcttaagtgccataacgagcgcaacccttatctatagttactatcaggtcatgctgaggactctatggagactgccgtcgtaagatgtgaggaaggtggggatgacgtcaaatcagcacggcccttacgtccggggctacacacgtgttacaatggggggtacagaaggcagctacctggcgacaggatgctaatccctaaaacctctctcagttcggattggagtctgcaacccgactccatgaagctggattcgctagtaatcgcgcatcagccacggcgcggtgaatacgttcccgggccttgtacacaccgcccgtcaagccatgaaagccgggggtacctgaagtacgtaaccgcaa

SEQ ID NO: 276 - DNA, 1383 bp, Bacteroides faecis
tcgaggggcagcattccagtttgcttgcaaactggagatggcgaccggcgcacgggtgagtaacacgtatccaacctgccgataactcggggatagcctttcgaaagaaagattaatacccgatggcataatagaaccgcatggtttgattattaaagaatttcggttatcgatggggatgcgttccattaggcagttggtggggtaacggcccaccaaaccttcgatggataggggttctgagaggaaggtcccccacattggaactgagacacggtccaaactcctacgggaggcagcagtgaggaatattggtcaatggacgagagtctgaaccagccaagtagcgtgaaggatgactgccctatgggttgtaaacttcttttatatgggaataaagtgatccacgtgtggatttttgtatgtaccatatgaataaggatcggctaactccgtgccagcagccgcggtaatacggaggatccgagcgttatccggatttattgggtttaaagggagcgtaggtggacagttaagtcagttgtgaaagtttgcggctcaaccgtaaaattgcagttgatactggctgtcttgagtacagtagaggtgggcggaattcgtggtgtagcggtgaaatgcttagatatcacgaagaactccgattgcgaaggcagctcactggactgcaactgacactgatgctcgaaagtgtgggtatcaaacaggattagataccctggtagtccacacagtaaacgatgaatactcgctgtttgcgatatacagtaagcggccaagcgaaagcattaagtattccacctggggagtacgccggcaacggtgaaactcaaaggaattgacgggggcccgcacaagcggaggaacatgtggtttaattcgatgatacgcgaggaaccttacccgggcttaaattgcatttgaatatattggaaacagtatagtcgtaagacgaatgtgactgtgctgcatggttgtcgtcagctcgtgccgtgaggtgtcggcttaagtgccataacgagcgcaacccttatcttcagttactaacaggtcatgctgaggactctggagagactgccgtcgtaagatgtgaggaaggtggggatgacgtcaaatcagcacggcccttacgtccggggctacacacgtgttacaatggggggtacagaaggccgctacctggtgacaggatgctaatcccaaaagcctctctcagttcggatcgaagtctgcaacccgacttcgtgaagctggattcgctagtaatcgcgcatcagccatggcgcggtgaatacgttcccgggccttgtacacaccgcccgtcaagccatgaaagccgggggtacctgaagtacgtaaccgcaa

SEQ ID NO: 277 - DNA, 1306 bp, Bacteroides finegoldii
  modified_base (1029)..(1029): a, c, t, g, unknown or other
  modified_base (1125)..(1125): a, c, t, g, unknown or other
  modified_base (1261)..(1261): a, c, t, g, unknown or other
  modified_base (1281)..(1281): a, c, t, g, unknown or other
aagatggcgaccggcgcacgggtgagtaacacgtgtccaacctgccgataactcagggatagcctttcgaaagaaagattaatacctgatggcataggattgtcgcatgataatcctattaaagaatttcggttatcgatggggatgcgttccattaggcagttggtgaggtaacggctcaccaaaccttcgatggataggggttctgagaggaaggtcccccacattggaactgagacacggtccaaactcctacgggaggcagcagtgaggaatattggtcaatggacgggagtctgaaccagccaagtagcgtgaaggatgactgccctatgggttgtaaacttcttttatacgggaataaagtgatccacgggtttttgtatgtaccgtatgaataaggatcggctaactccgtgccagcagccgcggtaatacggaggatccgagcgttatccggatttttgggtttaaagggagcgtagtggattgttaagtcagttgtgaaagtttgcggctcaaccgtaaaattgcagttgatactggcagtcttgatacagtaaggtgggcggaattcgtggtgtacggtgaaatgcttaatatcacgaaaactccgattgcgaaggcagctcactggactgcaactgacactgatgctcgaaagtgtgggtatcaaacaggattaataccctggtagtccacacagtaaacgatgaatactcgctgtttgcgatatacggtaagcggccaagcgaaagcgttaagtattccacctggggagtacgccggcaacggtgaaactcagaggaattgacgggggcccgcacaagcggaggaacatgtggtttaattgtatgatactcgaggaaccttacccgggcttaaattacctttgaattatctggaaacaggttaaccgtaaggcacagtgaaggttgctgcatggttgtcgtcagctcgtgccgtgaggtgtcggcttaagttccataacgagcgcaacccttatcttcagttactaacaggtcatgntgaggactctggagagactgccgtcgtaagatgtgaggaaggtggggatgacgtcaaatcagcacggcccttacgtccggggctacacacgtgttncaatggggggtacagaaggcagctacctggtgacaggatgctaatcccaaaaacctctctcagttcggatcgaagtctgcaacccgacttcgtgaagctggattcgttagtaatcgcgcatcacccatggcgcggngaatacgttcccgggccttnccaccccgcccctcaagccatgaaa

SEQ ID NO: 278 - DNA, 1529 bp, Bacteroides fluxus
ttacaatgaagagtttgatcctggctcaggatgaacgctagctacaggcttaacacatgcaagtcgaggggcagcatttttatagcaatataaaagatggcgaccggcgcacgggtgagtaacacgtatccaacctgccgataactcggggataacccttcgaaagaaggcctaatacccgatggcatatcccttccgcctggttgggatattaaagaacttcggttatcgatggggatgcgttccattagcttgttggcggggtaacggcccaccaaggcttcgatggataggggttctgagaggaaggtcccccacattggaactgagacacggtccaaactcctacgggaggcagcagtgaggaatattggtcaatggacgagagtctgaaccagccaagtagcgtgaaggatgaaggtcctatggattgtaaacttcttttatacgggaataaagtgcagtatgcatactgttttgtatgtaccgtatgaataaggatcggctaactccgtgccagcagccgcggtaatacggaggatccgagcgttatccggatttattgggtttaaagggagcgtaggcggatgcttaagtcagttgtgaaagtttgcggctcaaccgtaaaattgcagttgatactgggcgtcttgagtacagtagaggcaggcggaattcgtggtgtagcggtgaaatgcttagatatcacgaagaactccgattgcgaaggcagcctgctggactgtcactgacgctgatgctcgaaagtgtgggtatcaaacaggattagataccctggtagtccacacagtaaacgatgaatactcgctgttggcgatacacagtcagcggccaagcgaaagcgttaagtattccacctggggagtacgccggcaacggtgaaactcaaaggaattgacgggggcccgcacaagcggaggaacatgtggtttaattcgatgatacgcgaggaaccttacccgggcttgaattgcatatgagttatccggagacggataagccgcaaggcatatgtgaaggtgctgcatggttgtcgtcagctcgtgccgtgaggtgtcggcttaagtgccataacgagcgcaacccttatcgatagttaccatcaggtcatgctggggactctgtcgagactgccgtcgtaagatgcgaggaaggtggggatgacgtcaaatcagcacggcccttacgtccggggccacacacgtgttacaatggggggtacagaaggccgctacacagcgatgtgatgccaatccccaaaacccctctcagttcggattggagtctgcaacccgactccatgaagctggattcgctagtaatcgcgcatcagccacggcgcggtgaatacgttcccgggccttgtacacaccgcccgtcaagccatgaaagccgggggtacctgaagtgcgtaaccgcgaggagcgccctagggtaaaactggtgattggggctaagtcgtaacaaggtagccgtaccggaaggtgcggctggaacacctcctttct

SEQ ID NO: 279 - DNA, 1383 bp, Bacteroides fragilis
  modified_base (23)..(23): a, c, t, g, unknown or other
tcgaggggcatcaggaagaaagnttgctttctttgctggcgaccggcgcacgggtgagtaacacgtatccaacctgccctttactcggggatagcctttcgaaagaaagattaatacccgatggcataatgattccgcatggtttcattattaaaggattccggtaaaggatggggatgcgttccattaggttgttggtgaggtaacggctcaccaagccttcgatggataggggttctgagaggaaggtcccccacattggaactgagacacggtccaaactcctacgggaggcagcagtgaggaatattggtcaatgggcgctagcctgaaccagccaagtagcgtgaaggatgaaggctctatgggtcgtaaacttcttttatataagaataaagtgcagtatgtatactgttttgtatgtattatatgaataaggatcggctaactccgtgccagcagccgcggtaatacggaggatccgagcgttatccggatttattgggtttaaagggagcgtaggtggactggtaagtcagttgtgaaagtttgcggctcaaccgtaaaattgcagttgatactgtcagtcttgagtacagtagaggtgggcggaattcgtggtgtagcggtgaaatgcttagatatcacgaagaactccgattgcgaaggcagctcactggactgcaactgacactgatgctcgaaagtgtgggtatcaaacaggattagataccctggtagtccacacagtaaacgatgaatactcgctgtttgcgatatacagtaagcggccaagcgaaagcattaagtattccacctggggagtacgccggcaacggtgaaactcaaaggaattgacgggggcccgcacaagcggaggaacatgtggtttaattcgatgatacgcgaggaaccttacccgggcttaaattgcagtggtatgatgtgggaacatgtcagtgagcaatcaccgctgtgaaggtgctgcatggttgtcgtcagctcgtgccgtgaggtgtcggcttaagtgccataacgagcgcaacccttatctttagttactaacaggttatgctgaggactctagagagactgccgtcgtaagatgtgaggaaggtggggatgacgtcaaatcagcacggcccttacgtccggggctacacacgtgttacaatggggggtacagaaggcagctagcgggtgaccgtatgctaatcccaaaagcctctctcagttcggatcgaagtctgcaacccgacttcgtgaagctggattcgctagtaatcgcgcatcagccacggcgcggtgaatacgttcccgggccttgtacacaccgcccgtcaagccatgggagccgggggtacctgaagtacgtaaccgcaa

SEQ ID NO: 280 - DNA, 1431 bp, Bacteroides galacturonicus
  modified_base (786)..(786): a, c, t, g, unknown or other
  modified_base (1402)..(1402): a, c, t, g, unknown or other
tgcaagtcgaacgaagcatttaagacagattacttcggtttgaagtcttttatgactgagtggcggacgggtgagtaacgcgtgggtaacctgcctcatacagggggatagcagctggaaacggctggtaataccgcataagcgcacagtaccacatggtacagtgtgaaaaactccggtggtatgagatggacccgcgtctgattagcttgttggcggggtaacggcccaccaaggcgacgatcagtagccgacctgagagggtgaccggccacattgggactgagacacggcccagactcctacgggaggcagcagtggggaatattgcacaatggaggaaactctgatgcagcgacgccgcgtgagtgaagaagtagttcgctatgtaaagctctatcagcagggaagatagtgacggtacctgactaagaagctccggctaaatacgtgccagcagccgcggtaatacgtatggagcaagcgttatccggatttactgggtgtaaagggagtgtaggtggccaggcaagtcagaagtgaaagcccggggctcaaccccgggactgcttttgaaactgcagggctagagtgcaggaggggcaagtggaattcctagtgtagcggtgaaatgcgtagatattaggaggaacaccagtggcgaaggcggcttgctggactgtaactgacactgaggctcgaaagcgtggggagcaaacaggattagataccctggtagtccacgccgtaaacgatgaatactaggtgtcggggcacataagtgcnccggtgccgcagcaaacgcaataagtattccacctggggagtacgttcgcaagaatgaaactcaaaggaattgacggggacccgcacaagcggtggagcatgtggtttaattcgaagcaacgcgaagaaccttaccaagtcttgacatcctcttgaccggtcagtaatgtgaccttttcttcggaacaagagtgacaggtggtgcatggttgtcgtcagctcgtgtcgtgagatgttgggttaagtcccgcaacgagcgcaacccttatccttagtagccagcagtccggctgggcactctagggagactgccagggataacctggaggaaggtggggatgacgtcaaatcatcatgccccttatgacttgggctacacacgtgctacaatggcgtaaacaaagtgaagcgagagtgtgagcttaagcaaatcacaaaaataacgtctcagttcggattgtagtctgcaactcgactacatgaagctggaatcgctagtaatcgcagatcagaatgctgcggtgaatacgttcccgggtcttgtacacaccgcccgtcacaccatgggagtcggaaatgcccgaagtcggtgacctaacgtaagaaggagccgccnaaggcaggtctgataactggggtgaagtc

SEQ ID NO: 281 - DNA, 1513 bp, Bacteroides helcogenes
agagtttgatcctggctcaggatgaacgctagctacaggcttaacacatgcaagtcgaggggcagcattgtcatagcaatatgacagatggcgaccggcgcacgggtgagtaacacgtatccaacctgccttccactcgggaatagcctttcgaaagaaagattaatgcccgatggcactgaaagaggtcatcctttttcagttaaagaatttcggtggaagatggggatgcgttccattagcttgttggcggggtaacggcccaccaaggcatcgatggataggggttctgagaggaaggtcccccacattggaactgagacacggtccaaactcctacgggaggcagcagtgaggaatattggtcaatgggcgggagcctgaaccagccaagtagcgtgaaggatgactgccctatgggttgtaaacttcttttataagggaataaaacgggccacgtgtggccttttgcatgtaccttatgaataaggatcggctaactccgtgccagcagccgcggtaatacggaggatccgagcgttatccggatttattgggtttaaagggagcgcagacggggtcttaagtcagttgtgaaagtttgcggctcaaccgtaaaattgcagttgatactggggctcttgagtgcagtataggcaggcggaattcgtggtgtagcggtgaaatgcttagatatcacgaagaactccgattgcgaaggcagcctgctggactgtaactgacgttcatgctcgaaagtgcgggtatcaaacaggattagataccctggtagtccgcacagtaaacgatgaatactcgctgttggcgatacacagtcagcggccaagcgaaagcgttaagtattccacctggggagtacgccggcaacggtgaaactcaaaggaattgacgggggcccgcacaagcggaggaacatgtggtttaattcgatgatacgcgaggaaccttacccgggcttgaattgctaatgaatatggcggaaacgtcatagccgcaaggcattagtgaaggtgctgcatggttgtcgtcagctcgtgccgtgaggtgtcggcttaagtgccataacgagcgcaacccttatctatagttaccatcaggcaatgctggggactctatggagactgccgtcgtaagatgtgaggaaggttgggatgacgtcaaatcagcacggcccttacgtccggggctacacacgtgttacaatggggggtacagaaggcagctacacagcgatgtgatgctaatcccaaaaacctctctcagttcggactggagtctgcaacccgactccacgaagctggattcgctagtaatcgcgcatcagccacggcgcggtgaatacgttcccgggccttgtacacaccgcccgtcaagccatgaaagccgggggtacctgaagtgcgtaaccgcgaggagcgccctagggtaaaactggtgattggggctaagtcgtaacaaggtagccgtaccggaaggtgcggctggaacacct

SEQ ID NO: 282 - DNA, 1262 bp, Bacteroides heparinolyticus
tcaggatgaacgctagctacaggcttaacacatgcaagtcgagggaccggcgcacgggtgagtaacacgtatccaaccttccggtaactccggtatagcctttcgaaagaaagattaatcccggatagttaaagccggttaccgatggggatgcgttccattaggcagttggcggggtaacggcccaccaaacctacgatggataggggttctgagaggaaggtcccccacattggaactgagacacggtccaaactcctacgggaggcagcagtgaggaatattggtcaatgggcggaagcctgaaccagccaagtagcgtgaaggatgactgcctatgggttgtaaacttcttttataagggaatatgcatgtaccttatgaataaggatcggctaactccgtgccagcagccgcggtaatacggaggatccgagcgttatccggatttattgggtttaaagggagcgtaggcgggcgcttaagtcagctgtgaaagtttggggctcaaccttaaaattgcagttgatactgggtgccttgagtgcagtataggcaggcggaattcgtggtgtagcggtgaaatgcttagatatcacgaagaactcctattgcgaaggcagcttgctggagtgactgacgctgatgctcgaaagtgtgggtatcaaacaggattagataccctggtagtccacacagtaaacgatgaatactcgctgtttgcgtgcaagcggccaagcgaaagcgttaagtattccacctggggagtacgccggcaacggtgaaactcaaaggaattgacgggggcccgcacaagcggaggaacatgtggtttaattcgatgatacgcgaggaaccttacccgggcttgaattgtgaaggtgctgcatggttgtcgtcagctcgtgccgtgaggtgtcggcttaagtgccataacgagcgcaacccttatccacagttaccatcagctggggactctgtggagactgccgtcgtaagatggaggaagggggggatgacgtcaaatcagcacggcccttacgtccggggctacacacgtgttacaatggggggcagcaggcagctcggcggcgacgcccggccaatccctcccctctcagttcggatggagtctgcaacccgactccagaagctggattcgctagtaatcgcgcatcagccacggcgcggtgaatacgttcccgggccttgtacacaccgcccgtcaagccatgaaagccgggggtacctgaagtgcgtag

SEQ ID NO: 283 - DNA, 1301 bp, Bacteroides intestinalis
ttattccgggatagcctttcgaaagaaagattaatactggatagcataacgagaaggcatcttcttgttattaaagaatttcgataatcgatggggatgcgttccattagtttgttggcggggtaacggcccaccaagacatcgatggataggggttctgagaggaaggtcccccacattggaactgagacacggtccaaactcctacgggaggcagcagtgaggaatattggtcaatggacgagagtctgaaccagccaagtagcgtgaaggatgactgccctatgggttgtaaacttcttttatatgggaataaagtgcagtatgtatactgttttgtatgtaccatacgaataaggatcggctaactccgtgccagcagccgcggtaatacggaggatccgagcgttatccggatttattgggtttaaagggagcgtaggcggattattaagtcagttgtgaaagtttgcggctcaaccgtaaaattgcagttgatactggtagtcttgagtgcagcagaggtaggcggaattcgtggtgtagcggtgaaatgcttagatatcacgaagaactccgattgcgaaggcagcttactggactgtaactgacgctgatgctcgaaagtgtgggtatcaaacaggattagataccctggtagtccacacagtaaacgatgaatactcgctgtttgcgatatacagcaagcggccaagcgaaagcattaagtattccacctggggagtacgccggcaacggtgaaactcaaaggaattgacgggggcccgcacaagcggaggaacatgtggtttaattcgatgatacgcgaggaaccttacccgggcttaaattgcaactgacggatttggaaacagatcttccttcgggcagttgtgaattgcgaaggcggtttactgcagctcgtgccgtgaggtgtcggcttaagtgccataacgagcgcaacccttatctttagttactaacaggtcatgctgaggactctagagagactgccgtcgtaagatgtgaggaaggtggggatgacgtcaaatcagcacggcccttacgtccggggctacacacgtgttacaatggggggtacagaaggcagctacacagcgatgtgatgctaatcccaaaagcctctctcagttcggattggagtctgcaacccgactccatgaagctggattcgctagtaatcgcgcatcagccacggcgcggtgaatacgttcccgggccttgtacacaccgcccgtcaagccatgaaagccgggggtacctgaagtacgtaaccgcaa

SEQ ID NO: 284 - DNA, 1281 bp, Bacteroides massiliensis
catgcaagtcgagggaccggcgcacgggtgagtaacgcgtatccaacctgccttacactcttggacagccttctgaaagggagattaatacaagatgtttaaagccggtgtaagatggggatgcgttccattagatagtaggcggggtaacggcccacctagtcttcgatggataggggttctgagaggaaggtcccccacattggaactgagacacggtccaaactcctacgggaggcagcagtgaggaatattggtcaatggacgagagtctgaaccagccaagtagcgtgaaggatgaaggtttatggattgtaaacttcttttatacgggaatatgcatgtaccgtatgaataaggatcggctaactccgtgccagcagccgcggtaatacggaggatccgagcgttatccggatttattgggtttaaagggagcgtagatgggttgttaagtcagttgtgaaagtttgcggctcaaccgtaaaattgcaattgatactggcagtcttgagtacagttgaggtaggcggaattcgtggtgtagcggtgaaatgcttagatatcacgaagaactccgattgcgaaggcagcttactaacctgactgacattgatgctcgaaagtgtgggtatcaaacaggattagataccctggtagtccacacggtaaacgatgaatactcgctgtaggcgagtctgcggccaagcgaaagcattaagtattccacctggggagtacgccggcaacggtgaaactcaaaggaattgacgggggcccgcacaagcggaggaacatgtggtttaattcgatgatacgcgaggaaccttacccgggcttaaattgtgaaggtgctgcatggttgtcgtcagctcgtgccgtgaggtgtcggcttaagtgccataacgagcgcaacccttgccgatagttactaacagctgaggactctgtcgggactgccatcgtaagatggaggaaggtggggatgacgtcaaatcagcacggcccttacgtccggggctacacacgtgttacaatggggggcagagggctgctaccacgcaagtggatgccaatcccacctctctcagttcggatgaagtctgcaacccgacttcagaagctggattcgctagtaatcgcgcatcagccacggcgcggtgaatacgttcccgggccttgtacacaccgcccgtcaagccatgggagccgggggtacctgaagtgcgtagcgccctagggtaaaactggtgactggggctaagtcgtaacaaggtaacc

SEQ ID NO: 285 - DNA, 1377 bp, Bacteroides nordii
  modified_base (12)..(13): a, c, t, g, unknown or other
tcgaggggcagnnggatgtagcaatacattgctggcgaccggcgcacgggtgagtaacacgtatccaacctgccttttactcggggataggctttcgaaagaaagattaatacccgatggtataatatttccgcatgggattattattaaagaatttcggtaaaagatggggatgcgttccattaggcagttggcggggtaacggcccaccaaaccttcgatggataggggttctgagaggaaggtcccccacattggaactgagacacggtccaaactcctacgggaggcagcagtgaggaatattggtcaatgggcgaaagcctgaaccagccaagtagcgtgaaggatgactgccctatgggttgtaaacttcttttataggggaataaaatgagccacgtgtggctttttgtatgtaccctatgaataaggatcggctaactccgtgccagcagccgcggtaatacggaggatccgagcgttatccggatttattgggtttaaagggagcgtaggtggacatgtaagtcagttgtgaaagtttgcggctcaaccgtaaaattgcagttgatactgtgtgtcttgagtacagtagaggtgggcggaattcgtggtgtagcggtgaaatgcttagatatcacgaagaactccgattgcgaaggcagctcactggactgttactgacactgaggctcgaaagtgtgggtatcaaacaggattagataccctggtagtccacacagtaaacgatgaatactcgctgtttgcgatatacagcaagcggccaagcgaaagcattaagtattccacctggggagtacgccggcaacggtgaaactcaaaggaattgacgggggcccgcacaagcggaggaacatgtggtttaattcgatgatacgcgaggaaccttacccgggcttaaattgcatttgaatgttggggaaacccaacagccgtaaggcaaatgtgagcaggctgcatggtggtcgtcagctcgtgccgtgaggtgtcggcttaagtgccataacgagcgcaacccttatctttagttactaacaggttatgctgaggactctagagagactgccgtcgtaagatgtgaggaaggtggggatgacgtcaaatcagcacggcccttacgtccggggctacacacgtgttacaatggggggtacagaaggcagctacctggtgacaggatgctaatcccaaaagcctctctcagttcggatcgaagtctgcaacccgacttcgtgaagctggattcgctagtaatcgcgcatcagccacggcgcggtgaatacgttcccgggccttgtacacaccgcccgtcaagccatgggagccgggggtacctgaagtacgtaaccgcaa

SEQ ID NO: 286 - DNA, 1485 bp, Bacteroides oleiciplenus
agagtttgatcctggctcaggatgaacgctagctacaggcttaacacatgcaagtcgaggggcatcaggatgtagcaatacattgctggcgaccggcgcacgggtgagtaacacgtatccaacctaccgattattccgggatagcctttcgaaagaaagattaatactggatagtataacgagaaggcatctttttgttattaaagaatttcgataatcgatggggatgcgttccattagtttgttggcggggtaacggcccaccaagacttcgatggataggggttctgagaggaaggtcccccacattggaactgagacacggtccaaactcctacgggaggcagcagtgaggaatattggtcaatgggcgagagcctgaaccagccaagtagcgtgaaggatgactgccctatgggttgtaaacttcttttatatgggaataaagtgcagtatgtatactgttttgtatgtaccatatgaataaggatcggctaactccgtgccagcagccgcggtaatacggaggatccgagcgttatccggatttattgggtttaaagggagcgtaggcggaagcttaagtcagttgtgaaagtttgcggctcaaccgtaaaattgcagttgatactgggtttcttgagtgcagtagaggtaggcggaattcgtggtgtagcggtgaaatgcttagatatcacgaagaactccgattgcgaaggcagcttactggactgtaactgacgctgatgctcgaaagtgtgggtatcaaacaggattagataccctggtagtccacacagtaaacgatgaatactcgctgtttgcgatatacagcaagcggccaagcgaaagcattaagtattccacctggggagtacgccggcaacggtgaaactcaaaggaattgacgggggcccgcacaagcggaggaacatgtggtttaattcgatgatacgcgaggaaccttacccgggcttaaattgcaactgacgtaggtggaaacatctattccttcgggcagttgtgaaggtgctgcatggttgtcgtcagctcgtgccgtgaggtgtcggcttaagtgccataacgagcgcaacccttatctttagttactaacaggttatgctgaggactctagagagactgccgtcgtaagatgtgaggaaggtggggatgacgtcaaatcagcacggcccttacgtccggggctacacacgtgttacaatggggggtacagaaggcagctacacggcgacgtgatgctaatcccaaaaacctctctcagttcggattggagtctgcaactcgactccatgaagctggattcgctagtaatcgcgcatcagccacggcgcggtgaatacgttcccgggccttgtacacaccgcccgtcaagccatgaaagccgggggtacctgaagtccgtaaccgttaaggagcggcctagggtaaaactggtaattggggctaagtcgtaacaaggtaacc

SEQ ID NO: 287 - DNA, 1381 bp, Bacteroides ovatus
  modified_base (25)..(25): a, c, t, g, unknown or other
tcgaggggcagcattttagtttgcnttgcaaactaaagatggcgaccggcgcacgggtgagtaacacgtatccaacctgccgataactcggggatagcctttcgaaagaaagattaatatccgatagtatattaaaaccgcatggttttactattaaagaatttcggttatcgatggggatgcgttccattagtttgttggcggggtaacggcccaccaagactacgatggataggggttctgagaggaaggtcccccacattggaactgagacacggtccaaactcctacgggaggcagcagtgaggaatattggtcaatggacgagagtctgaaccagccaagtagcgtgaaggatgactgccctatgggttgtaaacttcttttatatgggaataaagtattccacgtgtggaattttgtatgtaccatatgaataaggatcggctaactccgtgccagcagccgcggtaatacggagccgagcgttatccggatttattgggtttaaagggagcgtaggtggattgttaagtcagttgtgaaagtttgcggctcaaccgtaaaattgcagttgaaactggcagtcttgagtacagtagaggtgggcggaattcgtggtgtagcggtgaaatgcttagatatcacgaagaactccgattgcgaaggcagctcactagactgcaactgacactgatgctcgaaagtgtgggtatcaaacaggattagataccctggtagtccacacagtaaacgatgaatactcgctgtttgcgatatacagtaagcggccaagcgaaagcattaagtattccacctggggagtacgccggcaacggtgaaactcaaaggaattgacgggggcccgcacaagcggaggaacatgtggtttaattcgatgatacgcgaggaaccttacccgggcttaaattgcatttgaataatctggaaacaggttagccgcaaggcaaatgtgaattggctgcatggttgtcgtcagctcgtgccgtgaggtgtcggcttaagtgccataacgagcgcaacccttatctttagttactaacaggttatgctgaggactctagagagactgccgtcgtaagatgtgaggaaggtggggatgacgtcaaatcagcacggcccttacgtccggggctacacacgtgttacaatggggggtacagaaggcagctacctggtgacaggatgctaatcccaaaaacctctctcagttcggatcgaagtctgcaacccgacttcgtgaagctggattcgctagtaatcgcgcatcagccatggcgcggtgaatacgttcccgggccttgtacacaccgcccgtcaagccatgaaagccgggggtacctgaagtacgtaaccgcaa

SEQ ID NO: 288 - DNA, 1531 bp, Bacteroides pectinophilus
atgagagtttgatcctggctcaggatgaacgctggcggcgtgcttaacacatgcaagtcgaacgaagcacttaatgagatttcttcggattgattattttgtgactgagtggcggacgggtgagtaacgcgtgggtaacctgccccagaccgggggataacagtcggaaacgactgctaataccgcataagcgcacagtgccgcatggcacagtgtgaaaaactccggtggtctgggatggacccgcgtccgattagttagttggcggggtaacggcccaccaagaccgcgatcggtagccgacctgagagggtgaccggccacattgggactgagacacggcccagactcctacgggaggcagcagtggggaatattgcacaatggaggaaactctgatgcagcgacgccgcgtgagcgaagaagtatttcggtatgtaaagctctgtcagcagggaagataatgacggtacctgaccaagaagccccggctaactacgtgccagcagccgcggtaatacgtagggggcaagcgttatccggatttactgggtgtaaagggagtgtaggtggctgtgcaagtcaggagtgaaagcccggggctcaaccccgggactgctcttgaaactgcgcagcttgagtgcaggaggggcaggcggaattcctagtgtagcggtgaaatgcgtagatattaggaggaacaccggtggcgaaggcggcctgctggactgtaactgacactgaggctcgaaagcgtggggagcaaacaggattagataccctggtagtccacgccgtaaacgatgaatactaggtgtcggggctcataagagcttcggtgccgcagcaaacgcaataagtattccacctggggagtacgttcgcaagaatgaaactcaaaggaattgacggggacccgcacaagcggtggagcatgtggtttaattcgaagcaacgcgaagaaccttaccaggtcttgacatcctcctgaacggaaggtaatgcttccggtccttcgggacaggagagacaggtggtgcatggttgtcgtcagctcgtgtcgtgagatgttgggttaagtcccgcaacgagcgcaacccctatcctcagtagccagcagtccggctgggcactctgtggagactgccggggataacccggaggaaggtggggatgacgtcaaatcatcatgccccttatgacctgggctacacacgtgctacaatggcgctcaacaaagggaagcaatgccgcgaggccgagcaaatcccaaaaacagcgtcccagttcggactgtagtctgcaacccgactacacgaagctggaatcgctagtaatcgcgaatcagaatgtcgcggtgaatacgttcccgggtcttgtacacaccgcccgtcacaccatgggagtcggaaatgcccgaagtcagtgacccaaccgcaaggagggagctgccgaaggcaggtctggtaactggggtgaagtcgtaacaaggtagccgtatcggaaggtgcggctggatcacctcctttct

SEQ ID NO: 289 - DNA, 1326 bp, Bacteroides plebeius
gagtttgatcctggctcaggatgaacgctagctacaggcttaacacatgcaagtcgagggaccggcgcacgggtgagtaacgcgtatccaaccttccgtacactcagggatagcctttcgaaagaaagattaatacctgatggttaaagtcggtgtacgatggggatgcgttccattaggtagtaggcggggtaacggcccacctagcctacgatggataggggttctgagaggaaggtcccccacattggaactgagacacggtccaaactcctacgggaggcagcagtgaggaatattggtcaatggacgagagtctgaaccagccaagtagcgtgaaggatgaaggtctacggattgtaaacttcttttataagggaatatgtatgtaccttatgaataagcatcggctaactccgtgccagcagccgcggtaatacggaggatgcgagcgttatccggatttattgggtttaaagggagcgcagacgggtcgttaagtcagctgtgaaagtttggggctcaaccttaaaattgcagttgatactggcgtccttgagtgcggttgaggtgtgcggaattcgtggtgtagcggtgaaatgcttagatatcacgaagaactccgattgcgaaggcagcacactaagccgactgacgttcatgctcgaaagtgtgggtatcaaacaggattagataccctggtagtccacacggtaaacgatggatactcgctgttggcgagtcagcggcttagcgaaagcgttaagtatcccacctggggagtacgccggcaacggtgaaactcaaaggaattgacgggggcccgcacaagcggaggaacatgtggtttaattcgatgatacgcgaggaaccttacccgggcttaaattgtgaaggtgctgcatggttgtcgtcagctcgtgccgtgaggtgtcggcttaagtgccataacgagcgcaaccctcgccgccagttactaacagctgaggactctggcgggactgccatcgtaagatggaggaaggtggggatgacgtcaaatcagcacggcccttacgtccggggctacacacgtgttacaatgggcggcagaaggcagctacctggcgacaggatgccaatcccgccgctctcagttcggatggagtctgcaacccgactccagaagctggattcgctagtaatcgcgcatcagccacggcgcggtgaatacgttcccgggccttgtacacaccgcccgtcaagccatgaaagccgggggtacctgaagtgcgtagcgccctagggtaaaaccggtaattggggctaagtcgtaacaaggtaacc

SEQ ID NO: 290 - DNA, 1458 bp, Bacteroides pyogenes
ttagagtttgatcctggctcaggatgaacgctagctacaggcttaacacatgcaagtcgaggggcagcatgaatattggcttgccaatatttgatggcgaccggcgcacgggtgagtaacacgtatccaaccttccggttactcggggataggctttcgaaagaaagattaatacccgatgttgtgtatctttctcctgattgatacgccaaaggattccggtaaccgatggggatgcgttccattaggcagttggcggggtaacggcccaccaaaccttcgatggataggggttctgagaggaaggtcccccacattggaactgagacacggtccaaactcctacgggaggcagcagtgaggaatattggtcaatggacggaagtctgaaccagccaagtagcgtgaaggatgactgccctctgggttgtaaacttcttttatacgggaataacatgaggtacgggtaccttattgcatgtaccgttatgaataagcatcggctaactccgtgccagcagccgcggtaatacggaggatgcgagcgttatccggatttattgggtttaaagggagcgtaggtgggatattaagtcagctgtgaaagtttggggctcaaccttaaaattgcagttgatactggttttcttgagtacggtataggtgggcggaattcgtggtgtagcggtgaaatgcttagatatcacgaagaactcctattgcgaaggcagctcactggaccggcactgacactgatgctcgaaagtgcgggtatcaaacaggattagataccctggtagtccgcacagtaaacgatgaatactcgctgtttgcgatacacagtaagcggccaagcgaaagcgttaagtattccacctggggagtacgccggcaacggtgaaactcaaaggaattgacgggggcccgcacaagcggaggaacatgtggtttaattcgatgatacgcgaggaaccttacccgggcttaaattgcgctggcttttaccggaaacggtattttcttcggaccagcgtgaaggtgctgcatggttgtcgtcagctcgtgccgtgaggtgtcggcttaagtgccataacgagcgcaacccttatctttagttgccatcaggttttgctggggactctaaagagactgccgtcgtaagatgcgaggaaggtggggatgacgtcaaatcagcacggcccttacgtccggggctacacacgtgttacaatggggagcacagcaggttgctacacggcgacgtgatgccaatccgtaaaactcctctcagttcggatcgaagtctgcaacccgacttcgtgaagctggattcgctagtaatcgcgcatcagccacggcgcggtgaatacgttcccgggccttgtacacaccgcccgtcaagccatgaaagccgggggtacctgaagtacgtaaccgcaaggatcgtccttagtaaac

SEQ ID NO: 291 - DNA, 1521 bp, Bacteroides salanitronis
agagtttgatcctggctcaggatgaacgctagctacaggcttaacacatgcaagtcgcggggcagcgggagcctagcttgctaggcttgccggcgaccggcgcacgggtgagtaacgcgtatccgaccttccgcacactccgggccagccttccgaaaggaagattaatcccggatggtatggcgtggctgcatggcagcgccattaaaggagcgatccggtgtgcgatgggggtgcgttccattagcttgttggcggggtaacggcccaccaaggcgacgatggataggggttctgagaggaaggccccccacattgggactgagacacggcccaaaactcctacgggaggcagcagtgaggaatattggtcaatgggcgagagcctgaaccagccaagtagcgtggaggatgaccgccctacgggttgtaaactccttttataagggaataaaacctcccacgtgtgggagcttgtatgtaccttatgaataagcatcggctaactccgtgccagcagccgcggtaatacggaggatgcgagcgttatccggatttattgggtttaaagggagcgtagacgggatgtcaagtcagctgtgaaagtttgcggctcaaccgtaaaattgcagttgaaactggctttcttgagtgcgttcgaggcaggcggaattcgtggtgtagcggtgaaatgcatagatatcacgaagaaccccgattgcgaaggcagcctgctaggccgcaactgacgttgatgctcgaaagtgcgggtatcaaacaggattagataccctggtagtccgcacggtaaacgatgggcactcgctgccggcgatatactgccggcggcttagcgaaagcgttaagtgccccacctggggagtacgccggcaacggtgaaactcaaaggaattgacgggggcccgcacaagcggaggaacatgtggtttaattcgatgatacgcgaggaaccttacccgggcttgaactgcggatgcattgcgcggaaacgcgcaagtgggcaaccacatccgtggaggtgctgcatggttgtcgtcagctcgtgccgtgaggtgtcggcttaagtgccataacgagcgcaaccccttccgccagttgccatcaggttatgctggggactctggcggtactgccatcgtaagatgcgaggaaggtggggatgacgtcaaatcagcacggcccttacgtccggggctacacacgtgttacaatggggggtacagagggccgccatccggcgacggagcgccaatccctaaagcccctcccagttcggactggagcctgcaacccggctccacgaagctggattcgctagtaatcgcgcatcagccacggcgcggtgaatacgttcccgggccttgtacacaccgcccgtcaagccatgaaagccgggggtgcctgaagtgcgtaaccgaaaggggcgccctagggtaaaaccggtgattggggctaagtcgtaacaaggtagccgtaccggaaggtgcggctggaacacct

SEQ ID NO: 292 - DNA, 970 bp, Bacteroides salyersiae
  modified_base (946)..(946): a, c, t, g, unknown or other
  modified_base (948)..(948): a, c, t, g, unknown or other
tcgaggggcatcagggtgtagcaatacgccgctggcgaccggcgcacgggtgagtaacacgtatccaacctgccctttactcggggatagcctttcgaaagaaagattaatacccgatggtataacatgacctcctggttttgttattaaagaatttcggtagaggatggggatgcgttccattaggcagttggcggggtaacggcccaccaaaccttcgatggataggggttctgagaggaaggtcccccacattggaactgagacacggtccaaactcctacgggaggcagcagtgaggaatattggtcaatgggcgagagcctgaaccagccaagtagcgtgaaggatgaccgccctatgggttgtaaacttcttttatatgggaataaagtctgccacgtgtggcattttgtatgtaccatatgaataaggatcggctaactccgtgccagcagccgcggtaatacggaggatccgagcgttatccggatttattgggtttaaagggagcgtaggtggacatgtaagtcagttgtgaaagtttgcggctcaaccgtaaaattgcagttgatactgcgtgtcttgagtacagtagaggtgggcggaattcgtggtgtagcggtgaaatgcttagatatcacgaagaactccgattgcgaaggcagctcactggactgcaactgacactgatgctcgaaagtgtgggtatcaaacaggattagataccctggtagtccacacagtaaacgatgaatactcgctgtttgcgatatacagtaagcggccaagcgaaagcattaagtattccacctggggagtacgccggcaacggtgaaactcaaaggaattgacgggggcccgcacaagcggaggaacatgtggtttaattcgatgatacgcgaggaaccttacccgggcttaaattgcaaatgaatatgccggnancggcatagccgcaaggcatttg

SEQ ID NO: 293 - DNA, 1533 bp, Bacteroides sp.
  1_1_14
ttacaatgaagagtttgatcctggctcaggatgaacgctagctacaggcttaacacatgcaagtcgaggggcagcatttcagtttgcttgcaaactggagatggcgaccggcgcacgggtgagtaacacgtatccaacctgccgataactcggggatagcctttcgaaagaaagattaatacccgatggtataatcagaccgcatggtcttgttattaaagaatttcggttatcgatggggatgcgttccattaggcagttggtgaggtaacggctcaccaaaccttcgatggataggggttctgagaggaaggtcccccacattggaactgagacacggtccaaactcctacgggaggcagcagtgaggaatattggtcaatgggcgcaggcctgaaccagccaagtagcgtgaaggatgactgccctatgggttgtaaacttcttttatatgggaataaagttttccacgtgtggaattttgtatgtaccatatgaataaggatcggctaactccgtgccagcagccgcggtaatacggaggatccgagcgttatccggatttattgggtttaaagggagcgtaggtggacagttaagtcagttgtgaaagtttgcggctcaaccgtaaaattgcagttgatactggctgtcttgagtacagtagaggtgggcggaattcgtggtgtagcggtgaaatgcttagatatcacgaagaactccgattgcgaaggcagctcactggactgcaactgacactgatgctcgaaagtgtgggtatcaaacaggattagataccctggtagtccacacagtaaacgatgaatactcgctgtttgcgatatacagtaagcggccaagcgaaagcattaagtattccacctggggagtacgccggcaacggtgaaactcaaaggaattgacgggggcccgcacaagcggaggaacatgtggtttaattcgatgatacgcgaggaaccttacccgggcttaaattgcatttgaatatattggaaacagtatagccgtaaggcaaatgtgaaggtgctgcatggttgtcgtcagctcgtgccgtgaggtgtcggcttaagtgccataacgagcgcaacccttatctttagttactaacaggtcatgctgaggactctagagagactgccgtcgtaagatgtgaggaaggtggggatgacgtcaaatcagcacggcccttacgtccggggctacacacgtgttacaatggggggtacagaaggcagctacctggtgacaggatgctaatcccaaaagcctctctcagttcggatcgaagtctgcaacccgacttcgtgaagctggattcgctagtaatcgcgcatcagccatggcgcggtgaatacgttcccgggccttgtacacaccgcccgtcaagccatgaaagccgggggtacctgaagtacgtaaccgcaaggagcgtcctagggtaaaactggtaattggggctaagtcgtaacaaggtagccgtaccggaaggtgcggctggaacacctcctttct

SEQ ID NO: 294 - DNA, 1345 bp, Bacteroides sp.
  1_1_30
tggcgaccggcgcacgggtgagtaacacgtatccaacctgccgataactcggggatagcctttcgaaagaaagattaatatccgatagtatattaaaaccgcatggttttactattaaagaatttcggttatcgatggggatgcgttccattagtttgttggcggggtaacggcccaccaagactacgatggataggggttctgagaggaaggtcccccacattggaactgagacacggtccaaactcctacgggaggcagcagtgaggaatattggtcaatggacgagagtctgaaccagccaagtagcgtgaaggatgactgccctatgggttgtaaacttcttttatatgggaataaagtattccacgtgtggaattttgtatgtaccatatgaataaggatcggctaactccgtgccagcagccgcggtaatacggaggatccgagcgttatccggatttattgggtttaaagggagcgtaggtggattgttaagtcagttgtgaaagtttgcggctcaaccgtaaaattgcagttgaaactggcagtcttgagtacagtagaggtgggcggaattcgtggtgtagcggtgaaatgcttagatatcacgaagaactccgattgcgaaggcagctcactagactgcaactgacactgatgctcgaaagtgtgggtatcaaacaggattagataccctggtagtccacacagtaaacgatgaatactcgctgtttgcgatatacagtaagcggccaagcgaaagcattaagtattccacctggggagtacgccggcaacggtgaaactcaaaggaattgacgggggcccgcacaagcggaggaacatgtggtttaattcgatgatacgcgaggaaccttacccgggcttaaattgcatttgaataatctggaaacaggttagccgcaaggcaaatgtgaaggcagctcacgagactgcaactgacgtgccgtgaggtgtcggcttaagtgccataacgagcgcaacccttatctttagttactaacaggttatgctgaggactctagagagactgccgtcgtaagatgtgaggaaggtggggatgacgtcaaatcagcacggcccttacgtccggggctacacacgtgttacaatggggggtacagaaggcagctacctggtgacaggatgctaatcccaaaaacctctctcagttcggatcgaagtctgcaacccgacttcgtgaagctggattcgctagtaatcgcgcatcagccatggcgcggtgaatacgttcccgggccttgtacacaccgcccgtcaagccatgaaagccgggggtacctgaagtacgtaaccgcaa

SEQ ID NO: 295 - DNA, 1381 bp, Bacteroides sp.
  1_1_6
  modified_base (1333)..(1333): a, c, t, g, unknown or other
  modified_base (1337)..(1338): a, c, t, g, unknown or other
aggggcagcatttcagtttgcttgcaaactggagatggcgaccggcgcacgggtgagtaacacgtatccaacctgccgataactcggggatagcctttcgaaagaaagattaatacccgatggtataatgaaaccgcatggtcttattattaaagaatttcggttatcgatggggatgcgttccattaggcagttggtgaggtaacggctcaccaaaccttcgatggataggggttctgagaggaaggtcccccacattggaactgagacacggtccaaactcctacgggaggcagcagtgaggaatattggtcaatgggcgcaggcctgaaccagccaagtagcgtgaaggatgactgccctatgggttgtaaacttcttttatatgggaataaagttttccacgtgtggaattttgtatgtaccatatgaataaggatcggctaactccgtgccagcagccgcggtaatacggaggatccgagcgttatccggatttattgggtttaaagggagcgtaggtggacagttaagtcagttgtgaaagtttgcggctcaaccgtaaaattgcagttgatactggctgtcttgagtacagtagaggtgggcggaattcgtggtgtagcggtgaaatgcttagatatcacgaagaactccgattgcgaaggcagctcactggactgcaactgacactgatgctcgaaagtgtgggtatcaaacaggattagataccctggtagtccacacagtaaacgatgaatactcgctgtttgcgatatacagtaagcggccaagcgaaagcattaagtattccacctggggagtacgccggcaacggtgaaactcaaaggaattgacgggggcccgcacaagcggaggaacatgtggtttaattcgatgatacgcgaggaaccttacccgggcttaaattgcatttgaatatattggaaacagtatagccgtaaggcaaatgtgaaggtgctgcatggttgtcgtcagctcgtgccgtgaggtgtcggcttaagtgccataacgagcgcaacccttatctttagttactaacaggtcatgctgaggactctagagagactgccgtcgtaagatgtgaggaaggtggggatgacgtcaaatcagcacggcccttacgtccggggctacacacgtgttacaatggggggtacagaaggcagctacctggtgacaggatgctaatcccaaaagcctctctcagttcggatcgaagtctgcaacccgacttcgtgaagctggattcgctagtaatcgcgcatcagccatggcgcggtgaatacgttcccgggccttgtacacaccncggnntcaagccatgaaagccgggggtacctgaagtacgtaaccgcaa

SEQ ID NO: 296 - DNA, 1385 bp, Bacteroides sp.
  20_3
  modified_base (7)..(7): a, c, t, g, unknown or other
  modified_base (19)..(24): a, c, t, g, unknown or other
tcgaggnggcagcacaggnnnnnntaccgggtggcgaccggcgcacgggtgagtaacgcgtatgcaacttgcctatcagagggggataacccggcgaaagtcggactaataccgcatgaagcaggggccccgcatggggatatttgctaaagattcatcgctgatagataggcatgcgttccattaggcagttggcggggtaacggcccaccaaaccgacgatggataggggttctgagaggaaggtcccccacattggtactgagacacggaccaaactcctacgggaggcagcagtgaggaatattggtcaatgggcgtaagcctgaaccagccaagtcgcgtgagggatgaaggttctatggatcgtaaacctcttttataagggaataaagtgcgggacgtgtcccgttttgtatgtaccttatgaataaggatcggctaactccgtgccagcagccgcggtaatacggaggatccgagcgttatccggatttattgggtttaaagggtgcgtaggcggccttttaagtcagcggtgaaagtctgtggctcaaccatagaattgccgttgaaactgggaggcttgagtatgtttgaggcaggcggaatgcgtggtgtagcggtgaaatgcttagatatcacgcagaaccccgattgcgaaggcagcctgccaagccatgactgacgctgatgcacgaaagcgtggggatcaaacaggattagataccctggtagtccacgcagtaaacgatgatcactagctgtttgcgatacacagtaagcggcacagcgaaagcgttaagtgatccacctggggagtacgccggcaacggtgaaactcaaaggaattgacgggggcccgcacaagcggacgaacatgtggtttaattcgatgatacgcgaggaaccttacccgggtttgaacgcattcggaccgaggtggaaacaccttttctagcaatagccgtttgcgaggtgctgcatggttgtcgtcagctcgtgccgtgaggtgtcggcttaagtgccataacgagcgcaacccttgccactagttactaacaggtgatgctgaggactctggtgggactgccagcgtaagctgcgaggaaggcggggatgacgtcaaatcagcacggcccttacatccggggcgacacacgtgttacaatggcgtggacaaagggaagccacctggcgacagggagcgaatccccaaaccacgtctcagttcggatcggagtctgcaacccgactccgtgaagctggattcgctagtaatcgcgcatcagccatggcgcggtgaatacgttcccgggccttgtacacaccgcccgtcaagccatgggagccgggggtacctgaagtccgtaaccgcgaggatc

SEQ ID NO: 297 - DNA, 1382 bp, Bacteroides sp.
  2_1_22
tcgaggggcagcattttagtttgcttgcaaactgaagatggcgaccggcgcacgggtgagtaacacgtatccaacctgccgataactccgggatagcctttcgaaagaaagattaataccggatggcatactaatatcgcatgatatttttattaaagaatttcggttatcgatggggatgcgttccattagtttgttggcggggtaacggcccaccaagactacgatggataggggttctgagaggaaggtcccccacattggaactgagacacggtccaaactcctacgggaggcagcagtgaggaatattggtcaatggacgagagtctgaaccagccaagtagcgtgaaggatgactgccctatgggttgtaaacttcttttatatgggaataaagtattccacgtgtggaattttgtatgtaccatatgaataaggatcggctaactccgtgccagcagccgcggtaatacggaggatccgagcgttatccggatttattgggtttaaagggagcgtaggtggattgttaagtcagttgtgaaagtttgcggctcaaccgtaaaattgcagttgaaactggcagtcttgagtacagtagaggtgggcggaattcgtggtgtagcggtgaaatgcttagatatcacgaagaactccgattgcgaaggcagctcactagactgcactgacactgatgctcgaaagtgtgggtatcaaacaggattagataccctggtagtccacacagtaaacgatgaatactcgctgtttgcgatatacagtaagcggccaagcgaaagcattaagtattccacctggggagtacgccggcaacggtgaaactcaaaggaattgacgggggcccgcacaagcggaggaacatgtggtttaattcgatgatacgcgaggaaccttacccgggcttaaattgcatttgaataatctggaaacaggttagccgcaaggcaaatgtgaaggtgctgcatggttgtcgtcagctcgtgccgtgaggtgtcggcttaagtgccataacgagcgcaacccttatctttagttactaacaggtcatgctgaggactctagagagactgccgtcgtaagatgtgaggaaggtggggatgacgtcaaatcagcacggcccttacgtccggggctacacacgtgttacaatggggggtacagaaggcagctacctggtgacaggatgctaatcccaaaaacctctctcagttcggatcgaagtctgcaacccgacttcgtgaagctggattcgctagtaatcgcgcatcagccatggcgcggtgaatacgttcccgggccttgtacacaccgcccgtcaagccatgaaagccgggggtacctgaagtacgtaaccgcaa

SEQ ID NO: 298 - DNA, 945 bp, Bacteroides sp.
  2_1_56FAA
  modified_base (490)..(490): a, c, t, g, unknown or other
  modified_base (760)..(760): a, c, t, g, unknown or other
  modified_base (775)..(775): a, c, t, g, unknown or other
  modified_base (784)..(785): a, c, t, g, unknown or other
  modified_base (848)..(848): a, c, t, g, unknown or other
  modified_base (867)..(867): a, c, t, g, unknown or other
  modified_base (887)..(888): a, c, t, g, unknown or other
  modified_base (902)..(902): a, c, t, g, unknown or other
  modified_base (909)..(909): a, c, t, g, unknown or other
  modified_base (919)..(919): a, c, t, g, unknown or other
  modified_base (934)..(935): a, c, t, g, unknown or other
ttgctggcgaccggcgcacgggtgagtaacacgtatccaacctgccctttactcggggatagcctttcgaaagaaagattaatacccgatagcataatgattccgcatggtttcattattaaaggattccggtaaaggatggggatgcgttccattaggttgttggtgaggtaacggcccaccaagccttcgatggataggggttctgagaggaaggtcccccacattggaactgagacacggtccaaactcctacgggaggcagcagtgaggaatattggtcaatgggcgttagcctgaaccagccaagtagcgtgaaggatgaaggctctatgggtcgtaaacttcttttatataagaataaagtgcagtatgtatactgttttgtatgtattatatgaataaggatcggctaactccgtgccagcagccgcggtaatacggaggatccgagcgttatccggatttattgggtttaaagggagcgtangtggactggtaagtcagttgtgaaagtttgcggctcaaccgtaaaattgcagttgatactgtcagtcttgagtacagtagaggtgggcggaattcgtggtgtagcggtgaaatgcttagatatcacgaagaactccgattgcgaaggcagctcactggactgcaactgacactgatgctcgaaagtgtgggtatcaaacaggattagataccctggtagtccacacagtaaacgatgaatactcgctgtttgcgatatacagtaagcggncaagcgaaagcattnaagtattcnncctggggagtacgccggcaacggtgaaactcaaaggaattgacgggggcccgcacaagcggangaacatgtggtttaattcnatgatacgcgaggaaccttnncccgggcttaaatngcagtgnaatgatgtgnaaacatgtcagtganncatcaccact

SEQ ID NO: 299 - DNA, 1525 bp, Bacteroides sp.
  2_2_4
tacaatgaagagtttgatcctggctcaggatgaacgctagctacaggcttaacacatgcaagtcgaggggcagcatttcgctagcaatagtgaagatggcgaccggcgcacgggtgagtaacacgtatccaacctgccgataactcggggatagcctttcgaaagaaagattaatatccgatagtatattaaaaccgcatggttttactattaaagaatttcggttatcgatggggatgcgttccattagtttgttggcggggtaacggcccaccaagactacgatggataggggttctgagaggaaggtcccccacattggaactgagacacggtccaaactcctacgggaggcagcagtgaggaatattggtcaatggacgagagtctgaaccagccaagtagcgtgaaggatgactgccctatgggttgtaaacttcttttatatgggaataaagtattccacgtgtgggattttgtatgtaccatatgaataaggatcggctaactccgtgccagcagccgcggtaatacggaggatccgagcgttatccggatttattgggtttaaagggagcgtaggtggattgttaagtcagttgtgaaagtttgcggctcaaccgtaaaattgcagttgaaactgggagtcttgagtacagtagaggtgggcggaattcgtggtgtagcggtgaaatgcttagatatcacgaagaactccgattgcgaaggcagctcactagactgtcactgacactgatgctcgaaagtgtgggtatcaaacaggattagataccctggtagtccacacagtaaacgatgaatactcgctgtttgcgatatacagtaagcggccaagcgaaagcattaagtattccacctggggagtacgccggcaacggtgaaactcaaaggaattgacgggggcccgcacaagcggaggaacatgtggtttaattcgatgatacgcgaggaaccttacccgggcttaaattgcaaatgaataatctggaaacaggttagccgcaaggcatttgtgaaggtgctgcatggttgtcgtcagctcgtgccgtgaggtgtcggcttaagtgccataacgagcgcaacccttatctttagttactaacaggttatgctgaggactctagagagactgccgtcgtaagatgtgaggaaggtggggatgacgtcaaatcagcacggcccttacgtccggggctacacacgtgttacaatggggggtacagaaggcagctacctggtgacaggatgctaatcccaaaaacctctctcagttcggatcgaagtctgcaacccgacttcgtgaagctggattcgctagtaatcgcgcatcagccatggcgcggtgaatacgttcccgggccttgtacacaccgcccgtcaagccatgaaagccgggggtacctgaagtacgtaaccgcaaggagcgtcctagggtaaaactggtaattggggctaagtcgtaacaaggtagccgtaccggaaggtgcggctggaacacctcctt

SEQ ID NO: 300 - DNA, 1362 bp, Bacteroides sp.
  315-5
taggcttaacacatgcaagtcgaggggcagcattatcttagcttgctaagatagatggcgaccggcgcacgggtgagtaacacgtatccaaccttccggttactcggggataggctttcgaaagaaagattaatacccgatgttgcgtatctttctcctgaaagatacgccaaaggattccggtaaccgatggggatgcgttccattaggcagttggcggggtaacggcccaccaaaccttcgatggataggggttctgagaggaaggtcccccacattggaactgagacacggtccaaactcctacgggaggcagcagtgaggaatattggtcaatggacggaagtctgaaccagccaagtagcgtgaaggatgactgccctctgggttgtaaacttcttttatacgggaataacatgaggtacgcgtaccttattgcatgtaccgttatgaataagcatcggctaactccgtgccagcagccgcggtaatacggaggatgcgagcgttatccggatttattgggtttaaagggagcgtaggtgggatattaagtcagctgtgaaagtttggggctcaaccttaaaattgcagttgatactggtttccttgagtacggtacaggtgggcggaattcgtggtgtagcggtgaaatgcttagatatcacgaagaactccgatcgcgaaggcagctcaccgggccggaactgacactgatgctcgaaagtgcgggtatcaaacaggattagataccctggtagtccgcacagtaaacgatgaatactcgctgtttgcgatacacagtaagcggccaagcgaaagcgttaagtattccacctggggagtacgccggcaacggtgaaactcaaaggaattgacgggggcccgcacaagcggaggaacatgtggtttaattcgatgatacgcgaggaaccttacccgggcttaaattgcgctggcttttaccggaaacggtattttcttcggaccagcgtgaaggtgctgcatggttgtcgtcagctcgtgccgtgaggtgtcggcttaagtgccataacgagcgcaacccttatctttagttactaacagttttgctgaggactctaaagagactgccgtcgtaagatgcgaggaaggtggggatgacgtcaaatcagcacggcccttacgtccggggctacacacgtgttacaatggggagcacagcaggttgctacacggcgacgtgatgccaatccgtaaaactcctctcagttcggatcgaagtctgcaacccgacttcgtgaagctggattcgctagtaatcgcgcatcagccacggcgcggtgaatacgttcccgggccttgtacacaccgcccgtcaag

SEQ ID NO: 301 - DNA, 1243 bp, Bacteroides sp.
  31SF15
taacacatgcacgtcgagggaccggcgcacgggtgagtaacacgtatccaacctaccggttattccgggatagcctttcgaaagaaagattaataccggatagttaaagtcgataaccgatggggatgcgttccattagtttgttggcggggtaacggcccaccaagacatcgatggataggggttctgagaggaaggtcccccacattggaactgagacacggtccaaactcctacgggaggcagcagtgaggaatattggtcaatggacgagagtctgaacgagccaagtagcgtgaaggatgactgcctatgggttgtaaacttcttttatatgggaatatgtatgtaccatacgaataaggatcggctaactccgtgccagcagccgcggtaatacggaggatccgagcgttatccggatttattgggtttaaagggagcgtaggcggactattaagtcagctgtgaaagtttgcggctcaaccgtaaaattgcagttgatactggtcgtcttgagtgcagtagaggtaggcggaattcgtggtgtagcggtgaaatgcttagatatcacgaagaactccgattgcgaaggcagcttactggactgactgacgctgatgctcgaaagtgtgggtatcaaacaggattagataccctggtagtccacacagtaaacgatgaatactcgctgtttgcgagcaagcggccaagcgaaagcattaagtattccacctggggagtacgccggcaacggtgaaactcaaaggaattgacgggggcccgcacaagcggaggaacatgtggtttaattcgatgatacgcgaggaaccttacccgggcttaaattgtgaaggtgctgcatggttgtcgtcagctcgtgccgtgaggtgtcggcttaagtgccataacgagcgcaacccttatctttagttacttacagctgaggactctagagagactgccgtcgtatgatggaggaaggtggggatgacgtcaaatcagcacggtcctatcgtccggggatacacacgtgttacaatggggggcagaaggcagctacacagcgatgtgatgctaatcccacctctagcagttcggatggagtctgcaacccgactccagaagctggattcgctagtaatcgcgcatcagcacggcgcggtgaatacgttcccgggccttgtacacaccgcccgtcaagccatgaaagccgggggtacctgaagtccgacggcctagg

SEQ ID NO: 302 - DNA, 1207 bp, Bacteroides sp.
  31SF18
acacatgcaagtcgagggaccggcgcacgggtgagtaacacgtatccaacctaccggttattctgggatagcctttcgaaagaaagattaataccggatagttaaagtcgataaccgatggggatgcgttccattagtttgttggcggggtaacggcccaccaagacatcgatggataggggttctgagaggaaggtcccccacattggaactgagacacggtccaaactcctacgggaggcagcagtgaggaatattggtcaatggacgagagtctgaaccagccaagtagcgtgaaggatgactgcctatgggttgtaaacttcttttatatgggaatatgtatgtaccatacgaataaggatcggctaactccgtgccagcagccgcggtaatacggaggatccgagcgttatccggatttattgggtttaaagggagcgtaggcggactattaagtcagctgtgaaagtttgcggctcaaccgtaaaattgcagttgatactggtcgtcttgagtgcagtagaggtaggcggaattactggtgtagcggtgaaatgcttagatatcacgaagaactccgattgcgaaggcagcttactggactgactgacgctgatgctcgaaagtgtgggtatcaaacaggattagataccctggtagtccacacagtaaacgatgaatactcgctgtttgcgagcaagcggccaagcgaaagcattaagtattccacctggggagtacgccggcaacggtgaaactcaaaggaattgacgggggcccgcacaagcggaggaacatgtggtttaattcgatgatacgcgaggaaccttacccgggcttaaattgtgaaggtgctgcatggttgtcgtcagctcgtgccgtgaggtgtcggcttaagtgccataacgagcgcaacccttatctttagttactaacagctgaggactctagagagactgccgtcgtaagatggaggaaggtggggatgacgtcaaatcagcacggcccttacgtccggggctacacacgtgttacaatggggggcagaaggcagctacacagcgatgtgatgctaatcccacctctctcagttcggatggagtctgcaacccgactccagaagctggattcgctagtaatcgcgcatcagccacggcgcggtgaatacgttcccgggccttgtacacaccgcccgtcaagccat

SEQ ID NO: 303 - DNA, 1254 bp, Bacteroides sp.
  35AE31
caggcttaacacatgcaagtcgagggaccggcgcacgggtgagtaacacgtatccaacctaccggttattctgggatagcctttcgaaagaaagattaataccggatagttaaagtcgataaccgatggggatgcgttccattagtttgttggcggggtaacggcccaccaagacatcgatggataggggttctgagaggaaggtcccccacattggaactgagacacggtccaaactcctacgggaggcagcagtgaggaatattggtcaatggacgagagtctgaaccagccaagtagcgtgaaggatgactgcctatgggttgtaaacttcttttatatgggaatatgtatgtaccatacgaataaggatcggctaactccgtgccagcagccgcggtaatacggaggatccgagcgttatccggatttattgggtttaaagggagcgtaggcggactattaagtcagctgtgaaagtttgcggctcaaccgtaaaattgcagttgatactggtcgtcttgagtgcagtagaggtaggcggaattcgtggtgtagcggtgaaatgcttagatatcacgaagaactccgattgcgaaggcagcttactggactgactgacgctgatgctcgaaagtgtgggtatcaaacaggattagataccctggtagtccacacagtaaacgatgaatactcgctgtttgcgagcaagcggccaagcgaaagcattaagtattccacctggggagtacgccggcaacggtgaaactcaaaggaattgacgggggcccgcacaagcggaggaacatgtggtttaattcgatgatacgcgaggaaccttacccgggcttaaattgtgaaggtgctgcatggttgtcgtcagctcgtgccgtgaggtgtcggcttaagtgccataacgagcgcaacccttatctttagttactaacagctgaggactctagagagactgccgtcgtaagatggaggaaggtggggatgacgtcaaatcagcacggcccttacgtccggggctacacacgtgttacaatggggggcagaaggcagctacacagcgatgtgatgctaatcccacctctctcagttcggatggagtctgcaacccgactccagaagctggattcgctagtaatcgcgcatcagccaggcgcggtgaatacgttcccgggccttgtacacaccgcccgtcaagccatgaaagccgggggtacctgaagtccgtagcggcctagggta

SEQ ID NO: 304 - DNA, 1238 bp, Bacteroides sp.
  35AE37
gcttaacacatgcaagtcgagggaccggcgcacgggtgagtaacacgtatccaacctaccggttattccgggatagcctttcgaaagaaagattaataccggatagttaaagtcgataaccgatggggatgcgttccattagtttgttggcggggtaacggcccaccaagacatcgatggataggggttctgagaggaaggtcccccacattggaactgagacacggtccaaactcctacgggaggcagcagtgaggaatattggtcaatggacgagagtctgacccagccaagtagcgtgaaggatgactgcctatgggttgtaaacttcttttatatgggaatatgtatgtaccatacgaataaggatcggctaactccgtgccagcagccgcggtaatacggaggatccgagcgttatccggatttattgggtttaaagggagcgtaggcggactattaagtcagctgtgaaagtttgcggctcaaccgtaaaattgcagttgatactggtcgtcttgagtgcagtagaggtaggcggaattcgtggtgtagcggtgaaatgcttagatatcacgaagaactccgattgcgaaggcagcttactggactgactgacgctgatgctcgaaagtgtgggtatcaaacaggattagataccctggtagtccacacagtaaacgatgaatactcgctgtttgcgagcaagcggccaagcgaaagcattaagtattccacctggggagtacgccggcaacggtgaaactcaaaggaattgacgggggcccgcacaagcggaggaacatgtggtttaattcgatgatacgcgaggaaccttacccgggcttaaattgtgaaggtgctgcatggttgtcgtcagctcgagccgtgaggtgtcggcttaagtgccataacgagcgcaacccttatctttagttactaacagctgaggactctagagagactgccgtcgtaagatggaggaaggtggggatgacgtcaaatcagcacggcccttacgtccggggctacacacgtgttacaatggggggcagaaggcagctacacagcgatgtgatgctaatcccacctctctcagttcggatggagtctgcaacccgactccagaagctggattcgctagtaatcgcgcatcagccacggcgcggtgaatacgttcccgggccttgtacacaccgcccgtcaagccatgaaagccgggggtacctgaagtccga

SEQ ID NO: 305 - DNA, 1229 bp, Bacteroides sp.
  35BE34
tcgagggaccggcgcacgggtgagtaacacgtatccaacctaccggttattctgggatagcctttcgaaagaaagattaataccggatagttaaagtcgataaccgatggggatgcgttccattagtttgttggcggggtaacggcccaccaagacatcgatggataggggttctgagaggaaggtcccccacattggaactgagacacggtccaaactcctacgggaggcagcagtgaggaatattggtcaatggacgagagtctgaaccagccaagtagcgtgaaggatgactgcctatgggttgtaaacttcttttatatgggaatatgtatgtaccatacgaataaggatcggctaactccgtgccagcagccgcggtaatacggaggatccgagcgttatccggatttattgggtttaaagggagcgtaggcggactattaagtcagctgtgaaagtttgcggctcaaccgtaaaattgcagttgatactggtcgtcttgagtgcagtagaggtaggcggaattcgtggtgtagcggtgaaatgcttagatatcacgaagaactccgattgcgaaggcagcttactggactgactgacgctgatgctcgaaagtgtgggtatcaaacaggattagataccctggtagtccacacagtaaacgatgaatactcgctgtttgcgagcaagcggccaagcgaaagcattaagtattccacctggggagtacgccggcaacggtgaaactcaaaggaattgacgggggcccgcacaagcggaggaacatgtggtttaattcgatgatacgcgaggaaccttacccgggcttaaattgtgaaggtgctgcatggttgtcgtcagctcgtgccgtgaggtgtcggcttaagtgcctaaacgagcgcaacccttatctttagttactaacagctgaggactctagagagactgccgtcgtaagatggaggaaggtggggatgacgtcaaatcagcacggcccttacgtccggggctacacacgtgttacaatggggggcagaaggcagctacacagcgatgtgatgctaatcccacctctctcagttcggatggagtctgcaacccgactccagaagctggattcgctagtaatcgtgcatcagccacggcgcggtgaatacgttcccgggccttgtacacaccgcccgtcaagccatgaaagccgggggtacctgaagtccgacggccta

SEQ ID NO: 306 - DNA, 1250 bp, Bacteroides sp.
  35BE35
acacatgcaagtcgagggaccggcgcacgggtgagtaacacgtatccaacctaccggttattccgggatagcctttcgaaagaaagattaataccggatagttaaagtcgataaccgatggggatgcgttccattagtttgttggcggggtaacggcccaccaagacatcgatggataggggttctgagaggaaggtcccccacattggaactgagacacggtccaaactcctacgggaggcagcagtgaggaatattggtcaatggacgagagtctgaaccagccaagtagcgtgaaggatgactgcctatgggttgtaaacttcttttatatgggaatatgtatgtaccatacgaataaggatcggctaactccgtgccagcagccgcggtaatacggaggatccgagcgttatccggatttattgggtttaaagggagcgtaggcggactattaagtcagctgtgaaagtttgcggctcaaccgtaaaattgcagttgatactggtcgtcttgagtgcagtagaggtaggcggaattcgtggtgtagcggtgaaatgcttagatatcacgaagaactccgattgcgaaggcagcttactggactgactgacgctgatgctcgaaagtgtgggtatcaaacatgattagataccctggtagtccacacagtaaacgatgaatactcgctgtttgcgagcaagcggccaagcgaaagcattaagtattccacctggggagtacgccggcactggcgaaactcaaaggaattgacgggggcccgcacaagcggaggaacatgtggtttaattcgatgatacgcgaggaaccttacccgggcttaaattgtgaaggtgctgcatggttgtcgtcagctcgtgccgtgaggtgtcggcttaagtgccataacgagcgcaacccttatctttagttactaacagctgaggactctagagagactgccgtcgtaagatggaggaaggtggggatgacgtcaaatcagcacggcccttacgtccggggctacacacgtgttacaatggggggcagaaggcagctacatagcgatgtgatgctaatcccacctctctcagttcggatggagtctgcaacccgactccagaagctggattcgctagtaatcgcgcatcagccacggcgcggtgaatacgttcccgggccttgtacacaccgcccgtcaagccaataaagccgggggtacttgaagtccgagcggcctagggtaaaac

SEQ ID NO: 307 - DNA, 1351 bp, Bacteroides sp.
  3_1_19
  modified_base (301)..(301): a, c, t, g, unknown or other
taccgggtggcgaccggcgcacgggtgagtaacgcgtatgcaacttgcctatcagagggggataacccggcgaaagtcggactaataccgcatgaagcaggggccccgcatggggatatttgctaaagattcatcgctgatagataggcatgcgttccattaggcagttggcggggtaacggcccaccaaaccgacgatggataggggttctgagaggaaggtcccccacattggtactgagacacggaccaaactcctacgggaggcagcagtgaggaatattggtcaatggccgtaagnctgaaccagccaagtcgcgtgagggatgaaggttctatggatcgtaaacctcttttataagggaataaagtgcgggacgtgtcccgttttgtatgtaccttatgaataaggcggctaactccgtgccagcagccgcggtaatacggaggccagcgttatccggatttattgggtttaaagggtgcgtaggcggccttttaagtcagcggtgaaagtctgtggctcaaccatagaattgccgttgaaactggggggcttgagtatgtttgaggcaggcggaatgcgtggtgtagcggtgaaatgcatagatatcacgcagaaccccgattgcgaaggcagcctgccaagccattactgacgctgatgcacgaaagcgtggggatcaaacaggattagataccctggtagtccacgcagtaaacgatgatcactagctgtttgcgatacactgtaagcggcacagcgaaagcgttaagtgatccacctggggagtacgccggcaacggtgaaactcaaaggaattgacgggggcccgcacaagcggaggaacatgtggtttaattcgatgatacgcgaggaaccttacccgggtttgaacgcattcggaccgaggtggaaacaccttttctagcaatagccgtttgcgaggtgctgcatggttgtcgtcagctcgtgccgtgaggtgtcggcttaagtgccataacgagcgcaacccttgccactagttactaacaggtgatgctgaggactctggtgggactgccagcgtaagctgcgaggaaggcggggatgacgtcaaatcagcacggcccttacatccggggcgacacacgtgttacaatggcgtggacaaagggaggccacctggcgacagggagcgaatccccaaaccacgtctcagttcggatcggagtctgcaacccgactccgtgaagctggattcgctagtaatcgcgcatcagccatggcgcggtgaatacgttcccgggccttgtacacaccgcccgtcaagccatgggagccgggggtacctgaagtccgtaaccgaaa

SEQ ID NO: 308 - DNA, 1362 bp, Bacteroides sp.
  3_1_23
gtcgaggggcagcattttagtttgcttgcaaactgaagatggcgaccggcgcacgggtgagtaacacgtatccaacctgccgataactccggaatagcctttcgaaagaaagattaataccggatggtatacgaatatcgcatgatatttttattaaagaatttcggttatcgatggggatgcgttccattagtttgttggcggggtaacggcccaccaagactacgatggataggggttctgagaggaaggtcccccacattggaactgagacacggtccaaactcctacgggaggcagcagtgaggaatattggtcaatggggcctgaacagccaagtacgtgaaggcttgggaacttcttttatatgggaataaagttttccacgtgtggaattttgtatgtaccatatgaataaggatcggctaactccgtgccagcagccgcggtaatacggaggatccgagcgttatccggatttattgggtttaaagggagcgtaggtggattgttaagtcagttgtgaaagtttgcggctcaaccgtaaaattgcagttgaaactggcagtcttgagtacagtagaggtgggcggaattcgtggtgtagcggtgaaatgcttagatatcacgaagaactccgattgcgaaggcagctcactagactgtcactgacactgatgctcgaaagtgtgggtatcaaacaggattagataccctggtagtccacacagtaaacgatgaatactcgctgtttgcgatatacagtaagcggccaagcgaaagcattaagtattccacctggggagtacgccggcaacggtgaaactcaaaggaattgacgggggcccgcacaagcggaggaacatgtggtttaattcgatgatacgcgaggaaccttacccgggcttaaattgcaacagaatatattggaaacagtatagccgtgaagctgttgtgaatgtgctgcatggttgtcgtcagctcgtgccgtgaggtgtcggcttaagtgccataacgagcgcaacccttatctttagttactaacaggtcatgctgaggactctagagagactgccgtcgtaagatgtgaggaaggtggggatgacgtcaaatcagcacggcccttacgtccggggctacacacgtgttacaatggggggtacagaaggcggctacctggtgacaggatgctaatcccaaaaacctctctcagttcggatcgaagtctgcaacccgacttcgtgaagctggattcgctagtaatcgcgcatcagccatggcgcggtgaatacgttcccgggccttgtacacaccgcccgtcaagccatgaaagccgggggtacctgaagtacgtaaccgcaa

SEQ ID NO: 309 - DNA, 1532 bp, Bacteroides sp.
  3_1_33FAA
tacaatgaagagtttgatcctggctcaggatgaacgctagctacaggcttaacacatgcaagtcgaggggcagcatggtcttagcttgctaaggctgatggcgaccggcgcacgggtgagtaacacgtatccaacctgccgtctactcttggccagccttctgaaaggaagattaatccaggatgggatcatgagttcacatgtccgcatgattaaaggtattttccggtagacgatggggatgcgttccattagatagtaggcggggtaacggcccacctagtcaacgatggataggggttctgagaggaaggtcccccacattggaactgagacacggtccaaactcctacgggaggcagcagtgaggaatattggtcaatgggcgatggcctgaaccagccaagtagcgtgaaggatgactgccctatgggttgtaaacttcttttataaaggaataaagtcgggtatgcatacccgtttgcatgtactttatgaataaggatcggctaactccgtgccagcagccgcggtaatacggaggatccgagcgttatccggatttattgggtttaaagggagcgtagatggatgtttaagtcagttgtgaaagtttgcggctcaaccgtaaaattgcagttgatactggatgtcttgagtgcagttgaggcaggcggaattcgtggtgtagcggtgaaatgcttagatatcacgaagaactccgattgcgaaggcagcctgctaagctgcaactgacattgaggctcgaaagtgtgggtatcaaacaggattagataccctggtagtccacacggtaaacgatgaatactcgctgtttgcgatatacggcaagcggccaagcgaaagcgttaagtattccacctggggagtacgccggcaacggtgaaactcaaaggaattgacgggggcccgcacaagcggaggaacatgtggtttaattcgatgatacgcgaggaaccttacccgggcttaaattgcactcgaatgatccggaaacggttcagctagcaatagcgagtgtgaaggtgctgcatggttgtcgtcagctcgtgccgtgaggtgtcggcttaagtgccataacgagcgcaacccttgttgtcagttactaacaggtgatgctgaggactctgacaagactgccatcgtaagatgtgaggaaggtggggatgacgtcaaatcagcacggcccttacgtccggggctacacacgtgttacaatggggggtacagagggccgctaccacgcgagtggatgccaatccctaaaacccctctcagttcggactggagtctgcaacccgactccacgaagctggattcgctagtaatcgcgcatcagccacggcgcggtgaatacgttcccgggccttgtacacaccgcccgtcaagccatgggagccgggggtacctgaagtgcgtaaccgcgaggatcgccctagggtaaaactggtgactggggctaagtcgtaacaaggtagccgtaccggaaggtgcggctggaacacctcctt

SEQ ID NO: 310 - DNA, 1045 bp, Bacteroides sp.
  3_1_40A
  modified_base (23)..(23): a, c, t, g, unknown or other
  modified_base (31)..(31): a, c, t, g, unknown or other
  modified_base (33)..(33): a, c, t, g, unknown or other
  modified_base (41)..(41): a, c, t, g, unknown or other
  modified_base (730)..(730): a, c, t, g, unknown or other
caagtagcgtgaaggatgactgncctatggntntaaacttntttataaaggaataaagtcgggtatgcatacccgtttgcatgtactttatgaataaggatcggctaactccgtgccagcagccgcggtaatacggaggatccgagcgttatccggatttattgggtttaaagggagcgtagatggatgtttaagtcagttgtgaaagtttgcggctcaaccgtaaaattgcagttgatactggatatcttgagtgcagttgaggcaggcggaattcgtggtgtagcggtgaaatgcttagatatcacgaagaactccgattgcgaaggcagcctgctaagctgcaactgacattgaggctcgaaagtgtgggtatcaaacaggattagataccctggtagtccacacggtaaacgatgaatactcgctgtttgcgatatacggcaagcggccaagcgaaagcgttaagtattccacctggggagtacgccggcaacggtgaaactcaaaggaattgacgggggcccgcacaagcggaggaacatgtggtttaattcgatgatacgcgaggaaccttacccgggcttaaattgcagatgaattacggtgaaagccgtaagccgcaaggcatctgtgaaggtgctgcatggttgtcgtcagctcgtgccgtgaggtgtcggcttaagtgccataacgagcgcaacccttgttgtcagttactaacaggttntgctgaggactctgacaagactgccatcgtaagatgtgaggaaggtggggatgacgtcaaatcagcacggcccttacgtccggggctacacacgtgttacaatggggggtacagagggccgctaccacgcgagtggatgccaatcccaaaaacctctctcagttcggactggagtctgcaacccgactccacgaagctggattcgctagtaatcgcgcatcagccacggcgcggtgaatacgttcccgggccttgtacacaccgcccgtcaagccatgggagccgggggtacctgaagtgcgtaaccgcgaggag

SEQ ID NO: 311 - DNA, 1367 bp, Bacteroides sp.
  3_2_5
  modified_base (1270)..(1270): a, c, t, g, unknown or other
  modified_base (1355)..(1355): a, c, t, g, unknown or other
tcgaggggcagcacaggtagcaataccgggtggcgaccggcgcacgggtgagtaacgcgtatgcaacttgcctatcagagggggataacccggcgaaagtcggactaataccgcatgaagcaggggccccgcatggggatatttgctaaagattcatcgctgatagataggcatgcgttccattaggcagttggcggggtaacggcccaccaaaccgacgatggataggggttctgagaggaaggtcccccacattggtactgacacacggaccaaactcctacgggaggcagcagtgaggaatattggtcaatgggcgaaaggctgaaccagccaagtcgcgtgagggatgaaggttctatggatcgtaaacctcttttataagggaataaagtgcgggacgtgtcccgttttgtatgtaccttatgaataaggatcggctaactccgtgccagcagccgcggtaatacggaggatccgagcgttatccggatttattgggtttaaagggtgcgtagcggccttttaagtcacggtgaaagtctgtggctcaccataaattgccgttgaaactggggggcttgagtatgtttgaggcagcggaatgcgtggtgtacggtgaaatgcatagatatcacgcagaaccccgattggaaggcagcctgccaagccattactgacgtgatgcacgaaagcgtggggatcaaacaggattagataccctggtagtccacgcataaacgatgatcactatgtttgcgatacactgtaagcggcacagcgaaagcgttaagtgatccacctggggagtacgccggcaacggtgaaactcaaggaattgacgggggcccgcacaagcggagaacatgtggtttaattgatgatacgcgaggaaccttacccgggtttgaacgcattcggaccgaggtggaaacaccttttctagcaatagccgtttgcgaggtgctgcatggttgtcgtcagctcgtgccgtgaggtgtcggcttaagtgccataacgagcgcaacccttgccactagttactaacaggtgatgctgaggactctggtgggactgccagcgtaagctgcgaggaaggcggggatgacgtcaaatcagcacggcccttacatccggggcgacacacgtgttacaatggcgtggacaaagggaggccacctggcgacagggagcgaatccccaaaccacgtctcagttcggatcggagtctgcaacccgactccgtgaagctggattcgctagtaatcgngcatcagccatggcgcggtgaatacgttcccgggccttgtacacaccgcccgtcaagccatgggagccgggggtacctgaagtcngtaaccgaaagg

SEQ ID NO: 312 - DNA, 1386 bp, Bacteroides sp.
  4_1_36
tcgaggggcagcatgaacttagcttgctaagtttgatggcgaccggcgcacgggtgagtaacacgtatccaacctgccgatgactcggggatagcctttcgaaagaaagattaatacccgatggcatagttcttccgcatggtggaactattaaagaatttcggtcatcgatggggatgcgttccattaggttgttggcggggtaacggcccaccaagccttcgatggataggggttctgagaggaaggtcccccacattggaactgagacacggtccaaactcctacgggaggcagcagtgaggaatattggtcaatggacgagagtctgaaccagccaagtagcgtgaaggatgactgccctatgggttgtaaacttcttttatacgggaataaagtgaggcacgtgtgcctttttgtatgtaccgtatgaataaggatcggctaactccgtgccagcagccgcggtaatacggaggatccgagcgttatccggatttattgggtttaaagggagcgtaggcggacgcttaagtcagttgtgaaagtttgcggctcaaccgtaaaattgcagttgatactgggtgtcttgagtacagtagaggcaggcggaattcgtggtgtagcggtgaaatgcttagatatcacgaagaactccgattgcgaaggcagcttgctggactgtaactgacgctgatgctcgaaagtgtgggtatcaaacaggattagataccctggtagtccacacagtaaacgatgaatactcgctgtttgcgatatacagtaagcggccaagcgaaagcgttaagtattccacctggggagtacgccggcaacggtgaaactcaaaggaattgacgggggcccgcacaagcggaggaacatgtggtttaattcgatgatacgcgaggaaccttacccgggcttgaattgcaactgaatgatgtggagacttgtcagccgcaaggcagttgtgaagatatcacgaggtactgcgattgcgaagccagctggctgggctttaagtgacactaatggcgcaacccttatcgatagttaccatcaggttatgctggggactctgtcgagactgccgtcgtaagatgtgaggaaggtggggatgacgtcaaatcagcacggcccttacgtccggggctacacacgtgttacaatggggggtacagaaggcagctacacggtgacgtgatgctaatcccgaaagcctctctcagttcggattggagtctgcaacccgactccatgaagctggattcgctagtaatcgcgcatcagccacggcgcggtgaatacgttcccgggccttgtacacaccgcccgtcaagccatgaaagccgggggtacctgaagtgcgtaaccgcaaggagc

SEQ ID NO: 313 - DNA, 1515 bp, Bacteroides sp.
  4_3_47FAA
agagtttgatcctggctcaggatgaacgctagctacaggcttaacacatgcaagtcgaggggcagcatggtcttagcttgctaaggccgatggcgaccggcgcacgggtgagtaacacgtatccaacctgccgtctactcttggacagccttctgaaaggaagattaatacaagatggcatcatgagtccgcatgttcacatgattaaaggtattccggtagacgatggggatgcgttccattagatagtaggcggggtaacggcccacctagtcttcgatggataggggttctgagaggaaggtcccccacattggaactgagacacggtccaaactcctacgggaggcagcagtgaggaatattggtcaatgggcgcaggcctgaaccagccaagtagcgtgaaggatgactgccctatgggttgtaaacttcttttataaaggaataaagtcgggtatgtatacccgtttgcatgtactttatgaataaggatcggctaactccgtgccagcagccgcggtaatacggaggatccgagcgttatccggatttattgggtttaaagggagcgtagatggatgtttaagtcagttgtgaaagtttgcggctcaaccgtaaaattgcagttgatactggatatcttgagtgcagttgaggcaggcggaattcgtggtgtagcggtgaaatgcttagatatcacgaagaactccgattgcgaaggcagcctgctaagctgcaactgacattgaggctcgaaagtgtgggtatcaaacaggattagataccctggtagtccacacggtaaacgatgaatactcgctgtttgcgatatacagcaagcggccaagcgaaagcgttaagtattccacctggggagtacgccggcaacggtgaaactcaaaggaattgacgggggcccgcacaagcggaggaacatgtggtttaattcgatgatacgcgaggaaccttacccgggcttaaattgcagatgaattacggtgaaagccgtaagccgcaaggcatctgtgaaggtgctgcatggttgtcgtcagctcgtgccgtgaggtgtcggcttaagtgccataacgagcgcaacccttgttgtcagttactaacaggttcgctgaggactctgacaagactgccatcgtaagatgtgaggaaggtggggatgacgtcaaatcagcacggcccttacgtccggggctacacacgtgttacaatggggggtacagagggccgctaccacgcgagtggatgccaatcccaaaaacctctctcagttcggactggagtctgcaacccgactccacgaagctggattcgctagtaatcgcgcatcagccacggcgcggtgaatacgttcccgggccttgtacacaccgcccgtcaagccatgggagccgggggtacctgaagtgcgtaaccgcgaggagcgccctagggtaaaactggtgactggggctaagtcgtaacaaggtagccgtaccggaaggtgcggctggaacacct

SEQ ID NO: 314 - DNA, 1533 bp, Bacteroides sp.
  9_1_42FAA
tacaatgaagagtttgatcctggctcaggatgaacgctagctacaggcttaacacatgcaagtcgaggggcagcatggtcttagcttgctaaggctgatggcgaccggcgcacgggtgagtaacacgtatccaacctgccgtctactcttggccagccttctgaaaggaagattaatccaggatgggatcatgagttcacatgtccgcatgattaaaggtattttccggtagacgatggggatgcgttccattagatagtaggcggggtaacggcccacctagtcaacgatggataggggttctgagaggaaggtcccccacattggaactgagacacggtccaaactcctacgggaggcagcagtgaggaatattggtcaatgggcgatggcctgaaccagccaagtagcgtgaaggatgactgccctatgggttgtaaacttcttttataaaggaataaagtcgggtatgcatacccgtttgcatgtactttatgaataaggatcggctaactccgtgccagcagccgcggtaatacggaggatccgagcgttatccggatttattgggtttaaagggagcgtagatggatgtttaagtcagttgtgaaagtttgcggctcaaccgtaaaattgcagttgatactggatgtcttgagtgcagttgaggcaggcggaattcgtggtgtagcggtgaaatgcttagatatcacgaagaactccgattgcgaaggcagcctgctaagctgcaactgacattgaggctcgaaagtgtgggtatcaaacaggattagataccctggtagtccacacggtaaacgatgaatactcgctgtttgcgatatacggcaagcggccaagcgaaagcgttaagtattccacctggggagtacgccggcaacggtgaaactcaaaggaattgacgggggcccgcacaagcggaggaacatgtggtttaattcgatgatacgcgaggaaccttacccgggcttaaattgcactcgaatgatccggaaacggttcagctagcaatagcgagtgtgaaggtgctgcatggttgtcgtcagctcgtgccgtgaggtgtcggcttaagtgccataacgagcgcaacccttgttgtcagttactaacaggtgatgctgaggactctgacaagactgccatcgtaagatgtgaggaaggtggggatgacgtcaaatcagcacggcccttacgtccggggctacacacgtgttacaatgggggggtacagagggccgctaccacgcgagtggatgccaatccctaaaacccctctcagttcggactggagtctgcaacccgactccacgaagctggattcgctagtaatcgcgcatcagccacggcgcggtgaatacgttcccgggccttgtacacaccgcccgtcaagccatgggagccgggggtacctgaagtgcgtaaccgcgaggatcgccctagggtaaaactggtgactggggctaagtcgtaacaaggtagccgtaccggaaggtgcggctggaacacctcctt

SEQ ID NO: 315 - DNA, 1489 bp, Bacteroides sp.
  AR20
gagtttgatcctggctcaggatgaacgctagctacaggcttaacacatgcaagtcgaggggcagcatgaacttagcttgctaagtttgatggcgaccggcgcacgggtgagtaacacgtatccaacctgccgatgactcggggatagcctttcgaaagaaagattaatacccgatggcatagttcttccgcatggtagaactattaaagaatttcggtcatcgatggggatgcgttccattaggttgttggcggggtaacggcccaccaagccttcgatggataggggttctgagaggaaggtcccccacattggaactgagacacggtccaaactcctacgggaggcagcagtgaggaatattggtcaatggacgagagtctgaaccagccaagtagcgtgaaggatgactgccctatgggttgtaaacttcttttatacgggaataaagtgaggcacgcgtgcctttttgtatgtaccgtatgaataaggatcggctaactccgtgccagcagccgcggtaatacggaggatccgagcgttatccggatttattgggtttaaagggagcgtaggcggacgcttaagtcagttgtgaaagtttgcggctcaaccgtaaaattgcagttgatactgggtgtcttgagtacagtagaggcaggcggaattcgtggtgtagcggtgaaatgcttagatatcacgaagaactccgattgcgaaggcagcctgctggactgtaactgacgctgatgctcgaaagtgtgggtatcaaacaggattagataccctggtagtccacacagtaaacgatgaatactcgctgtttgcgatatacagtaagcggccaagcgaaagcgttaagtattccacctggggagtacgccggcaacggtgaaactcaaaggaattgacgggggcccgcacaagcggaggaacatgtggtttaattcgatgatacgcgaggaaccttacccgggcttgaattgcaactgaatgatgtggagacatgtcagccgcaaggcagttgtgaaggtgctgcatggttgtcgtcagctcgtgccgtgaggtgtcggcttaagtgccataacgagcgcaacccttatcgatagttaccatcaggttatgctggggactctgtcgagactgccgtcgtaagatgtgaggaaggtggggatgacgtcaaatcagcacggcccttacgtccggggctacacacgtgttacaatggggggtacagaaggcagctacacggcgacgtgatgctaatccctaaagcctctctcagttcggattggagtctgcaacccgactccatgaagctggattcgctagtaatcgcgcatcagccacggcgcggtgaatacgttcccgggccttgtacacaccgcccgtcaagccatgaaagccgggggtacctgaagtgcgtaaccgcaaggagcgccctagggtaaaactggtgattggggctaagtcgtaacaaggtagccgt

SEQ ID NO: 316 - DNA, 1502 bp, Bacteroides sp.
  AR29
  modified_base (11)..(12): a, c, t, g, unknown or other
  modified_base (57)..(57): a, c, t, g, unknown or other
  modified_base (1000)..(1000): a, c, t, g, unknown or other
  modified_base (1008)..(1009): a, c, t, g, unknown or other
  modified_base (1023)..(1023): a, c, t, g, unknown or other
  modified_base (1026)..(1027): a, c, t, g, unknown or other
  modified_base (1033)..(1033): a, c, t, g, unknown or other
  modified_base (1038)..(1038): a, c, t, g, unknown or other
  modified_base (1045)..(1045): a, c, t, g, unknown or other
  modified_base (1057)..(1057): a, c, t, g, unknown or other
  modified_base (1060)..(1060): a, c, t, g, unknown or other
  modified_base (1068)..(1068): a, c, t, g, unknown or other
  modified_base (1091)..(1092): a, c, t, g, unknown or other
  modified_base (1097)..(1097): a, c, t, g, unknown or other
  modified_base (1125)..(1125): a, c, t, g, unknown or other
  modified_base (1127)..(1127): a, c, t, g, unknown or other
  modified_base (1135)..(1135): a, c, t, g, unknown or other
  modified_base (1137)..(1137): a, c, t, g, unknown or other
  modified_base (1144)..(1144): a, c, t, g, unknown or other
  modified_base (1155)..(1156): a, c, t, g, unknown or other
  modified_base (1306)..(1306): a, c, t, g, unknown or other
  modified_base (1350)..(1350): a, c, t, g, unknown or other
  modified_base (1435)..(1435): a, c, t, g, unknown or other
  modified_base (1480)..(1480): a, c, t, g, unknown or other
aataaagtttnnacgtgtggaattttgtatgtaccatatgaataaggatcggctaantccgtgccagcagccgcggtaatacggaggatccgagcgttatccggatttattgggtttaaagggagcgtaggtggacagttaagtcagttgtgaaagtttgcggctcaaccgtaaaattgcagttgatactggctgtcttgagtacagtagaggtgggcggaattcgtggtgtagcggtgaaatgcttagatatcacgaagaactccgattgcgaaggcagctcactggactgcaactgacactgatgctcgaaagtgtgggtatcaaacaggattagataccctggtagtccacacagtaaacgatgaatactcgctgtttgcgatatacagtaagcggccaagcgaaagcattaagtattccacctggggagtacgccggcaacggtgaaactcaaaggaattgacgggggcccgcacaagcggaggaacatgtggtttaattcgatgatacgcgaggaaccttacccgggcttaaattgcatttgaatattttggaaacagtatagccgtaaggcaaatgtgaaggtgctgcatggttgtcgtcagctcgtgccgtgaggtgtcggcttaagtgccataacgagcgcaacccttatctttagttactaacaggtcatgctgaggactctagagagactgccgtcgtaagatgtgaggaaggtggggatgacgtcaaatcagcacggcccttacgtccggggctacacacgtgttacaatggggggtacagaaggcagctacctggtgacaggatgctaatcccaaaagcctctctcagttcggatcgaagtctgcaacccgacttcgtgaagctggattcgctagtaatcgcgcatcagccatggcgcggtgaatacgttcccgggccttgtacacaccgcccgtcaagccatgaaagccgggggtacctgaagtacgtaaccgcaagaaggcggctntctggacnntaactgacgctgangcnngaaagngtggngagcaancaggattagatnccntggtagtncacgccgtaaacgatgagtagtnngtgtnggggggttacccccctcggtgccgcaantnaagcattnantactccncctgggaaatnngctcgcaagagtgaaaatcaaaagaattgacggggagccccacaagtagcggagcatgtggtttaatttgaagcaacgcggaaaaccttacctaagtttgacattccattgacctttccataatcgaaaatttcccttcggggacagtgntaacaggtggggcatggtttttgtcagctcgtctcgtgaaatgnggggttaattcccccaacgcgcccacccctttcctttttttcccaccattaagttgggcactctagagagactgccgaggataantcggaggaaggtggggatgacgtcaaatcatcatgccccttatgnccagggctacacacgtgctaca

SEQ ID NO: 317 - DNA, 715 bp, Bacteroides sp.
  B2
  modified_base (650)..(650): a, c, t, g, unknown or other
taggggttctgagaggaaggtcccccacattggaactgagacacggtccaaactcctacgggaggcagcagtgaggaatattggtcaatgggcgcaggcctgaaccagccaagtagcgtgaaggatgactgccctatgggttgtaaacttcttttatatgggaataaagttttccacgtgtggaattttgtatgtaccatatgaataaggatcggctaactccgtgccagcagccgcggtaatacggaggatccgagcgttatccggatttattgggtttaaagggagcgtaggtggacagttaagtcagttgtgaaagtttgcggctcaaccgtaaaattgcagttgatactggctgtcttgagtacagtagaggtgggcggaattcgtggtgtagcggtgaaatgcttagatatcacgaagaactccgattgcgaaggcagctcactggactgcaactgacactgatgctcgaaagtgtgggtatcaaacaggattagataccctggtagtccacacagtaaacgatgaatactcgctgtttgcgatatacagtaagcggccaagcgaaagcattaagtattccacctggggagtacgccggcaacggtgaaactcaaaggaattgacgggggcccgcacaagcggangaacatgtggtttaattcgatgatacgcgaggaaccttacccgggcttaaattgcatttgaatat

SEQ ID NO: 318 - DNA, 1517 bp, Bacteroides sp.
  D1
agagtttgatcctggctcaggatgaacgctagctacaggcttaacacatgcaagtcgaggggcagcattttagtttgcttgcaaactaaagatggcgaccggcgcacgggtgagtaacacgtatccaacctgccgataactcggggatagcctttcgaaagaaagattaatatccgatggtatattaaaaccgcatggttttactattaaagaatttcggttatcgatggggatgcgttccattagtttgttggcggggtaacggcccaccaagactacgatggataggggttctgagaggaaggtcccccacattggaactgagacacggtccaaactcctacgggaggcagcagtgaggaatattggtcaatggacgagagtctgaaccagccaagtagcgtgaaggatgactgccctatgggttgtaaacttcttttatatgggaataaagtattccacgtgtggaattttgtatgtaccatatgaataaggatcggctaactccgtgccagcagccgcggtaatacggaggatccgagcgttatccggatttattgggtttaaagggagcgtaggtggattgttaagtcagttgtgaaagtttgcggctcaaccgtaaaattgcagttgaaactggcagtcttgagtacagtagaggtgggcggaattcgtggtgtagcggtgaaatgcttagatatcacgaagaactccgattgcgaaggcagctcactagactgcaactgacactgatgctcgaaagtgtgggtatcaaacaggattagataccctggtagtccacacagtaaacgatgaatactcgctgtttgcgatatacagtaagcggccaagcgaaagcattaagtattccacctggggagtacgccggcaacggtgaaactcaaaggaattgacgggggcccgcacaagcggaggaacatgtggtttaattcgatgatacgcgaggaaccttacccgggcttaaattgcatttgaataatctggaaacaggttagccgcaaggcaaatgtgaaggtgctgcatggttgtcgtcagctcgtgccgtgaggtgtcggcttaagtgccataacgagcgcaacccttatctttagttactaacaggtcatgctgaggactctagagagactgccgtcgtaagatgtgaggaaggtggggatgacgtcaaatcagcacggcccttacgtccggggctacacacgtgttacaatggggggtacagaaggcagctacctggcgacaggatgctaatcccaaaaacctctctcagttcggatcgaagtctgcaacccgacttcgtgaagctggattcgctagtaatcgcgcatcagccatggcgcggtgaatacgttcccgggccttgtacacaccgcccgtcaagccatgaaagccgggggtacctgaagtacgtaaccgcaaggagcgtcctagggtaaaactggtaattggggctaagtcgtaacaaggtagccgtaccggaaggtgcggctggaacacct

SEQ ID NO: 319 - DNA, 1380 bp, Bacteroides sp.
  D20
  modified_base (8)..(9): a, c, t, g, unknown or other
  modified_base (12)..(12): a, c, t, g, unknown or other
ggggcagnntgnactgtagcttgctaagtttgatggcgaccggcgcacgggtgagtaacacgtatccaacctgccgatgactcggggatagcctttcgaaagaaagattaatacccgatggcataattcttccgcatggtagaactattaaagaatttcggtcatcgatggggatgcgttccattaggttgttggcggggtaacggcccaccaagccttcgatggataggggttctgagaggaaggtcccccacattggaactgagacacggtccaaactcctacgggaggcagcagtgaggaatattggtcaatggacgagagtctgaaccagccaagtagcgtgaaggatgactgccctatgggttgtaaacttcttttatacgggaataaagtgaggcacgtgtgcctttttgtatgtaccgtatgaataaggatcggctaactccgtgccagcagccgcggtaatacggaggatccgagcgttatccggatttattgggtttaaagggagcgtaggcggacgcttaagtcagttgtgaaagtttgcggctcaaccgtaaaattgcagttgatactgggtgtcttgagtacagtagaggcaggcggaattcgtggtgtagcggtgaaatgcttagatatcacgaagaactccgattgcgaaggcagcctgctggactgtaactgacgctgatgctcgaaagtgtgggtatcaaacaggattagataccctggtagtccacacagtaaacgatgaatactcgctgtttgcgatatacagtaagcggccaagcgaaagcgttaagtattccacctggggagtacgccggcaacggtgaaactcaaaggaattgacgggggcccgcacaagcggaggaacatgtggtttaattcgatgatacgcgaggaaccttacccgggcttgaattgcaactgaatgatgtggagacatgtcagccgcaaggcagttgtgaaggtgctgcatggttgtcgtcagctcgtgccgtgaggtgtcggcttaagtgccataacgagcgcaacccttatcgatagttaccatcaggttatgctggggactctgtcgagactgccgtcgtaagatgtgaggaaggtggggatgacgtcaaatcagcacggcccttacgtccggggctacacacgtgttacaatggggggtacagaaggcagctacacggtgacgtgatgctaatccctaaagcctctctcagttcggattggagtctgcaacccgactccatgaagctggattcgctagtaatcgcgcatcagccacggcgcggtgaatacgttcccgggccttgtacacaccgcccgtcaagccatgaaagccgggggtacctgaagtgcgtaaccgcaagg

SEQ ID NO: 320 - DNA, 1533 bp, Bacteroides sp.
  D22
ttacaatgaagagtttgatcctggctcaggatgaacgctagctacaggcttaacacatgcaagtcgaggggcagcattttagtttgcttgcaaactgaagatggcgaccggcgcacgggtgagtaacacgtatccaacctgccgataactcggggatagcctttcgaaagaaagattaatatccgatggtatattaaaaccgcatggttttactattaaagaatttcggttatcgatggggatgcgttccattagtttgttggcggggtaacggcccaccaagactacgatggataggggttctgagaggaaggtcccccacattggaactgagacacggtccaaactcctacgggaggcagcagtgaggaatattggtcaatggacgagagtctgaaccagccaagtagcgtgaaggatgactgccctatgggttgtaaacttcttttatatgggaataaagtattccacgtgtgggattttgtatgtaccatatgaataaggatcggctaactccgtgccagcagccgcggtaatacggaggatccgagcgttatccggatttattgggtttaaagggagcgtaggtggattgttaagtcagttgtgaaagtttgcggctcaaccgtaaaattgcagttgaaactggcagtcttgagtacagtagaggtgggcggaattcgtggtgtagcggtgaaatgcttagatatcacgaagaactccgattgcgaaggcagctcactagactgcaactgacactgatgctcgaaagtgtgggtatcaaacaggattagataccctggtagtccacacagtaaacgatgaatactcgctgtttgcgatatacagtaagcggccaagcgaaagcattaagtattccacctggggagtacgccggcaacggtgaaactcaaaggaattgacgggggcccgcacaagcggaggaacatgtggtttaattcgatgatacgcgaggaaccttacccgggcttaaattgcaaatgaataatctggaaacaggttagccgcaaggcatttgtgaaggtgctgcatggttgtcgtcagctcgtgccgtgaggtgtcggcttaagtgccataacgagcgcaacccttatctttagttactaacaggtcatgctgaggactctagagagactgccgtcgtaagatgtgaggaaggtggggatgacgtcaaatcagcacggcccttacgtccggggctacacacgtgttacaatggggggtacagaaggcagctacctggcgacaggatgctaatcccaaaaacctctctcagttcggatcgaagtctgcaacccgacttcgtgaagctggattcgctagtaatcgcgcatcagccatggcgcggtgaatacgttcccgggccttgtacacaccgcccgtcaagccatgaaagccgggggtacctgaagtacgtaaccgcaaggagcgtcctagggtaaaactggtaattggggctaagtcgtaacaaggtagccgtaccggaaggtgcggctggaacacctcctttct

SEQ ID NO: 321 - DNA, 1040 bp, Bacteroides sp.
  D2
  modified_base (15)..(15): a, c, t, g, unknown or other
  modified_base (17)..(19): a, c, t, g, unknown or other
  modified_base (33)..(33): a, c, t, g, unknown or other
  modified_base (35)..(36): a, c, t, g, unknown or other
  modified_base (42)..(42): a, c, t, g, unknown or other
gcgtgaaggatgaangnnntatgggtcgtaaantnnttttanatgggaataaagttttccacgtgtggaatttgtatgtaccatatgaataaggatcggctaactccgtgccagcagccgcggtaatacggaggatccgagcgttatccggatttattgggtttaaagggagcgtaggtggattgttaagtcagttgtgaaagtttgcggctcaaccgtaaaattgcagttgaaactggcagtcttgagtacagtagaggtgggcggaattcgtggtgtagcggtgaaatgcttagatatcacgaagaactccgattgcgaaggcagctcactagactgttactgacactgatgctcgaaagtgtgggtatcaaacaggattagataccctggtagtccacacagtaaacgatgaatactcgctgtttgcgatatacagtaagcggccaagcgaaagcattaagtattccacctggggagtacgccggcaacggtgaaactcaaaggaattgacgggggcccgcacaagcggaggaacatgtggtttaattcgatgatacgcgaggaaccttacccgggcttaaattgcaacagaatatattggaaacagtatagccgcaaggcagttgtgaaggtgctgcatggttgtcgtcagctcgtgccgtgaggtgtcggcttaagtgccataacgagcgcaacccttatctttagttactaacaggttatgctgaggactctagagagactgccgtcgtaagatgtgaggaaggtggggatgacgtcaaatcagcacggcccttacgtccggggctacacacgtgttacaatggggggtacagaaggcagctacccggcgacaggatgctaatcccaaaaacctctctcagttcggatcgaagtctgcaacccgacttcgtgaagctggattcgctagtaatcgcgcatcagccatggcgcggtgaatacgttcccgggccttgtacacaccgcccgtcaagccatgaaagccgggggtacctgaagtacgtaaccgcaaggag

SEQ ID NO: 322 - DNA, 1048 bp, Bacteroides sp.
  F-4
  modified_base (33)..(33): a, c, t, g, unknown or other
  modified_base (42)..(42): a, c, t, g, unknown or other
caagtagcgtgaaggatgactgccctatgggtngtaaacttnttttatacgggaataaagtgaggcacgtgtgcctttttgtatgtaccgtatgaataaggatcggctaactccgtgccagcagccgcggtaatacggaggatccgagcgttatccggatttattgggtttaaagggagcgtaggcggacgcttaagtcagttgtgaaagtttgcggctcaaccgtaaaattgcagttgatactgggtgtcttgagtacagtagaggcaggcggaattcgtggtgtagcggtgaaatgcttagatatcacgaagaactccgattgcgaaggcagcttgctggactgtaactgacgctgatgctcgaaagtgtgggtatcaaacaggattagataccctggtagtccacacagtaaacgatgaatactcgctgtttgcgatatacagtaagcggccaagcgaaagcgttaagtattccacctggggagtacgccggcaacggtgaaactcaaaggaattgacgggggcccgcacaagcggaggaacatgtggtttaattcgatgatacgcgaggaaccttacccgggcttgaattgcaactgaatgatgtggagacatgtcagccgcaaggcagttgtgaaggtgctgcatggttgtcgtcagctcgtgccgtgaggtgtcggcttaagtgccataacgagcgcaacccttatcgatagttaccatcaggttatgctggggactctgtcgagactgccgtcgtaagatgtgaggaaggtggggatgacgtcaaatcagcacggcccttacgtccggggctacacacgtgttacaatggggggtacagaaggcagctacacggtgacgtgatgctaatcccgaaagcctctctcagttcggattggagtctgcaacccgactccatgaagctggattcgctagtaatcgcgcatcagccacggcgcggtgaatacgttcccgggccttgtacacaccgcccgtcaagccatgaaagccgggggtacctgaagtgcgtaaccgcaaggagc

SEQ ID NO: 323 - DNA, 627 bp, Bacteroides sp.
  NB-8
  modified_base (407)..(407): a, c, t, g, unknown or other
  modified_base (490)..(490): a, c, t, g, unknown or other
  modified_base (512)..(512): a, c, t, g, unknown or other
  modified_base (515)..(515): a, c, t, g, unknown or other
gaactgagacacggtccaaactcctacgggaggcagcagtgaggaatattggtcaatggacgagagtctgaaccagccaagtagcgtgaaggatgaaggttctatggattgtaaacttcttttatacgggaataaacggatccacgtgtggatttttgcatgtaccgtatgaataaggatcggctaactccgtgccagcagccgcggtaatacggaggatccgagcgttatccggatttattgggtttaaagggagcgtagatgggttgttaagtcagttgtgaaagtttgcggctcaaccgtaaaattgcaattgatactggcagtcttgagtacagttgaggtaggcggaattcgtggtgtagcggtgaaatgcttagatatcacgaagaactccgattgcgaangcagcttactaacctgtaactgacattgatgctcgaaagtgtgggtatcaaacaggattagataccctggtagtccacacggnaaacgatgaatactcgctgtangcnatatacagtctgcggccaagcgaaagcattaagtattccacctggggagtacgcccggcacggtgaaactcaaaggaattgacgggggcccgcacaagcggaggaacatgtg

SEQ ID NO: 324 - DNA, 1361 bp, Bacteroides sp.
  WH2
agtcgaggggcagcatgacctagcaatagggttgatggggcgaccggcgcacggtgtgagtaacacgtatccaacctaccggttattccgggatagcctttcgaaagaaagattaataccggatagtataacgagaaggcatcttcttgttattaaagaatttcgataaccgatggggatgcgttccattagtttgttggcggggtaacggcccaccaagacatcgatggataggggttctgagaggaaggtcccccacattggaactgagacacggtccaaactcctacgggaggcagcagtgaggaatattggtcaatggacgagagtctgaaccagccaagtagcgtgaaggatgactgccctatgggttgtaaacttcttttatatgggaataaagtgagccacgtgtggctttttgtatgtaccatacgaataaggatcggctaactccgtgccagcagccgcggtaatacggaggatccgagcgttatccggatttattgggtttaaagggagcgtaggcggactattaagtcagctgtgaaagtttgcggctcaaccgtaaaattgcagttgatactggtcgtcttgagtgcagtagaggtaggcggaattcgtggtgtagcggtgaaatgcttagatatcacgaagaactccgattgcgaaggcagcttactggactgtaactgacgctgatgctcgaaagtgtgggtatcaaacaggattagataccctggtagtccacacagtaaacgatgaatactcgctgtttgcgatatacggcaagcggccaagcgaaagcattaagtattccacctggggagtacgccggcaacggtgaaactcaaaggaattgacgggggcccgcacaagcggaggaacatgtggtttaattcgatgatacgcgaggaaccttacccgggcttaaattgcatatgaatattgtggaaacagaatagccgcaaggcagatgtgaaggtgctgcatggttgtcgtcagctcgtgccgtgaggtgtcggcttaagtgccataacgagcgcaacccttatctttagttactaacaggtcatgctgaggactctagagagactgccgtcgtaagatgtgaggaaggtggggatgacgtcaaatcagcacggcccttacgtccggggctacacacgtgttacaatggggggtacagaaggcagctacacagcgatgtgatgctaatcccaaaagcctctctcagttcggattggagtctgcaacccgactccatgaagctggattcgctagtaatcgcgcatcagccacggcgcggtgaatacgttcccgggccttgtacacaccgcccgtcaagccatgaaagccggggg

SEQ ID NO: 325 - DNA, 1357 bp, Bacteroides sp.
  XB12B
cgaggggcagcatgacctagcaataggttgatggcgaccggcgcacgggtgagtaacacgtatccaacctaccggttattccgggatagcctttcgaaagaaagattaataccggatagtataacgagaaggcatctttttgttattaaagaatttcgataaccgatggggatgcgttccattagtttgttggcggggtaacggcccaccaagacatcgatggataggggttctgagaggaaggtcccccacattggaactgagacacggtccaaactcctacgggaggcagcagtgaggaatattggtcaatggacgagagtctgaaccagccaagtagcgtgaaggatgactgccctatgggttgtaaacttcttttatatgggaataaagtgagccacgtgtggctttttgtatgtaccatacgaataaggatcggctaactccgtgccagcagccgcggtaatacggaggatccgagcgttatccggatttattgggtttaaagggagcgtaggcggactattaagtcagctgtgaaagtttgcggctcaaccgtaaaattgcagttgatactggtcgtcttgagtgcagtagaggtaggcggaattcgtggtgtagcggtgaaatgcttagatatcacgaagaactccgattgcgaaggcagcttactggactgtaactgacgctgatgctcgaaagtgtgggtatcaaacaggattagataccctggtagtccacacagtaaacgatgaatactcgctgtttgcgatatacagcaagcggccaagcgaaagcattaagtattccacctggggagtacgccggcaacggtgaaactcaaaggaattgacgggggcccgcacaagcggaggaacatgtggtttaattcgatgatacgcgaggaaccttacccgggcttaaattgcatctgaataatttggaaacagattagccgcaaggcagatgtgaaggtgctgcatggttgtcgtcagctcgtgccgtgaggtgtcggcttaagtgccataacgagcgcaacccttatctttagttactaacaggtcatgctgaggactctagagagactgccgtcgtaagatgtgaggaaggtggggatgacgtcaaatcagcacggcccttacgtccggggctacacacgtgttacaatggggggtacagaaggcagctacacagcgatgtgatgctaatcccaaaagcctctctcagttcggattggagtctgcaacccgactccatgaagctggattcgctagtaatcgcgcatcagccacggcgcggtgaatacgttcccgggccttgtacacaccgcccgtcaagccatgaaagccgggggtac

SEQ ID NO: 326 - DNA, 1407 bp, Bacteroides sp.
  XB44A
  modified_base (42)..(42): a, c, t, g, unknown or other
gctcaggcttagccatgcaagtcgaggggcagcatgacttancaataggttgatggcgaccggcgcacgggtgagtaacacgtatccaacctgccgattattccgggatagcctttcgaaagaaagattaatactggatagcataacgagaaggcatcttcttgttattaaagaatttcgataatcgatggggatgcgttccattagtttgttggcggggtaacggcccaccaagacatcgatggataggggttctgagaggaaggtcccccacattggaactgagacacggtccaaactcctacgggaggcagcagtgaggaatattggtcaatggacgagagtctgaaccagccaagtagcgtgaaggatgactgccctatgggttgtaaacttcttttgtatgggaataaagtgagccacgtgtggctttttgtatgtaccatacgaataaggatcggctaactccgtgccagcagccgcggtaatacggaggatccgagcgttatccggatttattgggtttaaagggagcgtaggcggattattaagtcagttgtgaaagtttgcggctcaaccgtaaaattgcagttgatactggtagtcttgagtgcagcagaggtaggcggaattcgtggtgtagcggtgaaatgcttagatatcacgaagaactccgattgcgaaggcagcttactggactgtaactgacgctgatgctcgaaagtgtgggtatcaaacaggattagataccctggtagtccacacagtaaacgatgaatactcgctgtttgcgatatacagcaagcggccaagcgaaagcattaagtattccacctggggagtacgccggcaacggtgaaactcaaaggaattgacgggggcccgcacaagcggaggaacatgtggtttaattcgatgatacgcgaggaaccttacccgggcttaaattgcaactgacggatttggaaacagatcttccttcgggcagttgtgaaggtgctgcatggttgtcgtcagctcgtgccgtgaggtgtcggcttaagtgccataacgagcgcaacccttatctttagttactaacaggtcatgctgaggactctagagagactgccgtcgtaagatgtgaggaaggtggggatgacgtcaaatcagcacggcccttacgtccggggctacacacgtgttacaatggggggtacagaaggcagctacacagcgatgtgatgctaatcccaaaagcctctctcagttcggattggagtctgcaacccgactccatgaagctggattcgctagtaatcgcgcatcagccacggcgcggtgaatacgttcccgggccttgtacacaccgcccgtcaagccatgaaagccgggggtacttgaagtacgtaaccgcaaggagcgtct

SEQ ID NO: 327 - DNA, 1261 bp, Bacteroides stercoris
atggtatagttttcccgcatgggataattattaaagaatttcggttgtcgatggggatgcgttccattaggcagttggcggggtaacggcccaccaaacctacgatggataggggttctgagaggaaggtcccccacattggaactgagacacggtccaaactcatacgggaggcagcagtgaggaatattggtcaatggacgagagtctgaaccagccaagtagcgtgaaggatgactgccctatgggttgtaaacttcttttatacgggaataaagttagccacgtgtggttttttgtatgtaccgtatgaataaggatcggctaactccgtgccagcagccgcggtaatacggaggatccgagcgttatccggatttattgggtttaaagggagcgtaggcgggttgttaagtcagttgtgaaagtttgcggctcaaccgtaaaattgcagttgatactggcgaccttgagtgcaacagaggtaggcggaattcgtggtgtagcggtgaaatgcttagatatcacgaagaactccgattgcgaaggcagcttactggattgtaactgacgctgatgctcgaaagtgtgggtatcaaacaggattagataccctggtagtccacacagtaaacgatgaatactcgctgttggcgatatacggtcagcggccaagcgaaagcattaagtattccacctggggagtacgccggcagcggtgaaactcaaaggaattgacgggggcccgcacaagcggaggaacatgtggtttaattcgatgatacgcgaggaaccttacccgggcttaaattgcaactgacggaatcggaaacggttctttcttcggacagttgtgaaggtgctgcatggttgtcgtcagctcgtgccgtgaggtgtcggcttaagtgccataacgagcgcaacccttacgggtagttaccatcaggttatgctggggactctacccggactgccgtcgtaagatgtgaggaaggtggggatgacgtcaaatcagcacggcccttacgtccggggctacacacgtgttacaatggggggtacagaaggcagctacacggcgacgtggtgctaatcccaaaagcctctctcagttcggattggagtctgcaacccgactccatgaagctggattcgctagtaatcgcgcatcagccacggcgcggtgaatacgttcccgggccttgtacacaccgcccgtcaagccatgaaagccgggggtacctgaagtacgtaaccgcga

SEQ ID NO: 328 - DNA, 962 bp, Bacteroides thetaiotaomicron
  modified_base (754)..(755): a, c, t, g, unknown or other
  modified_base (946)..(948): a, c, t, g, unknown or other
  modified_base (951)..(951): a, c, t, g, unknown or other
tcgaggggcagcatttcagtttgcttgcaaactggagatggcgaccggcgcacgggtgagtaacacgtatccaacctgccgataactcggggatagcctttcgaaagaaagattaatacccgatggtataatgaaaccgcatggtcttattattaaagaatttcggttatcgatggggatgcgttccattaggcagttggtgaggtaacggctcaccaaaccttcgatggataggggttctgagaggaaggtcccccacattggaactgagacacggtccaaactcctacgggaggcagcagtgaggaatattggtcaatgggcgcaggcctgaaccagccaagtagcgtgaaggatgactgccctatgggttgtaaacttcttttatatgggaataaagttttccacgtgtggaattttgtatgtaccatatgaataaggatcggctaactccgtgccagcagccgcggtaatacggaggatccgagcgttatccggatttattgggtttaaagggagcgtaggtggacagttaagtcagttgtgaaagtttgcggctcaaccgtaaaattgcagttgatactggctgtcttgagtacagtagaggtgggcggaattcgtggtgtagcggtgaaatgcttagatatcacgaagaactccgattgcgaaggcagctcactggactgcaactgacactgatgctcgaaagtgtgggtatcaaacaggattagataccctggtagtccacacagtnncgatgaatactcgctgtttgcgatatacagtaagcggccaagcgaaagcattaagtattccacctggggagtacgccggcaacggtgaaactcaaaggaattgacgggggcccgcacaagcggaggaacatgtggtttaattcgatgatacgcgaggaaccttacccgggcttaaattgcatttgaatatnnntgnaacagtatagc

SEQ ID NO: 329 - DNA, 1382 bp, Bacteroides uniformis
cgaggggcagcatgaacttagcttgctaagtttgatggcgaccggcgcacgggtgagtaacacgtatccaacctgccgatgactcggggatagcctttcgaaagaaagattaatacccgatggcatagttcttccgcatggtggaactattaaagaatttcggtcatcgatggggatgcgttccattaggttgttggcggggtaacggcccaccaagccttcgatggataggggttctgagaggaaggtcccccacattggaactgagacacggtccaaactcctacgggaggcagcagtgaggaatattggtcaatggacgagagtctgaaccagccaagtagcgtgaaggatgactgccctatgggttgtaaacttcttttatacgggaataaagtgaggcacgtgtgcctttttgtatgtaccgtatgaataaggatcggctaactccgtgccagcagccgcggtaatacggaggatccgagcgttatccggatttattgggtttaaagggagcgtaggcggacgcttaagtcagttgtgaaagtttgcggctcaaccgtaaaattgcagttgatactgggtgtcttgagtacagtagaggcaggcggaattcgtggtgtagcggtgaaatgcttagatatcacgaagaactccgattgcgaaggcagcttgctggactgtaactgacgctgatgctcgaaagtgtgggtatcaaacaggattagataccctggtagtccacacagtaaacgatgaatactcgctgtttgcgatatacagtaagcggccaagcgaaagcgttaagtattccacctggggagtacgccggcaacggtgaaactcaaaggaattgacgggggcccgcacaagcggaggaacatgtggtttaattcgatgatacgcgaggaaccttacccgggtttgaattgcaactgaatgatgtgagtacagtagagccgcaaggcagttgtgaaggtgctgcatggttgtcgtcagctcgtgccgtgaggtgtcggcttaagtgccataacgagcgcaacccttatcgatagttaccatcaggttatgctggggactctgtcgagactgccgtcgtaagatgtgaggaaggtggggatgacgtcaaatcagcacggcccttacgtccggggctacacacgtgttacaatggggggtacagaaggcagctacacggtgacgtgatgctaatcccgaaagcctctctcagttcggattggagtctgcaacccgactccatgaagctggattcgctagtaatcgcgcatcagccacggcgcggtgaatacgttcccgggccttgtacacaccgcccgtcaagccatgaaagccgggggtacctgaagtgcgtaaccgcaagg

SEQ ID NO: 330 - DNA, 1370 bp, Bacteroides ureolyticus
gaggaacaacagttggaaacggctgctaatacctcatactcctatttgacataagttaaatagggaaagtcttttcggtgtaggatgagactatatcgtatcagctagttggtaaggtaatggcttaccaaggctatgacgcgtaactggtctgagaggatgatcagtcacattggaactgagacacggtccaaactcctacgggaggcagcagtaaggaatattgcgcaatgggggaaaccctgacgcagcaacgccgcgtggaggatgacacttttcggagcgtaaactccttttatcaggaaagaataatgacggtacctgatgaataagcaccggctaactccgtgccagcagccgcggtaatacggggggtgcaagcgttactcggaatcactgggcgtaaaggacgcgtaggcggattatcaagtcttttgtgaaatctagtggcttaaccactaaactgcttaggaaactgatagtctagagtaggggagaggtagatggaattcttggtgtaggggtaaaatccgtagagatcaagaagaatacccattgcgaaagcgatctgctggaacctaactgacgctgaggcgtgaaagcgtgggtagcaaacaggattagataccctggtagtccacgccctaaacgatgtatactagttgttgctttgctagtcaaggcagtaatgcagctaacgcattaagtataccgcctggggagtacggtcgcaagattaaaactcaaaggaatagacggggacccgcacaagcggtggagcatgtggtttaattcgaagatacgcgaagaaccttacctggacttgacatcctaaaaacatctaagagattagaaagtgctagtttactagaatttagtgacaggtgctgcacggctgtcgtcagctcgtgtcgtgagatgttgggttaagtcccgcaacgagcgcaacccacgtgtttagttgctaacagctcggctgagcactctaaacagactgccttcgtaaggaggaggaaggtgtggacgacgtcaagtcatcatggcccttatgtccagggcgacacacgtgctacaatgacatatacagtaagacgcaatatcgcaagatggagcaaatctataaaatatgtcccagttcggattgtggtctgcaactcgaccccatgaagccggaatcgctagtaatcgtagatcagccatgctacggtgaatacgttcccgggtcttgtactcaccgcccgtcacaccatggaagttgatctcactcgaagcagggatgctaaaatagctaccttccacagtggaatcagtaactggggtgaagtcgtaacaaggtaaccgtaggagaacctgcggttggatcacctcct

SEQ ID NO: 331 - DNA, 1388 bp, Bacteroides vulgatus
  modified_base (36)..(37): a, c, t, g, unknown or other
  modified_base (1072)..(1072): a, c, t, g, unknown or other
agtcgaggggcagcatggtcttagcttgctaagacnngatggcgaccggcgcacgggtgagtaacacgtatccaacctgccgtctactcttggacagccttctgaaaggaagattaatacaagatggcatcatgagtccgcatgttcacatgattaaaggtattccggtagacgatggggatgcgttccattagatagtaggcggggtaacggcccacctagtcttcgatggataggggttctgagaggaaggtcccccacattggaactgagacacggtccaaactcctacgggaggcagcagtgaggaatattggtcaatgggcgagagcctgaaccagccaagtagcgtgaaggatgactgccctatgggttgtaaacttcttttataaaggaataaagtcgggtatgcatacccgtttgcatgtactttatgaataaggatggctaactccgtgccagcagccgcggtaatacggaggatccgagcgttatccggatttattgggtttaaagggagcgtagatggatgtttaagtcagttgtgaaagtttgcggctcaaccgtaaaattgcagttgatactggatatcttgagtgcagttgaggcaggcggaattcgtggtgtagcggtgaaatgcttagatatcacgaagaactccgattgcgaaggcagcctgctaagctgcaactgacattgaggctcgaaagtgtgggtatcaaacaggattagataccctggtagtccacacggtaaacgatgaatactcgctgtttgcgatatacgcaagcggccaagcgaaagcgttaagtattccacctggggagtacgccggcaacggtgaaactcaaaggaattgacgggggcccgcacaagcggaggaacatgtggtttaattcgatgattcgcgaggaaccttacccggtattaaattgcagatgaattacggtaaaagccgtaggccgcaaggcatctgtgaattgatactgggtatcttgacagctcgtgccgtgaggtgtcggcttaagtgccataacgagcgcaacccttgttgtcagttactaacaggttntgctgaggactctgacaagactgccatcgtaagatgtgaggaaggtggggatgacgtcaaatcagcacggcccttacgtccggggctacacacgtgttacaatggggggtacagagggccgctaccacgcgagtggatgccaatcccaaaaacctctctcagttcggactggagtctgcaacccgactccacgaagctggattcgctagtaatcgcgcatcagccacggcgcggtgaatacgttcccgggccttgtacacaccgcccgtcaagccatgggagccgggggtacctgaagtgcgtaaccgcgaggagc

SEQ ID NO: 332 - DNA, 1508 bp, Bacteroides xylanisolvens
agagtttgatcctggctcaggatgaacgctagctacaggcttaacacatgcaagtcgaggggcagcattttagtttgcttgcaaactaaagatggcgaccggcgcacgggtgagtaacacgtatccaacctgccgataactcggggatagcctttcgaaagaaagattaatatccgatagtatattaaaccgcatggttttactattaaagaatttcggttatcgatggggatgcgttccattagtttgttggcggggtaacggcccaccaagactacgatggataggggttctgagaggaaggtcccccacattggaactgagacacggtccaaactcctacgggaggcagcagtgaggaatattggtcaatggacgagagtctgaaccagccaagtagcgtgaaggatgactgccctatgggttgtaaacttcttttatatgggaataaagtattccacgtgtggaattttgtatgtaccatatgaataaggatcggctaactccgtgccagcagccgcggtaatacggaggatccgagcgttatccggatttattgggtttaaagggagcgtaggtggattgttaagtcagttgtgaaagtttgcggctcaaccgtaaaattgcagttgaaactggcagtcttgagtacagtagaggtgggcggaattcgtggtgtagcggtgaaatgcttagatatcacgaagaactccgattgcgaaggcagctcactagactgcaactgacactgatgctcgaaagtgtgggtatcaaacaggattagataccctggtagtccacacagtaaacgatgaatactcgctgtttgcgatatacagtaagcggccaagcgaaagcattaagtattccacctggggagtacgccggcaacggtgaaactcaaaggaattgacgggggcccgcacaagcggaggaacatgtggtttaattcgatgatacgcgaggaaccttacccgggcttaaattgcatttgaataatctggaaacaggttagccgcaaggcaaatgtgaaggtgctgcatggttgtcgtcagctcgtgccgtgaggtgtcggcttaagtgccataacgagcgcaacccttatctttagttactaacaggtcatgctgaggactctagagagactgccgtcgtaagatgtgaggaaggtggggatgacgtcaaatcagcacggcccttacgtccggggctacacacgtgttacaatggggggtacagaaggcagctacctggcgacaggatgctaatcccaaaaacctctctcagttcggatcgaagtctgcaacccgacttcgtgaagctggattcgctagtaatcgcgcatcagccatggcgcggtgaatacgttcccgggccttgtacacaccgcccgtcaagccatgaaagccgggggtacctgaagtacgtaaccgcaaggagcgtcctagggtaaaactggtaattggggctaagtcgtaacaaggtagccgtaccggaaggtgcggctg

SEQ ID NO: 333 - DNA, 1481 bp, Bacteroidetes bacterium oral taxon D27
agagtttgatcctggctcaggatgaacgctagcggcaggcctaacacatgcaagtcgaggggtagtcccgatttatcgggatgagaccggcgcacgggtgcgtaacgcgtatgcaatctaccttatactaagggatagcccagagaaatttggattaataccttatagttaataaaaaaggcatctttttaattataaagattaattggtataagatgagcatgcgtcccattagttagttggtaaggtaacggcttaccaagacgatgatgggtaggggtcctgagagggagatcccccacactggtactgagacacggaccagactcctacgggaggcagcagtgaggaatattggtcaatgggcgcaagcctgaaccagccatgccgcgtgcaggatgacgcatctatggtgtgtaaactgcttttgtacaggaagaaacctcccgacgagtcgggacttgacggtactgtaagaataaggatcggctaactccgtgccagcagccgcggtaatacggaggatccaagcgttatccggaatcattgggcttaaagggtccgtaggcggcttaataagtcagcggtgaaagtttttggcttaaccaaaaaattgccattgatactgttaggcttgaatttttgtgaagtaactagaatatgtagtgtagcggtgaaatgcttagatattacatggaataccaattgcgaaggcaggttactaacaaacgattgacgctgatggacgaaagcgtgggtagcgaacaggattagataccctggtagtccacgccgtaaacgatggatactagctgttcgggcgtaagcttgagtggctaagcgaaagtgataagtatcccacctggggagtacgggcgcaagcctgaaactcaaaggaattgacgggagcccgcacaagcggtggagcatgtggtttaattcgatgatacgcgaggaaccttaccagggcttaaatgtattttgaccgtttaggaaactagactttcgcaagacaaaatacaaggtgctgcatggttgtcgtcagctcgtgccgtgaggtgtcaggttaagtcctataacgagcgcaacccctgttgttagttgccagcgagtcaagtcgggaactctaacaagactgccagtgtaaactgtgaggaaggtggggatgacgtcaaatcatcacggcccttacgtcctgggccacacacgtgctacaatggacggcacagagagcagctaccaggtgactggatgcgaatctataaaaccgttctcagttcggatcggagtctgcaactcgactccgtgaagctggaatcgctagtaatcggatatcagccatgatccggtgaatacgttcccgggccttgtacacaccgcccgtcaagccatggaagctgggggtacctgaagtcggtgaccgcaaggagctgcctagggtaaaactggtaactagggctaagtcgtaacaaggtagccgt

SEQ ID NO: 334 - DNA, 1481 bp, Bacteroidetes bacterium oral taxon F31
agagtttgatcctggctcaggatgaacgctagcggcaggcctaacacatgcaagtcgaggggtagaggaagcttgcttccttgagaccggcgcacgggtgcgtaacgcgtatgcaatctaccttgtacagggggatagcccagagaaatttggattaatacctcatagtgtttaagagtggcatcacttttttactaaagttccaacggtacaagatgagcatgcgtcccattagctagttggtgtggtaacggcataccaaggcaatgatgggtaggggtcctgagagggaggtcccccacactggtactgagacacggaccagactcctacgggaggcagcagtgaggaatattgggcaatggaggcaactctgacccagccatgccgcgtgcaggaagacggtcctatggattgtaaactgcttttgtacgagaagaaacatcccgacgtgtcgggacttgacggtatcgtaagaataaggatcggctaactccgtgccagcagccgcggtaatacggaggatccaagcgttatccggaatcattgggtttaaagggtccgtaggcggtcttataagtcagtggtgaaatctcctagctcaactaggaaactgccattgatactgtaagacttgaatgtttgtgaagtaactagaatatgtagtgtagcggtgaaatgcttagatattacatggaataccaattgcgaaggcaggttactaacagatgattgacgctgatggacgaaagcgtggggagcgaacaggattagataccctggtagtccacgccgtaaacgatggatactagctgttcgagagcaatcttgagtggctaagcgaaagtgataagtatcccacctggggagtacgcacgcaagtgtgaaactcaaaggaattgacgggggcccgcacaagcggtggagcatgtggtttaattcgatgatacgcgaggaaccttaccagggcttaaatgggagacgacagtttaggaaactagactttcttcggacgtctttcaaggtgctgcatggttgtcgtcagctcgtgccgtgaggtgtcaggttaagtcctataacgagcgcaacccctgttgttagttgccagcgagtaatgtcgggaactctagcaagactgccggtgtaaaccgtgaggaaggtggggatgacgtcaaatcatcacggcccttacgtcctgggccacacacgtgctacaatggcaggtacagagagcagccacttagcgataaggagcgaatctataaaacctgtctcagttcggattggagtctgcaactcgactctatgaagctggaatcgctagtaatcggatatcagccatgatccggtgaatacgttcccgggccttgtacacaccgcccgtcaagccatggaagctgggggtacctgaagtcggtgaccgtaaggagctgcctagggtaaaactagtaactggggctaagtcgtaacaaggtagccgt

SEQ ID NO: 335 - DNA, 1477 bp, Bacteroidetes bacterium oral taxon F44
aagtttgatcctggctcaggatgaacgctagcggcaggcctaacacatgcaagtcgaggggtagaagctttcgggctttgagaccggcgcacgggtgcgtaacgcgtatgcaatctgccttgtactgagggatagcccagagaaatttggattaatacctcatggtattttttgttggcatcaacagattattaaagagattcggtacaagatgagcatgcgtcccattagctagttggtatggtaacggcataccaaggctacgatgggtaggggtcctgagagggagatcccccacactggtactgagacacggaccagactcctacgggaggcagcagtgaggaatattggtcaatggtcgcaagactgaaccagccatgccgcgtgtaggatgaagcatctatggtgtgtaaactacttttgtacgggaagaaacactccctcgtgagggagcttgacggtaccgtaagaataaggatcggctaactccgtgccagcagccgcggtaatacggaggatccaagcgttatccggaatcattgggtttaaagggtccgtaggcggttttataagtcagtggtgaaatccggcagctcaactgtcgaactgccattgatactgtagaacttgaatcattgtgaagtaactagaatatgtagtgtagcggtgaaatgcttagatattacatggaataccaattgcgaaggcaggttactaacaatgtattgacgctgatggacgaaagcgtgggtagcgaacaggattagataccctggtagtccacgccgtaaacgatggatactagctgttcggttgtaagattgagtggctaagcgaaagtgataagtatcccacctggggagtacgggcgcaagcctgaaactcaaaggaattgacgggggcccgcacaagcggtggagcatgtggtttaattcgatgatacgcgaggaaccttaccagggcttaaatgtagtatgacaggtttggaaacagacttttcttcggacatattacaaggtgctgcatggttgtcgtcagctcgtgccgtgaggtgtcaggttaagtcctataacgagcgcaacccctgttgttagttgccatcgagtaatgtcgggaactctaacaagactgccggtgcaaaccgtgaggaaggtggggatgacgtcaaatcatcacggcccttacgtcctgggctacacacgtgctacaatggcaggtacagagagcagccacttcgcaaggaggagcgaatctataaagcctgtctcagttcggattggagtctgcaacccgactccatgaagctggaatcgctagtaatcggatatcagccatgatccggtgaatacgttcccgggccttgtacacaccgcccgtcaagccatggaagctgggggtacctgaagtcggtgaccgcaaggagctgcctagggtaaaactggtaactggggctaagtcgtaacaaggtagccgt

SEQ ID NO: 336 - DNA, 1316 bp, Barnesiella intestinihominis
gatgaacgctagcgacaggcctaacacatgcaagtcgagggaccggcgcacgggtgagtaacacgtatgcaatccacctgtaacagggggataacccggagaaatccggactaataccccataattaaagttggttacagacgagcatgcgctccattagccagttggcggggtaacggcccaccaaagcgacgatggataggggttctgagaggaaggtcccccacattggaactgagacacggtccaaactcctacgggaggcagcagtgaggaatattggtcaatggtcggcagactgaaccagccaagtcgcgtgagggaagacggcctacgggttgtaaacctcttttgtcggagagtatgcaagtatccgaagaaaaagcatcggctaactccgtgccagcagccgcggtaatacggaggatgcgagcgttatccggatttattgggtttaaagggtgcgtaggcggcacgccaagtcagcggtgaaatttccgggctcaacccggagtgtgccgttgaaactggcgagctagagtacacaagaggcaggcggaatgcgtggtgtagcggtgaaatgcatagatatcacgcagaaccccgattgcgaaggcagcctgctagggtgacagacgctgaggcacgaaagcgtgggtatcgaacaggattagataccctggtagtccacgcagtaaacgatgaatactaactgtttgcgtgtaagcggtacagcgaaagcgttaagtattccacctggggagtacgccggcaacggtgaaactcaaaggaattgacgggggcccgcacaagcggaggaacatgtggtttaattcgatgatacgcgaggaaccttacccgggctcaaacgcgaggtgctgcatggttgtcgtcagctcgtgccgtgaggtgtcggcttaagtgccataacgagcgcaacccctatcgacagttactaacggccgaggactctgtcgagactgccggcgcaagccggaggaaggtggggatgacgtcaaatcagcacggcccttacgtccggggcgacacacgtgttacaatggcaggcagaaggcagccagtcagcaatgacgcgcgaatcccgcctgtctcagttcggatggagtctgcaacccgactccagaagctggattcgctagtaatcgcgcatcagccatggcgcggtgaatacgttcccgggccttgtacacaccgcccgtcaagccatggaagccgggagtacctgaagcatgcagcgtacgaaggtaataccggtaactggggctaagtcgtaacaaggtagccgtaccggaagg

SEQ ID NO: 337 - DNA, 1461 bp, Barnesiella viscericola
tcaggatgaacgctagcgacaggcctaacacatgcaagtcgaggggcagcgcggaggtagcaatacttctggcggcgaccggcgcacgggtgagtaacacgtatgcaatctgcctgtaacagggggataacccggagaaatccggcctaataccccataacgacatatcttcgcatggggagatgtctaaagagagcaatcttggttacagatgagcatgcggtccattagccagttggcggggtaacggcccaccaaagcgacgatggataggggttctgagaggaaggtcccccacattggaactgagacacggtccaaactcctacgggaggcagcagtgaggaatattggtcaatggtcggcagactgaaccagccaagtcgcgtgaaggaagacggccctacgggttgtaaacttcttttgtcggagagtaaagtgcgctacgcgtagcgtattgcaagtatccgaagaaaaagcatcggctaactccgtgccagcagccgcggtaatacggaggatgcgagcgttatccggatttattgggtttaaagggtgcgtaggcggcacgccaagtcagcggtgaaatgcccgggcttaacccgggagctgccgttgaaactgcgagctagcgtgcacaagaggcaggcggaatgcgtggtgtagcggtgaaatgcatagatatcacgcagaaccccgattgcgaaggcagcctgctagggtgcaacggacgctgaggcacgaaagcgtggggatcgaacaggattagataccctggtagtccacgcagtaaacgatgaatactaactgtttgcgatataatgtaagcggtacagcgaaagcgttaagtattccacctggggagtacgccggcaacggtgaaactcaaaggaattgacgggggcccgcacaagcggaggaacatgtggtttaattcgatgatacgcgaggaaccttacccgggctcaaacgcagggggaatatgggtgaaagtccatagccagcaatggtcgcctgcgaggtgctgcatggttgtcgtcagctcgtgccgtgaggtgtcggcttaagtgccataacgagcgcaaccctattgacagttactaacgggtcaagccgaggactctgtcgagactgccggcgcaagccgcgaggaaggtggggatgacgtcaaatcagcacggcccttacgtccggggcgacacacgtgttacaatggcaggtacagaaggcagccagtcagcaatgacgcgcgaatcccgaaaacctgtctcagttcggattggagtctgcaactcgactccatgaagctggattcgctagtaatcgcgcatcagccatggcgcggtgaatacgttcccgggccttgtacacaccgcccgtcaagccatggaagccgggagtacctgaagcatgcaaccgcaaggagcgtacgaaggtaataccggtaactggggctaagtc

SEQ ID NO: 338 - DNA, 1492 bp, Bartonella bacilliformis
ttcaacttgagagtttgatcctggctcagaacgaacgctggcggcaggcttaacacatgcaagtcgagcgcactctttttgagtgagcggcagacgggtgagtaacgcgtgggaatctacccatctctacggaataacacagagaaatttgtgctaataccgtatacgtccttcgggagaaagatttatcggagatggatgagcccgcgttggattagctagttggtgaggtaacggcccaccaaggcgacgatccatagctggtctgagaggatgatcagccacactgggactgagacacggcccagactcctacgggaggcagcagtggggaatattggacaatgggggcaaccctgatccagccatgccgcgtgagtgatgaaggccttagggttgtaaagctctttcaccggtgaagataatgacggtagccggagaagaagccccggctaacttcgtgccagcagccgcggtaatacgaagggggctagcgttgttcggatttactgggcgtaaagcgcatgtaggcggatatttaagtcagaggtgaaatcccagggctcaaccttggaactgcctttgatactggatgtctcgagtatggaagaggtgagtggaattccgagtgtagaggtaaaattcgtagatattcggaggaacaccagtggcgaaggcggctcactggtccattactgacgctgaggtgcgaaagcgtggggagcaaacaggattagataccctggtagtccacgccgtaaacgatgaatgttagccgtcgggcagtttactgctcggtggcgcagctaacgcgttaaacattccgcctggggagtacggtcgcaagattaaaactcaaaggaattgacgggggcccgcacaagcggtggagcatgtggtttaattcgaagcaacgcgcagaaccttaccagcccttgacatcccgatcgcggagagtggagacactttccttcagttaggctggatcggagacaggtgctgcatggctgtcgtcagctcgtgtcgtgagatgttgggttaagtcccgcaacgagcgcaaccctcgcccttagttgccagcattcagttgggcactctaaggggactgccggtgataagccgagaggaaggtggggatgacgtcaagtcctcatggcccttacgggctgggctacacacgtgctacaatggtggtgacagtgggcagcgaaaccgcaaggtcgagctaatctccaaaagccatctcagttcggattgcactctgcaactcgagtgcatgaagtcggaatcgctagtaatcgtggatcagcatgccacggtgaatacgttcccgggccttgtacacaccgcccgtcacaccatgggagttggttttacccgaaggtgctgtgctaaccgcaaggaagcaggcaaccacggtagggtcagcgactggggtgaagtcgtaacaaggtagccgtaggggaacctgcggctggatcacctcctttct

SEQ ID NO: 339 - DNA, 1491 bp, Bartonella grahamii
tgagagtttgatcctggctcagaacgaacgctggcggcaggcttaacacatgcaagtcgagcgcactcttttagagtgagcggcaaacgggtgagtaacgcgtgggaatctacccatctctacggaataacacagagaaatttgtgctaataccgtatacgtcctttttggagaaagatttatcggagatggatgagcccgcgttggattagctagttggtgaggtaacggctcaccaaggcgacgatccatagctggtctgagaggatgatcagccacactgggactgagacacggcccagactcctacgggaggcagcagtggggaatattggacaatgggggcaaccctgatccagccatgccgcgtgagtgatgaaggccctagggttgtaaagctctttcaccggtgaagataatgacggtaaccggagaagaagccccggctaacttcgtgccagcagccgcggtaatacgaagggggctagcgttgttcggatttactgggcgtaaagcgcacgtaggcggatatttaagtcagaggtgaaatcccagggctcaaccctggaactgcctttgatactggatatcttgagtatggaagaggtgagtggaattccgagtgtagaggtaaaattcgtagatattcggaggaacaccagtggcgaaggcggctcactggtccattactgacgctgaggtgcgaaagcgtggggagcaaacaggattagataccctggtagtccacgccgtaaacgatgaatgttagccgtcgggcggtttactgctcggtggcgcagctaacgcattaaacattccgcctggggagtacggtcgcaagattaaaactcaaaggaattgacgggggcccgcacaagcggtggagcatgtggtttaattcgaagcaacgcgcagaaccttaccagcccttgacatcccgatcgcggaaggtggagacaccctccttcagttaggctggatcggagacaggtgctgcatggctgtcgtcagctcgtgtcgtgagatgttgggttaagtcccgcaacgagcgcaaccctcgcccttagttgccagcatttagttgggcactctaaggggactgccggtgataagccgagaggaaggtggggatgacgtcaagtcctcatggcccttacgggctgggctacacacgtgctacaatggtggtgacagtgggcagcgagaccgcgaggtcgagctaatctccaaaagccatctcagttcggattgcactctgcaactcgagtgcatgaagttggaatcgctagtaatcgtggatcagcatgccacggtgaatacgttcccgggccttgtacacaccgcccgtcacaccatgggagttggttttacccgaaggtgctgtgctaaccgcaaggaggcaggcaaccacggtagggtcagcgactggggtgaagtcgtaacaaggtagccgtaggggaacctgtggctggatcacctcctttctaagga

SEQ ID NO: 340 - DNA, 1492 bp, Bartonella henselae
ttcaatatgagagtttgatcctggctcagaacgaacgctggcggcaggcttaacacatgcaagtcgagcgcactcttttagagtgagcggcaaacgggtgagtaacgcgtgggaatctacccatctctacggaataacacagagaaatttgtgctaataccgtatacgtccttagggagaaagatttatcggagatggatgagcccgcgttggattagctagttggtgaggtaacggctcaccaaggcgacgatccatagctggtctgagaggatgatcagccacactgggactgagacacggcccagactcctacgggaggcagcagtggggaatattggacaatgggggcaaccctgatccagccatgccgcgtgagtgatgaaggccctagggttgtaaagctctttcaccggtgaagataatgacggtaaccggagaagaagccccggctaacttcgtgccagcagccgcggtaatacgaagggggctagcgttgttcggatttactgggcgtaaagcgcatgtaggcggatatttaagtcagaggtgaaatcccagggctcaaccctggaactgcctttgatactgggtatcttgagtgtggaagaggtgagtggaattccgagtgtagaggtaaaattcgtagatattcggaggaacaccagtggcgaaggcggctcactggtccattactgacgctgaggtgcgaaagcgtggggagcaaacaggattagataccctggtagtccacgccgtaaacgatgaatgttagccgtcgggcggtttactgctcggtggcgcagctaacgcgttaaacattccgcctggggagtacggtcgcaagattaaaactcaaaggaattgacgggggcccgcacaagcggtggagcatgtggtttaattcgaagcaacgcgcagaaccttaccagcccttgacatcccgatcgcggaaggtggagacaccctccttcagttaggctggatcggagacaggtgctgcatggctgtcgtcagctcgtgtcgtgagatgttgggttaagtcccgcaacgagcgcaaccctcgcccttagttgccagcatttggttgggcactctagggggactgccggtgataagccgagaggaaggtggggatgacgtcaagtcctcatggcccttacgggctgggctacacacgtgctacaatggtggtgacagtgggcagcgagaccgcgaggtcgagctaatctccaaaagccatctcagttcggattgcactctgcaactcgagtgcatgaagtcggaatcgctagtaatcgtggatcagcatgccacggtgaatacgttcccgggccttgtacacaccgcccgtcacaccatgggagttggttttacccgaaggtgctgtgctaaccgcaagggggcaggcaaccacggtagggtcagcgactggggtgaagtcgtaacaaggtagccgtaggggaacctgtggctggatcacctcctttct

SEQ ID NO: 341 - DNA, 1493 bp, Bartonella quintana
ttcaatatgagagtttgatcctggctcagaacgaacgctggcggcaggcttaacacatgcaagtcgagcgcactcttttagagtgagcggcaaacgggtgagtaacgcgtgggaatctacccatctctacggaataacacagagaaatttgtgctaataccgtatacgtccctctgggagaaagatttatcggaggtggatgagcccgcgttggattagctagttggtgaggtaagggctcaccaaggcgacgatccatagctggtctgagaggatgatcagccacactgggactgagacacggcccagactcctacgggaggcagcagtggggaatattggacaatgggggcaaccctgatccagccatgccgcgtgagtgatgaaggccctagggttgtaaagctctttcaccggtgaagataatgacgttaaccggagaagaagccccggctaacttcgtgccagcagccgcggtaatacgaagggggctagcgttgttcggatttactgggcgtaaagcgcatgtaggcggatatttaagtcagaggtgaaatcccagggctcaaccctggaactgcctttgatactggatgtctcgagtgtggaagaggtgagtggaattccgagtgtagaggtaaaattcgtagatattcggaggaacaccagtggcgaaggcggctcactggtccattactgacgctgaggtgcgaaagcgtggggagcaaacaggattagataccctggtagtccacgccgtaaacgatgaatgttagccgtcgggtggtttactactcggtggcgcagctaacgcgttaaacattccgcctggggagtacggtcgcaagattaaaactcaaaggaattgacgggggcccgcacaagcggtggagcatgtggtttaattcgaagcaacgcgcagaaccttaccagcccttgacatcccgatcgcggaaggtggagacaccctccttcagttaggctggatcggtgacaggtgctgcatggctgtcgtcagctcgtgtcgtgagatgttgggttaagtcccgcaacgagcgcaaccctcgcccttagttgccatcattaagttgggcactctagggggactgccggtgataagccgagaggaaggtggggatgacgtcaagtcctcatggcccttacgggctgggctacacacgtgctacaatggtggtgacagtgggcagcgagaccgcgaggtcgagctaatctccaaaagccatctcagttcggattgcactctgcaactcgagtgcatgaagttggaatcgctagtaatcgtggatcagcatgccacggtgaatacgttcccgggccttgtacacaccgcccgtcacaccatgggagttggttttacccgaaggtgctgtgctaaccgcaaggaggcaggcaaccacggtagggtcagcgactggggtgaagtcgtaacaaggtagccgtaggggaacctgtggctggatcacctcctttct

SEQ ID NO: 342 - DNA, 1228 bp, Bartonella tamiae
tttcggagtgagcggcagacgggtgagtaacacgtgggaatctacccatctctacggaataacacagagaaatttgtgctaataccgtatacgtccttatggagaaagatttatcggagatggatgagcccgcgttggattagctagttggtagggtaaaggcttaccaaggcgacgatccatagctggtctgagaggatgatcagccacactgggactgagacacggcccagactcctacgggaggcagcagtggggaatattggacaatgggcgaaagcctgatccagccatgccgcgtgagtgatgaaggccctagggttgtaaagctctttcaccggtgaagataatgacggtaaccggagaagaagccccggctaacttcgtgccagcagccgcggtaatacgaagggggctagcgttgttcggatttactgggcgtaaagcgcacgtaggcggacatttaagtcagaggtgaaatcccagggctcaaccctggaactgcctttgatactgggtgtcttgagtatggaagaggtgagtggaattccgagtgtagaggtgaaattcgtagatattcggaggaacaccagtggcgaaggcggctcactggtccattactgacgctgaggtgcgaaagcgtggggagcaaacaggattagataccctggtagtccacgccgtaaacgatgaatgttagccgtcggacagtttactgttcggtggcgcagctaacgcattaaacattccgcctggggagtacggtcgcaagattaaaactcaaaggaattgacgggggcccgcccaagcggtggagcatgtggtttaattcgaagcaacgcgcagaaccttaccagcccttgacatcccgatcgcggttagtggagacactttccttcagttaggctggatcggtgacaggtgctgcatggctgtcgtcagctcgtgtcgtgagatgttgggttaagtcccgcaacgagcgcaaccctcgcccttagttgccatcattaagttgggcactctaaggggactgccggtgataagccgagaggaaggtggggatgacgtcaagtcctcatggcccttacgggctgggctacacacgtgctacaatggtggtgacagtgggcagcgagaccgcgaggtcgagctaatctccaaaagccatctcagttcggattgcactctgcaactcgagtgcatgaagtggaatcgctagtaatcgtgg

SEQ ID NO: 343 - DNA, 1324 bp, Bartonella washoensis
gcaagtcgagcgcactcttttagagtgagcggcaaacgggtgagtaacgcgtgggaatctacccctctctacggaataacacagagaaatttgtgctaataccgtatacgtcccttttgggagaaagatttatcggagatggatgagcccgcgttggattagctagttggtgaggtaacggcccaccaaggcgacgatccatagctggtctgagaggatgatcagccacactgggactgagacacggcccagactcctacgggaggcagcagtggggaatattggacaatgggggcaaccctgatccagccatgccgcgtgagtgatgaaggccctagggttgtaaagctctttcaccggtgaagataatgacggtaaccggagaagaagccccggctaacttcgtgccagcagccgcggtaatacgaagggggctagcgttgttcggatttactgggcgtaaagcgcatgtaggcggacatttaagtcagaggtgaaatcccagggctcaaccctggaactgcctttgatactgggtgtcttgagtgtggaagaggtgagtggaattccgagtgtagaggtaaaattcgtagatattcggaggaacaccagtggcgaaggcggctcactggtccattactgacgctgaggtgcgaaagcgtggggagcaaacaggattagataccctggtagtccacgccgtaaacgatgaatgttagccgtcgggcggtttactgctcggtggcgcagctaacgcgttaaacattccgcctggggagtacggtcgcaagattaaaactcaaaggaattgacgggggcccgcacaagcggtggagcatgtggtttaattcgaagcaacgcgcagaaccttaccagcccttgacatcccgatcgcggaaggtggagacaccctccttcagttaggctggatcggagacaggtgctgcatggctgtcgtcagctcgtgtcgtgagatgttgggttaagtcccgcaacgagcgcaaccctcgcccttagttgccatcattaagttgggcactctagggggactgccggtgataagccgagaggaaggtggggatgacgtcaagtcctcatggcccttacgggctgggctacacacgtgctacaatggtggtgacagtgggcagcgagaccgcgaggtcgagctaatctccaaaagccatctcagttcggattgcactctgcaactcgagtgcatgaagttggaatcgctagtaatcgtggatcagcatgccacggtgaatacgttcccgggccttgtacacaccgcccgtcacaccatgggagttggttttacccg

SEQ ID NO: 344 - DNA, 1407 bp, Bdellovibrio sp.
  MPA
catgcaagtcgaacggggaaagctttcgggtgagtactagtggcgcacgggtgagtaacgcgtggataatctgcctttgagtgggggataactagtcgaaagattagctaataccgcataagaccacaggaactgaggttctaggggttaaaggtttttcgctcatagatgagtccgcgtgagattagctagttggtgaggtaacggctcaccaaggcgacgatctctaactggtctgagaggatgatcagtcacactggaactgagacacggtccagactcctacgggaggcagcagtagggaatattgcacaatggaggaaactctgatgcagcgacgccgcgtgagtgatgaaggctttcgggtcgtaaagctctgtcgcaggggaataacacaatgaatgtaccctgtaagaaaggatcggctaacttcgtgccagcagccgcggtaagacgagggatcctagcgttgttcggaattattgggcgtaaagcggatgtaggtggctttgtaagtcaggtgtgaaagcctagggctcaaccctagaagtgcatctgatactgcgaagcttgagtgtgggagaggatagtagaattcctggtgtagtggtgaaatacgtagatatcaggaggaataccggaggcgaaggcggctatctggcccaacactgacactgagatccgaaagcgtggggatcaaacaggattagataccctggtagtccacgccgtaaacgatggatacttgttgttggaggtattgaccccttcagtgacgaagctaacgcgttaagtatcccgcctggggagtacggtcgcaagattaaaactcaaagaaattgacgggggcccgcacaagcggtggagcatgtggtttaattcgatgcaacgcgaagaaccttacctaggcttgacatgtactggaagactggcagaaatgtcgtcgccttcgggccggtacacaggtgctgcatggctgtcgtcagctcgtgtcgtgagatgttgggttaagtcccgcaacgagcgcaacccctgcatttagttgccagcattcagttgggcactctagatggactgccggtgttaaaccggaggaaggtggggatgacgtcaagtcctcatggcccttatgcctagggctacacacgtgctacaatggtggttacagacggatgccaaaccgcaaggtggagctaatcctacaaaagccatctaagttcagattggtctctgcaactcgagaccatgaagttggaatcgctagtaatcgcggatcagaatgccgcggtgaatacgttcccgggccttgtacacaccgcccgtcacaccatgaaagttggttgtaccagaagtcgctgcgctaaccgtaaggaggcaggcgcccaaggtatggtcgatgattggggt

SEQ ID NO: 345 - DNA, 1289 bp, Bifidobacteriaceae sp.
  C1
cgctggcggcgtgcttaacacatgcaagtcgagcgagcggcgaacgggtgagtaatgcgtgactgacctgccctgaggtttggaatagctcctggaaacgggtggtaatgccggatgttgaaaagtgccttgggatggggtcgcgtcctatcaggtagtcggtggggtagtggcctaccgagcctacgacgggtagccggcctgagagggtgaccggccacattgggactgagatacggcccagactcctacgggaggcagcagtggggaatattgcgcaatgggggaaaccctgacgcagcgacgccgcgtgcgggatggaggccttcgggttgtgaaccgcttttgttagggagcatgagtgtacctttcgaataaggaccggctaactacgtgccagcagccgcggtaatacgtagggtccaagcgctgtccggaattattgggcgtaaagggctcgtaggcggttcgtcgcgtctggtgtgaaagcccattgcttaacggtgggtttgcgctggatacgggcgggcttgagtgcggtaggggagaacggaattcccggtgtaacggtggaatgtgtagatatcgggaagaacaccgatggcgaaggcagttctctgggccgactgacgctgaggagcgaaagcgtggggagcgaacaggattagataccctggtagtccacgctgtaaacggtggatgctggatgtggggcgttctgtgtcggagctaacgcgttaagcatcccgcctggggagtacggccgcaaggttaaaactcaaagaaattgacgggggcccgcacaagcggcggagcatgcggtttaattcgatgcaacgcgaagaaccttacctgggtttgacatgcacaggtggtgcatggccgtcgtcagctcgtgtcgtgagatgttgggtcaagtcccgcaacgagcgcaacccttgccctgtgttgccagcagctgggcactcacgggggaccgccggggttaacccggaggagggtggggatgacgtcaggtcatcatgccccttacgtccagggctacacgcatgctacaatggccggcagcgggatgcgatgtcgtgaggcggagcggatcccttccggtctcagttcggacggagcctgcaactcggctccggaaggtggagtcgctagtaatcgcggatcagcaacgccgcggtgaatgcgttcccgggccttgtacacaccgcccgtcaagtcatgaaagtcggcaacacccgaagcccgtgcctagggagcggtcgaaggtggggctggtgattggg

SEQ ID NO: 346 - DNA, 1021 bp, Bifidobacterium adolescentis
  modified_base (773)..(773): a, c, t, g, unknown or other
  modified_base (859)..(859): a, c, t, g, unknown or other
  modified_base (975)..(975): a, c, t, g, unknown or other
  modified_base (991)..(992): a, c, t, g, unknown or other
  modified_base (1015)..(1015): a, c, t, g, unknown or other
tcccaggagcttgctcctgggtgagagtggcgaacgggtgagtaatgcgtgaccgacctgccccatacaccggaatagctcttggaaacgggtggtaatgccggatgctccagttggatgcatgtccttctgggaaagattcatcggtatgggatggggtcgcgtcctatcagcttgatggcggggtaacggcccaccatggcttcgacgggtagccggcctgagagggcgaccggccacattgggactgagatacggcccagactcctacgggaggcagcagtggggaatattgcacaatgggcgcaagcctgatgcagcgacgccgcgtgcgggatgacggccttcgggttgtaaaccgcttttgactgggagcaagcccttcggggtgagtgtacctttcgaataagcaccggctaactacgtgccagcagccgcggtaatacgtagggtgcaagcgttatccggaattattgggcgtaaagggctcgtaggcggttcgtcgcgtccggtgtgaaagtccatcgcttaacggtggatccgcgccgggtacgggcgggcttgagtgcggtaggggagactggaattcccggtgtaacggtggaatgtgtagatatcgggaagaacaccaatggcgaaggcaggtctctgggccgtcactgacgctgaggagcgaaagcgtggggagcgaacaggattagataccctggtagtccacgccgtaaacggtggatgctggatgtggggaccattccacggtctccgtgtcgganccaacgcgttaagcatcccgcctggggagtacggccgcaaggctaaaactcaaagaaattgacgggggcccgcacaagcggcggancatgcggattaattcgatgcaacgcgaagaaccttacctgggcttgacatgttcccgacagccgtagagatacggtctcccttcggggcgggttcacaggtggtgcatggtcgtcntcagctcgtgtcgtgnnatgttgggttaagtcccgcaacnagcgca

SEQ ID NO: 347 - DNA, 1535 bp, Bifidobacterium angulatum
tttttgtggagggttcgattctggctcaggatgaacgctggcggcgtgcttaacacatgcaagtcgaacgggatcggctggagcttgctccggccgtgagagtggcgaacgggtgagtaatgcgtgaccgacctgccccgtacaccggaatagctcctggaaacgggtggtaatgccggatgctccagtccatcgcatggtggtctgggaaagattttatcggtatgggatggggtcgcgtcctatcaggtagtcggcggggtaacggcccaccgagcctacgacgggtagccggcctgagagggcgaccggccacattgggactgagatacggcccagactcctacgggaggcagcagtggggaatattgcacaatgggcgcaagcctgatgcagcgacgccgcgtgcgggatgacggccttcgggttgtaaaccgcttttgttggggagcaagccttcgggtgagtgtacccttcgaataagcaccggctaactacgtgccagcagccgcggtaatacgtagggtgcaagcgttatccggaattattgggcgtaaagagctcgtaggcggttcgtcgcgtccggtgtgaaagtccatcgcttaacggtggatctgcgccgggtacgggcgggctggagtgcggtaggggagactggaattcccggtgtaacggtggaatgtgtagatatcgggaagaacaccaatggcgaaggcaggtctctgggccgttactgacgctgaggagcgaaagcgtggggagcgaacaggattagataccctggtagtccacgccgtaaacggtggatgctggatgtggggcccattccacgggttccgtgtcggagctaacgcgttaagcatcccgcctggggagtacggccgcaaggctaaaactcaaagaaattgacgggggcccgcacaagcggcggagcatgcggattaattcgatgcaacgcgaagaaccttacctgggcttgacatgttcccgacagccccagagatggggcctcccttcggggcgggttcacaggtggtgcatggtcgtcgtcagctcgtgtcgtgagatgttgggttaagtcccgcaacgagcgcaaccctcgccccgtgttgccagcacatgatggtgggaactcacgggggaccgccggggttaactcggaggaaggtggggatgacgtcagatcatcatgccccttacgtccagggcttcacgcatgctacaatggccggtacaacgggatgcgacatggcgacatggagcggatccctgaaaaccggtctcagttcggattggagtctgcaacccgactccatgaaggcggagtcgctagtaatcgcgaatcagcaacgtcgcggtgaatgcgttcccgggccttgtacacaccgcccgtcaagtcatgaaagtgggtagcacccgaagccggtggcccaaccagttcgctggggggagccgtctaaggtgagactcgtgattgggactaagtcgtaacaaggtagccgtaccggaaggtgcggctggatcacctcctttct

SEQ ID NO: 348 - DNA, 1550 bp, Bifidobacterium animalis
tttttgtggagggttcgattctggctcaggatgaacgctggcggcgtgcttaacacatgcaagtcgaacgggatccctggcagcttgctgtcggggtgagagtggcgaacgggtgagtaatgcgtgaccaacctgccctgtgcaccggaatagctcctggaaacgggtggtaataccggatgctccgctccatcgcatggtggggtgggaaatgcttttgcggcatgggatggggtcgcgtcctatcagcttgttggcggggtgatggcccaccaaggcgttgacgggtagccggcctgagagggtgaccggccacattgggactgagatacggcccagactcctacgggaggcagcagtggggaatattgcacaatgggcgcaagcctgatgcagcgacgccgcgtgcgggatggaggccttcgggttgtaaaccgcttttgttcaagggcaaggcacggtttcggccgtgttgagtggattgttcgaataagcaccggctaactacgtgccagcagccgcggtaatacgtagggtgcgagcgttatccggatttattgggcgtaaagggctcgtaggcggttcgtcgcgtccggtgtgaaagtccatcgcctaacggtggatctgcgcccgggtacgggcgggctggagtgcggtaggggagactggaattcccggtgtaacggtggaatgtgtagatatcgggaagaacaccaatggcgaaggcaggtctctgggccgtcactgacgctgaggagcgaaagcgtggggagcgaacaggattagataccctggtagtccacgccgtaaacggtggatgctggatgtggggccctttccacgggtcccgtgtcggagccaacgcgttaagcatcccgcctggggagtacggccgcaaggctaaaactcaaagaaattgacgggggcccgcacaagcggcggagcatgcggattaattcgatgcaacgcgaagaaccttacctgggcttgacatgtgccggatcgccgtggagacacggtttcccttcggggccggttcacaggtggtgcatggtcgtcgtcagctcgtgtcgtgagatgttgggttaagtcccgcaacgagcgcaaccctcgccgcatgttgccagcgggtgatgccgggaactcatgtgggaccgccggggtcaactcggaggaaggtggggatgacgtcagatcatcatgccccttacgtccagggcttcacgcatgctacaatggccggtacaacgcggtgcgacacggtgacgtggggcggatcgctgaaaaccggtctcagttcggatcgcagtctgcaactcgactgcgtgaaggcggagtcgctagtaatcgcggatcagcaacgccgcggtgaatgcgttcccgggccttgtacacaccgcccgtcaagtcatgaaagtgggtagcacccgaagccggtggcccgacccttgtggggggagccgtctaaggtgagactcgtgattgggactaagtcgtaacaaggtagccgtaccggaaggtgcggctggatcacctcctttctacggaga

SEQ ID NO: 349 - DNA, 1056 bp, Bifidobacterium bifidum
  modified_base (764)..(764): a, c, t, g, unknown or other
  modified_base (850)..(850): a, c, t, g, unknown or other
  modified_base (919)..(919): a, c, t, g, unknown or other
  modified_base (961)..(961): a, c, t, g, unknown or other
  modified_base (985)..(985): a, c, t, g, unknown or other
  modified_base (989)..(989): a, c, t, g, unknown or other
  modified_base (993)..(993): a, c, t, g, unknown or other
  modified_base (1002)..(1002): a, c, t, g, unknown or other
  modified_base (1014)..(1014): a, c, t, g, unknown or other
  modified_base (1026)..(1026): a, c, t, g, unknown or other
  modified_base (1028)..(1029): a, c, t, g, unknown or other
  modified_base (1045)..(1045): a, c, t, g, unknown or other
ctttgcttggtggtgagagtggcgaacgggtgagtaatgcgtgaccgacctgccccatgctccggaatagctcctggaaacgggtggtaatgccggatgttccacatgatcgcatgtgattgtgggaaagattctatcggcgtgggatggggtcgcgtcctatcagcttgttggtgaggtaacggctcaccaaggcttcgacgggtagccggcctgagagggcgaccggccacattgggactgagatacggcccagactcctacgggaggcagcagtggggaatattgcacaatgggcgcaagcctgatgcagcgacgccgcgtgagggatggaggccttcgggttgtaaacctcttttgtttgggagcaagccttcgggtgagtgtacctttcgaataagcgccggctaactacgtgccagcagccgcggtaatacgtagggcgcaagcgttatccggatttattgggcgtaaagggctcgtaggcggctcgtcgcgtccggtgtgaaagtccatcgcttaacggtggatctgcgccgggtacgggcgggctggagtgcggtaggggagactggaattcccggtgtaacggtggaatgtgtagatatcgggaagaacaccgatggcgaaggcaggtctctgggccgtcactgacgctgaggagcgaaagcgtggggagcgaacaggattagataccctggtagtccacgccgtaaacggtggacgctggatgtggggcacgttccacgtgttccgtgtcgganctaacgcgttaagcgtcccgcctggggagtacggccgcaaggctaaaactcaaagaaattgacgggggcccgcacaagcggcggancatgcggattaattcgatgcaacgcgaagaaccttacctgggcttgacatgttcccgacgacgccaganatggcgtttcccttcggggcgggttcacaggtggtgcatggncgtcgtcagctcgtgtcgtgagangttngggntaagtcccncaacgagcgcanccctcgccccgngnngccagcacgttatggnggggaactcac

SEQ ID NO: 350 - DNA, 1535 bp, Bifidobacterium breve
tttttgtggagggttcgattctggctcaggatgaacgctggcggcgtgcttaacacatgcaagtcgaacgggatccatcgggctttgcctggtggtgagagtggcgaacgggtgagtaatgcgtgaccgacctgccccatgcaccggaatagctcctggaaacgggtggtaatgccggatgctccatcacaccgcatggtgtgttgggaaagcctttgcggcatgggatggggtcgcgtcctatcagcttgatggcggggtaacggcccaccatggcttcgacgggtagccggcctgagagggcgaccggccacattgggactgagatacggcccagactcctacgggaggcagcagtggggaatattgcacaatgggcgcaagcctgatgcagcgacgccgcgtgagggatggaggccttcgggttgtaaacctcttttgttagggagcaaggcactttgtgttgagtgtacctttcgaataagcaccggctaactacgtgccagcagccgcggtaatacgtagggtgcaagcgttatccggaattattgggcgtaaagggctcgtaggcggttcgtcgcgtccggtgtgaaagtccatcgcttaacggtggatccgcgccgggtacgggcgggcttgagtgcggtaggggagactggaattcccggtgtaacggtggaatgtgtagatatcgggaagaacaccaatggcgaaggcaggtctctgggccgttactgacgctgaggagcgaaagcgtggggagcgaacaggattagataccctggtagtccacgccgtaaacggtggatgctggatgtggggcccgttccacgggttccgtgtcggagctaacgcgttaagcatcccgcctggggagtacggccgcaaggctaaaactcaaagaaattgacgggggcccgcacaagcggcggagcatgcggattaattcgatgcaacgcgaagaaccttacctgggcttgacatgttcccgacgatcccagagatggggtttcccttcggggcgggttcacaggtggtgcatggtcgtcgtcagctcgtgtcgtgagatgttgggttaagtcccgcaacgagcgcaaccctcgccccgtgttgccagcggattgtgccgggaactcacgggggaccgccggggttaactcggaggaaggtggggatgacgtcagatcatcatgccccttacgtccagggcttcacgcatgctacaatggccggtacaacgggatgcgacagtgcgagctggagcggatccctgaaaaccggtctcagttcggatcgcagtctgcaactcgactgcgtgaaggcggagtcgctagtaatcgcgaatcagcaacgtcgcggtgaatgcgttcccgggccttgtacacaccgcccgtcaagtcatgaaagtgggcagcacccgaagccggtggcctaaccccttgcgggagggagccgtctaaggtgaggctcgtgattgggactaagtcgtaacaaggtagccgtaccggaaggtgcggctggatcacctcctttct

SEQ ID NO: 351 - DNA, 1051 bp, Bifidobacterium catenulatum
  modified_base (817)..(817): a, c, t, g, unknown or other
  modified_base (935)..(935): a, c, t, g, unknown or other
  modified_base (966)..(967): a, c, t, g, unknown or other
  modified_base (978)..(978): a, c, t, g, unknown or other
  modified_base (1030)..(1030): a, c, t, g, unknown or other
  modified_base (1042)..(1043): a, c, t, g, unknown or other
tcgaacgggatccaggcagcttgctgcctggtgagagtggcgaacgggtgagtaatgcgtgaccgacctgccccatacaccggaatagctcctggaaacgggtggtaatgccggatgctccgactcctcgcatggggtgtcgggaaagatttcatcggtatgggatggggtcgcgtcctatcaggtagtcggcggggtaacggcccaccgagcctacgacgggtagccggcctgagagggcgaccggccacattgggactgagatacggcccagactcctacgggaggcagcagtggggaatattgcacaatgggcgcaagcctgatgcagcgacgccgcgtgcgggatgacggccttcgggttgtaaaccgcttttgatcgggagcaagccttcgggtgagtgtacctttcgaataagcaccggctaactacgtgccagcagccgcggtaatacgtagggtgcaagcgttatccggaattattgggcgtaaagggctcgtaggcggttcgtcgcgtccggtgtgaaagtccatcgcttaacggtggatctgcgccgggtacgggcgggctggagtgcggtaggggagactggaattcccggtgtaacggtggaatgtgtagatatcgggaagaacaccaatggcgaaggcaggtctctgggccgttactgacgctgaggagcgaaagcgtggggagcgaacaggattagataccctggtagtccacgccgtaaacggtggatgctggatgtggggcccgttccacgggttccgtgtcggagctaacgcgttaagcatcccgcctggggagtacggncgcaaggctaaaactcaaagaaattgacgggggcccgcacaagcggcggagcatgcggattaattcgatgcaacgcgaagaaccttacctgggcttgacatgttcccgacagccgtanagatgcggcctcccttcggggcgggttcacnntggtgcatggncgtcgtcagctcgtgtcgtgagatgttgggttaagtcccgcaacgagcgcancctcgccctgtnngccagcac

SEQ ID NO: 352 - DNA, 1539 bp, Bifidobacterium dentium
ttttcgtggagggttcgattctggctcaggatgaacgctggcggcgtgcttaacacatgcaagtcgaacgggatcccgggggttcgcctccgggtgagagtggcgaacgggtgagtaatgcgtgaccgacctgccccatacaccggaatagctcctggaaacgggtggtaatgccggatgctccggttggatgcatgtccttccgggaaaggttccatcggtatgggatggggtcgcgtcctatcagcttgatggcggggtaacggcccaccatggcttcgacgggtagccggcctgagagggcgaccggccacattgggactgagatacggcccagactcctacgggaggcagcagtggggaatattgcacaatgggcgcaagcctgatgcagcgacgccgcgtgcgggatggaggccttcgggttgtaaaccgcttttgatcgggagcaagcccttcggggtgagtgtacccttcgaataagcaccggctaactacgtgccagcagccgcggtaatacgtagggtgcaagcgttatccggaattattgggcgtaaagggctcgtaggcggttcgtcgcgtccggtgtgaaagcccatcgcttaacggtgggtctgcgccgggtacgggcgggctggagtgcggtaggggagactggaattcccggtgtaacggtggaatgtgtagatatcgggaagaacaccaatggcgaaggcaggtctctgggccgtcactgacgctgaggagcgaaagcgtggggagcgaacaggattagataccctggtagtccacgccgtaaacggtggatgctggatgtggggcccgttccacgggttccgtgtcggagctaacgcgttaagcatcccgcctggggagtacggccgcaaggctaaaactcaaagaaattgacgggggcccgcacaagcggcggagcatgcggattaattcgatgcaacgcgaagaaccttacctgggcttgacatgttcccgacggccgtagagatacggcctcccttcggggcgggttcacaggtggtgcatggtcgtcgtcagctcgtgtcgtgagatgttgggttaagtcccgcaacgagcgcaaccctcgccctgtgttgccagcacgtcatggtgggaactcacgggggaccgccggggtcaactcggaggaaggtggggatgacgtcagatcatcatgccccttacgtccagggcttcacgcatgctacaatggccggtacagcgggatgcgacatggcgacatggagcggatccctgaaaaccggtctcagttcggattggagtctgcaacccgactccatgaaggcggagtcgctagtaatcgcggatcagcaacgccgcggtgaatgcgttcccgggccttgtacacaccgcccgtcaagtcatgaaagtgggcagcacccgaagccggtggcctaacccttctgtgggatggagccgtctaaggtgaggctcgtgattgggactaagtcgtaacaaggtagccgtaccggaaggtgcggctggatcacctcctttctacgg

SEQ ID NO: 353 - DNA, 1551 bp, Bifidobacterium gallicum
tttttgtggagggttcgattctggctcaggatgaacgctggcggcgtgcttaacacatgcaagtcgaacgggatccggccgagcttgtcttggctggtgagagtggcgaacgggtgagtaatgcgtgaccaacctgccttgtgcaccggaatagctcctggaaacgggtggtaataccggatgttccgctccatcgcatggtggtgtgggaaatgcttttgcggcatgggatggggtcgcgtcctatcagcttgttggcggggtgacggcccaccaaggctttgacgggtagccggcctgagagggtgaccggccacattgggactgagatacggcccagactcctacgggaggcagcagtggggaatattgcacaatgggcgcaagcctgatgcagcgacgccgcgtgcgggatggaggccttcgggttgtaaaccgcttttgattgtcagcaaggcgtcctttcggggatgttgagtgtagctttcgaataagcaccggctaactacgtgccagcagccgcggtaatacgtagggtgcaagcgttatccggaattattgggcgtaaagggctcgtaggcggttcgtcgcgtccggtgtgaaagtccatcgcttaacggtggatctgcgccgggtacgggcgggctggagtgcggtaggggagactggaattcccggtgtaacggtggaatgtgtagatatcgggaagaacaccaatggcgaaggcaggtctctgggccgttactgacgctgaggagcgaaagcgtggggagcgaacaggattagataccctggtagtccacgccgtaaacggtggatgctggatgtggggccctttttccgggtcctgtgtcggagctaacgcgttaagcatcccgcctggggagtacggccgcaaggctaaaactcaaagaaattgacgggggcccgcacaagcggcggagcatgcggattaattcgatgcaacgcgaagaaccttacctgggcttgacatgttccggatcgccccagagatggggtttcccttcggggccggttcacaggtggtgcatggtcgtcgtcagctcgtgtcgtgagatgttgggttaagtcccgcaacgagcgcaaccctcgccgcgtgttgccagcgggtcatgccgggaactcacgtgggaccgccggggtcaactcggaggaaggtggggatgacgtcagatcatcatgccccttacgtccagggcttcacgcatgctacaatggccggtacaacgggatgcgacaccgtgaggtggggcggatccctgaaaaccggtctcagttcggatcgcagtctgcaacccgactgcgtgaaggcggagtcgctagtaatcgcagatcagcaacgctgcggtgaatgcgttcccgggccttgtacacaccgcccgtcaagtcatgaaagtgggtagcacccgaagccggtggcccgaccgccttgtgtggggggagccgtctaaggtgagactcgtgattgggactaagtcgtaacaaggtagccgtaccggaaggtgcggctggatcacctcctttctacgg

SEQ ID NO: 354 - DNA, 1400 bp, Bifidobacterium infantis
gattctggctcaggatgaacgctggcggcgtgcttaacacatgcaagtcgaacgggatccatcaggctttgcttggtggtgagagtggcgaacgggtgagtaatgcgtgaccgacctgccccatacaccggaatagctcctggaaacgggtggtaatgccggatgctccagttgatcgcatggtcttctgggaaagctttcgcggtatgggatggggtcgcgtcctatcagcttgacggcggggtaacggcccaccgtggcttcgacgggtagccggcctgagagggcgaccggccacattgggactgagatacggcccagactcctacgggaggcagcagtggggaatattgcacaatgggcgcaagcctgatgcagcgacgccgcgtgagggatggaggccttcgggttgtaaacctcttttatcggggagcaagcgagagtgagtttacccgttgaataagcaccggctaactacgtgccagcagccgcggtaatacgtagggtgcaagcgttatccggaattattgggcgtaaagggctcgtaggcggttcgtcgcgtccggtgtgaaagtccatcgcttaacggtggatccgcgccgggtacgggcgggcttgagtgcggtaggggagactggaattcccggtgtaacggtggaatgtgtagatatcgggaagaacaccaatggcgaaggcaggtctctgggccgttactgacgctgaggagcgaaagccgtggggagcgaacaggattagataccctggtagtccacgccgtaaacggtggatgctggatgtggggcccgttccacgggttccgtgtcggagctaacgcgttaagcatcccgcctggggagtacggccgcaagctaaaaactcaaagaaattgacgggggcccgcacaagcggcggagcatgcggattaattcgatcgaacgcgaagaaccttacctgggcttgacatgttcccgacggtcgtagagatacggcttcccttcggggcgggttcacaggtggtgcatggtcgtcgtcacgtcgtgtcgtgagatgttgggttaagtcccgcaacgagcgcaaccctcgccccgtgttgccagcggattatgccgggaactcacgggggaccgccggggttaactcggaggaaggtggggatgacgtcagatcatcatgccccttacgtccagggcttcacgcatgctacaatggccggtacaacgggatgcgacgcggcgacgcggagcggatccctgaaaaccggtctcagttcggatcgcagtctgcaactcgactgcgtgaaggcggagtcgctagtaatcgcgaatcagcaacgtcgcggtgaatgcgttcccgggccttgtacacaccgcccgtcaagtcatgaaagtgggtagcacccg

SEQ ID NO: 355 - DNA, 1013 bp, Bifidobacterium kashiwanohense
  modified_base (19)..(19): a, c, t, g, unknown or other
  modified_base (21)..(21): a, c, t, g, unknown or other
  modified_base (29)..(29): a, c, t, g, unknown or other
  modified_base (45)..(47): a, c, t, g, unknown or other
  modified_base (947)..(947): a, c, t, g, unknown or other
gcgggatgacgccttcggntntaaaccgntttgatcgggagcaannncgggtgagtgtacctttcgaataagcaccggctaactacgtgccagcagccgcggtaatacgtagggtgcaagcgttatccggaattattgggcgtaaagggctcgtaggcggttcgtcgcgtccggtgtgaaagtccatcgcttaacggtggatctgcgccgggtacgggcgggctggagtgcggtaggggagactggaattcccggtgtaacggtggaatgtgtagatatcgggaagaacaccaatggcgaaggcaggtctctgggccgttactgacgctgaggagcgaaagcgtggggagcgaacaggattagataccctggtagtccacgccgtaaacggtggatgctggatgtggggcccgttccacgggttccgtgtcggagctaacgcgttaagcatcccgcctggggagtacggccgcaaggctaaaactcaaagaaattgacgggggcccgcacaagcggcggagcatgcggattaattcgatgcaacgcgaagaaccttacctgggcttgacatgttcccgaccgctccagagatggggcttcccttcggggcgggttcacaggtggtgcatggtcgtcgtcagctcgtgtcgtgagatgttgggttaagtcccgcaacgagcgcaaccctcgccctgtgttgccagcacgtcatggtgggaactcacgggggaccgccggggtcaactcggaggaaggtggggatgacgtcagatcatcatgccccttacgtccagggcttcacgcatgctacaatggccggtacaacgggatgcgacacggcgacgtggagcggatccctgaaaaccggtctcagttcggattggagtctgcaacccgactccatgaaggcggagtcgctagtaatcgcggatcagcaacgccgcggngaatgcgttcccgggccttgtacacaccgcccgtcaagtcatgaaagtgggtagcacccgaagccg

SEQ ID NO: 356 - DNA, 1346 bp, Bifidobacterium longum
cttgcttggtggtgagagtggcgaacgggtgagtaatgcgtgaccgacctgccccatacaccggaatagctcctggaaacgggtggtaatgccggatgctccagttgatcgcatggtcttctgggaaagctttcgcggtatgggatggggtcgcgtcctatcagcttgacggcggggtaacggcccaccgtggcttcgacgggtagccggcctgagagggcgaccggccacattgggactgagatacggcccagactcctacgggaggcagcagtggggaatattgcacaatgggcgcaagcctgatgcagcgacgccgcgtgagggatggaggccttcgggttgtaaacctcttttatcggggagcagcgagagtgagtttacccgttgaataagcaccggcaactacgtgccagcagccgcggtaatacgtaggtgcaagcgttatccggaattattgggcgtaaagggctcgtaggcggttcgtcgcgtccggtgtgaaagtccatcgcttaacggtggatccgcgccgggtacgggcgggcttgagtgcggtaggggagactggaattcccggtgtaacggtggaatgtgtagatatcgggaagaacaccaatggcgaaggcaggtctctgggccgttactgacgctgaggagcgaaagcgtggggagcgaacaggattagataccctggtagtccacgccgtaaacggtggatgctggatgtggggcccgttccacgggttccgtgtcggagctaacgcgttaagcatcccgcctggggagtacggccgcaaggctaaaactcaaagaaattgacgggggcccgcacaagcggcggagcatgcggattaattcgatgcaacgcgaagaatcatcgctgggtctgcgccggttccgggcgggcttgagtgcgggagtgccgtctgggatggctggtgtgaggtgcatgggcgtcgtcagctcgtgtcgtgagatgttgggttaagtcccgcaacgagcgcaaccctcgccccgtgttgccagcggattatgccgggaactcacgggggaccgccggggttaactcggaggaaggtggggatgacgtcagatcatcatgccccttacgtccagggcttcacgcatgctacaatggccggtacaacgggatgcgacgcggcgacgcggagcggatccctgaaaaccggtctcagttcggatcgcagtctgcaactcgactgcgtgaaggcggagtcgctagtaatcgcgaatcagcaacgtcgcggtgaatgcgttcccgggccttgtacacaccgcccgtcaagtcatgaaagtgggcagcacccgaagccggtggcctaacc

SEQ ID NO: 357 - DNA, 1357 bp, Bifidobacterium pseudocatenulatum
acgggatccatcaggctttgcttggtggtgagagtggcgaacgggtgagtaatgcgtgaccgacctgccccatacaccggaatagctcctggaaacgggtggtaatgccggatgctccggcctgccgcatggtgggctgggaaagattgtatcggtatgggatggggtcgcgtcctatcaggtagtcggcggggtaacggcccaccgagcctacgacgggtagccggcctgagagggcgaccggccacattgggactgagatacggcccagactcctacgggaggcagcagtggggaatattgcacaatgggcgcaagcctgatgcagcgacgccgcgtgcgggatgacggccttcgggttgtaaaccgcttttgatcgggagcaagccttcggggagtgtacctttcaataacaccggctaactacgtgccagcagccgcggtaatacgtagggtgcaagcgttatccggaattattgggcgtaaagggctcgtaggcggttcgtcgcgtccggtgtgaaagtccatcgcttaacggtggatctgcgccgggtacgggcgggctggagtgcggtaggggagactggaattcccggtgtaacggtggaatgtgtagatatcgggaagaacaccaatggcgaaggcaggtctctgggccgttactgacgctgaggagcgaaagcgtggggagcgaacaggattagataccctggtagtccacgccgtaaacggtggatgctggatgtggggcccgttccacgggttccgtgtcggagctaacgcgttaagcatcccgcctggggagtacggccgcaaggctaaaactcaaagaaattgacgggggcccgcacaagcggcggatcatgcggattaattcgatgcaacgcgaagaaccttacctgggcttgacatgttcccgaccgctccagagatggggcttcccttcggggaggctggaatgccgggtgtagcggtggaatagctcgtgtcgtgagatgttgggttaagtcccgcaacgagcgcaaccctcgccctgtgttgccagcacgtcatggtgggaactcacgggggaccgccggggtcaactcggaggaaggtggggatgacgtcagatcatcatgccccttacgtccagggcttcacgcatgctacaatggccggtacaacgggatgcgacacggcgacgtggagcggatccctgaaaaccggtctcagttcggattggagtctgcaacccgactccatgaaggcggagtcgctagtaatcgcggatcagcaacgccgcggtgaatgcgttcccgggccttgtacacaccgcccgtcaagtcatgaaagtgggtagcacccgaagccggtg

SEQ ID NO: 358 - DNA, 1527 bp, Bifidobacterium pseudolongum
  modified_base (1526)..(1526): a, c, t, g, unknown or other
ttcgattctggctcaggatgaacgctggcggcgtgcttaacacatgcaagtcgaacgggatccctggcagcttgctgccggggtgagagtggcgaacgggtgagtaatgcgtgaccgacctgccccatgcaccggaatagctcctggaaacgggtggtaatgccggatgttccacatgagcgcatgcgagtgtgggaaaggcttttgcggcatgggatggggtcgcgtcctatcagcttgttggtggggtaacggcctaccaaggcgttgacgggtagccggcctgagagggcgaccggccacattgggactgagatacggcccagactcctacgggaggcagcagtggggaatattgcacaatgggcgcaagcctgatgcagcgacgccgcgtgcgggatggaggccttcgggttgtaaaccgcttttgttcaagggcaaggcacggtttcggccgtgttgagtggattgttcgaataagcaccggctaactacgtgccagcagccgcggtaatacgtagggtgcaagcgttatccggatttattgggcgtaaagggctcgtaggcggttcgtcgcgtccggtgtgaaagtccatcgcttaacggtggatccgcgccgggtacgggcgggcttgagtgcggtaggggagactggaattcccggtgtaacggtggaatgtgtagatatcgggaagaacaccaatggcgaaggcaggtctctgggccgttactgacgctgaggagcgaaagcgtggggagcgaacaggattagataccctggtagtccacgccgtaaacggtggatgctggatgtggggccctttttccgggtcctgtgtcggagctaacgcgttaagcatcccgcctggggagtacggccgcaaggctaaaactcaaagaaattgacgggggcccgcacaagcggcggagcatgcggattaattcgatgcaacgcgaagaaccttacctgggcttgacatgtgcctgacgatcccggagacggggtttcccttcggggcgggttcacaggtggtgcatggtcgtcgtcagctcgtgtcgtgagatgttgggttaagtcccgcaacgagcgcaaccctcgccgcgtgttgccagcgggtcatgccgggaactcacgtgggaccgccggggttaactcggaggaaggtggggatgacgtcagatcatcatgccccttacgtccagggcttcacgcatgctacaatggccggtacaacggggtgcgacacggtgacgtggggcggatccctgaaaaccggtctcagttcggatcgcagtctgcaactcgactgcgtgaaggtggagtcgctagtaatcgcggatcagcaacgccgcggtgaatgcgttcccgggccttgtacacaccgcccgtcaagtcatgaaagtgggcagcacccgaagacggtggcctaacccttgtggggggagccgtctaaggtgaggctcgtgattgggactaagtcgtaacaaggtagccgtaccggaaggtgcggctggatcacctcctna

SEQ ID NO: 359 - DNA, 1380 bp, Bifidobacterium scardovii
gaacgctggcggcgtgcttaacacatgcaagtcgaacgggatccggccagcttgctggttggtgagagtggcgaacgggtgagtaatgcgtgaccgacctgccccatgctccggaatagctcctggaaacgggtggtaatgccggatggtccagcatgctgcatggcgtgttgggaaagatttatcggcgtgggatggggtcgcgtcctatcagcttgacggtggggtgatggcctaccgtggcttcgacgggtagccggcctgagagggcgaccggccacattgggactgagatacggcccagactcctacgggaggcagcagtggggaatattgcacaatgggcgcaagcctgatgcagcgacgccgcgtgagggatggaggccttcgggttgtaaacctcttttagcagggagcaaggcttcggttgagtgtacctgttgaataagcaccggctaactacgtgccagcagccgcggtaatacgtagggtgcaagcgttatccggaattattgggcgtaaagggctcgtaggcggttcgtcgcgtctggtgtgaaagtccatcgcttaacggtggatctgcgccgggtacgggcgggctggagtgcggtaggggagactggaattcccggtgtaacggtggaatgtgtagatatcgggaagaacaccaatggcgaaggcaggtctctgggccgttactgacgctgaggagcgaaagcgtggggagcgaacaggattagataccctggtagtccacgccgtaaacggtggacgctggatgtggggcccattccacgggttccgtgtcggagctaacgcgttaagcgtcccgcctggggagtacggccgcaaggctaaaactcaaagaaattgacgggggcccgcacaagcggcggagcatgcggattaattcgatgcaacgcgaagaaccttacctgggcttgacatgttcccgacggccccagagatggggcttcccttcggggcgggttcacaggtggtgcatggtcgtcgtcagctcgtgtcgtgagatgttgggttaagtcccgcaacgagcgcaaccctcgccccgtgttgccagcattttggatgggaactcacgggggaccgccggggttaactcggaggaaggtggggatgacgtcagatcatcatgcccctacgtccagggcttcacgcatgctacaatggccggtacaacgggatgcgacatggcgacatggagcggatccctgaaaaccggtctcagttcggattggagtctgcaacccgactccatgaaggcggagtcgctagtaatcgcgaatcagcaacgtcgcggtgaatgcgttcccgggccttgtacacaccgcccgtcaagtcatgaaagtgggcagcacc

SEQ ID NO: 360 - DNA, 1363 bp, Bifidobacterium sp.
  HM2
gggttcgattctggctcaggatgaacgctggcggcgtgcttaacacatgcaagtcgaacgagtggcgaacgggtgagtaatgcgtgaccgacctgccccatgcaccggaatagctcctggaaacgggtggtaatgccggatgctgaaaggcggcatgggatggggtcgcgtcctatcagcttgatggcggggtaacggcccaccatggcttcgacgggtagccggcctgagagggcgaccggccacattgggactgagatacggcccagactcctacgggaggcagcagtggggaatattgcacaatgggcgcaagcctgatgcagcgacgccgcgtgcgggatgacggccttcgggttgtaaaccgcttttgatcgggagcatgagtgtacctttcgaataagcaccggctaactacgtgccagcagccgcggtaatacgtagggtgcaagcgttatccggaattattgggcgtaaagggctcgtaggcggttcgtcgcgtccggtgtgaaagtccatcgcttaacggtggatctgcgccgggtacgggcgggctggagtgcggtaggggagactggaattcccggtgtaacggtggaatgtgtagatatcgggaagaacaccaatggcgaaggcaggtctctgggccgactgacgctgaggagcgaaagcgtggggagcgaacaggattagataccctggtagtccacgccgtaaacggtggatgctggatgtggggcgttccgtgtcggagctaacgcgttaagcatcccgcctggggagtacggccgcaaggctaaaactcaaagaaattgacgggggcccgcacaagcggcggagcatgcggattaattcgatgcaacgcgaagaaccttacctgggcttgacatgcacaggtggtgcatggtcgtcgtcagctcgtgtcgtgagatgttgggttaagtcccgcaacgagcgcaaccctcgccctgtgttgccagcacgtgggaactcacgggggaccgccggggtcaactcggaggaaggtggggatgacgtcagatcatcatgccccttacgtccagggcttcacgcatgctacaatggccggcaacgggatgcgacacggcgacgtggagcggatccctgccggtctcagttcggatggagtctgcaacccgactccagaaggcggagtcgctagtaatcgcggatcagcaacgccgcggtgaatgcgttcccgggccttgtacacaccgcccgtcaagtcatgaaagtgggtagcacccgaagccggtgcctatggagccgtctaaggtgagactcgtgattgggactaagtcgtaacaaggtagccgtaccggaaggtgcggctggatcacct

SEQ ID NO: 361 - DNA, 1245 bp, Bifidobacterium sp.
  HMLN12
  modified_base (28)..(28): a, c, t, g, unknown or other
  modified_base (792)..(792): a, c, t, g, unknown or other
  modified_base (1210)..(1210): a, c, t, g, unknown or other
  modified_base (1217)..(1217): a, c, t, g, unknown or other
  modified_base (1219)..(1219): a, c, t, g, unknown or other
  modified_base (1228)..(1228): a, c, t, g, unknown or other
  modified_base (1240)..(1241): a, c, t, g, unknown or other
aacgggagaggatgcgtgaccgacctgncccatgcaccggaatagctcctggaaacgggtggtaatgccggatgttccacatgagcgcatgcgagtgtgggaaaggcttttgcggcatgggatggggtcgcgtcctatcagcttgttggtggggtaacggcctaccaaggcgttgacgggtagccggcctgagagggcgaccggccacattgggactgagatacggcccagactcctacgggaggcagcagtggggaatattgcacaatgggcgcaagcctgatgcagcgacgccgcgtgcgggatggaggccttcgggttgtaaaccgcttttgttcaagggcaaggcacggtttcggccgtgttgagtggattgttcgaataagcaccggctaactacgtgccagcagccgcggtaatacgtagggtgcaagcgttatccggatttattgggcgtaaagggctcgtaggcggttcgtcgcgtccggtgtgaaagtccatcgcttaacggtggatccgcgccgggtacgggcgggcttgagtgcggtaggggagactggaattcccggtgtaacggtggaatgtgtagatatcgggaagaacaccaatggcgaaggcaggtctctgggccgttactgacgctgaggagcgaaagcgtgggaagcgaacaggattagataccctggtagtccacgccgtaaacggtggatgctggatgtggggccctttttccgggtcctgtgtcggagctaacgcgttaagcatcccgcctggggagtacggccgcaaggntaaaactcaaagaaattgacgggggcccgcacaagcggcggagcatgcggattaattcgatgcaacgcgaagaaccttacctgggcttgacatgtgcctgacgatcccggagacggggtttcccttcggggcgggttcacaggtggtgcatggtcgtcagctcgtgtcgtgagatgttgggttaagtcccgcaacgagcgcaaccctcgccgcgtgttgccagcgggtcatgccgggaactcacgtgggaccgccggggttaactcggaggaaggtggggatgacgtcagatcatcatgccccttacgtccagggcttcacgcatgctacaatggccggtacaacggggtgcgacacggtgacgtggggcggatccctgaaaaccggtctcagttcggatcgcagtctgcaactcgantgctaangngcggagtcnctagtaatcgcnnatca

SEQ ID NO: 362 - DNA, 1405 bp, Bifidobacterium sp.
  M45
  modified_base (1215)..(1215): a, c, t, g, unknown or other
gcttaccatgcagtcgaacgggatcccaggagcttgctcctgggtgagagtggcgaacgggtgagtaatgcgtgaccgacctgccccatacaccggaatagctcctggaaacgggtggtaatgccggatgctccagttgaatgcatgtccttctgggaaagattttgcggtatgggatggggtcgcgtcctatcagcttgatggcggggtaacggcccaccatggcttccacgggtagccggcctgagagggcgaccggccacattgggactgaaatacggcccagactcctacgggaggcagcagtggggaatattgcacaatgggcgcaagcctgatgcagcgacgccgcgtgcgggatgacggccttcgggttgtaaaccgcttttgactgggagcaagcccttcggggtgagtgtacctttcgaataagcaccggctaactacgtgccagcagccgcggtaatacgtagggtgcaagcgttatccggaattattgggcgtaaagggctcgtaagcggttcgtcgcgtccggtgtgaaagtccatcgcttaacggtggatccgcgccgggtacgggcgggcttgagtgcggtaggggagactggaattcccggtgtaacggtggaatgtgtagatatcgggaagaacaccaatggcgaaggcaggtctctgggccgtcactgacgctgaggagcgaaagcgtggggagcgaacaggattagataccctggtagtccacgccgtaaacggtggatgctggatgtggggaccattccacggtctccgtgtcggagccaacgcgttaagcatcccgcctggggagtacggccgcaaggctaaaactcaaagaaattgacgggggcccgcacaagcggcggagcatgcggattaattcgatgcaacgcgaagaaccttacctgggcttgacatgttcccgacagccccagagatggggcctcccttcggggcgggttcacaggtggtgcatggtcgtcgtcagctcgtgtcgtgagatgttgggttaagtcccgcaacgagcgcaaccctcgccctgtgttgccagcacgtcgtggtgggaactcacgggggaccgccggggtcaactcggaggaaggtggggatgacgtcagatcatcatgccccttacgtccagggcttcacgcatgctacaatggccggtacaacgggatgcgacactgtgaggtggagcggntcccttaaaaccggtctcagttcggattggagtctgcaacccgactccatgaaggcggagtcgctagtaatcgcggatcagcaacgccgcggtgaatgcgttcccgggccttgtacacaccgcccgtcaagtcatgaaagtgggtagcacccgaagccggtggcccaaccttttgggggagccgtctaag

SEQ ID NO: 363 - DNA, 1267 bp, Bifidobacterium sp.
  MSX5B
gctggcggcgtgcttaacacatgcaagtcgaacgagtggcgaacgggtgagtaatgcgtgaccgacctgccccatacaccggaatagctcctggaaacgggtggtaatgccggatgctgaaagtcggtatgggatggggtcgcgtcctatcagcttgatggcggggtaacggcccaccatggcttcgacgggtagccggcctgagagggcgaccggccacattgggactgagatacggcccagactcctacgggaggcagcagtggggaatattgcacaatgggcgcaagcctgatgcagcgacgccgcgtgcgggatgaaggccttcgggttgtaaaccgcttttgatcgggagcatgagtgtacccttcgaataagcaccggctaactacgtgccagcagccgcggtaatacgtagggtgcaagcgttatccggaattattgggcgtaaagggctcgtaggcggttcgtcgcgtccggtgtgaaagcccatcgcttaacggtgggtctgcgccgggtacgggcgggctggagtgcggtaggggagactggaattcccggtgtaacggtggaatgtgtagatatcgggaagaacaccaatggcgaaggcaggtctctgggccgactgacgctgaggagcgaaagcgtggggagcgaacaggattagataccctggtagtccacgccgtaaacggtggatgctggatgtggggcgttccgtgtcggagctaacgcgttaagcatcccgcctggggagtacggccgcaaggctaaaactcaaagaaattgacgggggcccgcacaagcggcggagcatgcggattaattcgatgcaacgcgaagaaccttacctgggcttgacatgcacaggtggtgcatggtcgtcgtcagctcgtgtcgtgagatgttgggttaagtcccgcaacgagcgcaaccctcgccctgtgttgccagcacgtgggaactcacgggggaccgccggggtcaactcggaggaaggtggggatgacgtcagatcatcatgccccttacgtccagggcttcacgcatgctacaatggccggcagcgggatgcgacatggcgacatggagcggatccctgccggtctcagttcggatggagtctgcaacccgactccagaaggcggagtcgctagtaatcgcggatcagcaacgccgcggtgaatgcgttcccgggccttgtacacaccgcccgtcaagtcatgaaagtgggcagcacccgaagccggtgcctatggagccgtct

SEQ ID NO: 364 - DNA, 1303 bp, Bifidobacterium sp.
  TM-7
tggctcaggatgaacgctggcggcgtgcttaacacatgcaagtcgaacgagtggcgaacgggtgagtaatgcgtgaccgacctgccccatacaccggaatagctcctggaaacgggtggtaatgccggatgctgaaagtcggtatgggatggggtcgcgtcctatcagcttgatggcggggtaacggcccaccatggcttcgacgggtagccggcctgagagggcgaccggccacattgggactgagatacggcccagactcctacgggaggcagcagtggggaatattgcacaatgggcgcaagcctgatgcagcgacgccgcgtgcgggatgacggccttcgggttgtaaaccgcttttgactgggagcatgagtgtacctttcgaataagcaccggctaactacgtgccagcagccgcggtaatacgtagggtgcaagcgttatccggaattattgggcgtaaagggctcgtaggcggttcgtcgcgtccggtgtgaaagtccatcgcttaacggtggatccgcgccgggtacgggcgggcttgagtgcggtaggggagactggaattcccggtgtaacggtggaatgtgtagatatcgggaagaacaccaatggcgaaggcaggtctctgggccgactgacgctgaggagcgaaagcgtggggagcgaacaggattagataccctggtagtccacgccgtaaacggtggatgctggatgtggggatctccgtgtcggagccaacgcgttaagcatcccgcctggggagtacggccgcaaggctaaaactcaaagaaattgacgggggcccgcacaagcggcggagcatgcggattaattcgatgcaacgcgaagaaccttacctgggcttgacatgcacaggtggtgcatggtcgtcgtcagctcgtgtcgtgagatgttgggttaagtcccgcaacgagcgcaaccctcgccctgtgttgccagcacgtgggaactcacgggggaccgccggggtcaactcggaggaaggtggggatgacgtcagatcatcatgccccttacgtccagggcttcacgcatgctacaatggccggcaacgggatgcgacactgtgaggtggagcggatcccttccggtctcagttcggatggagtctgcaacccgactccagaaggcggagtcgctagtaatcgcggatcagcaacgccgcggtgaatgcgttcccgggccttgtacacaccgcccgtcaagtcatgaaagtgggtagcacccgaagccggtgcccagggagccgtctaaggtgagactcgtgattggg

SEQ ID NO: 365 - DNA, 1392 bp, Bifidobacterium thermophilum
tggctcaggatgaacgctggcggcgtgcttaacacatgcaagtcgaacgggatcctgcaagcttgcttgcgggtgagagtggcgaacgggtgagtaatgcgtgaccaacctgccccatgctccggaatagctcctggaaacgggtggtaatgccggatgtgccgggctcctgcatgggggtccgggaaagctctggcggcgtgggatggggtcgcgtcctatcagcttgttggcggggtgagggcccaccaaggcttcgacgggtagccggcctgagagggcgaccggccacattgggactgagatacggcccagactcctacgggaggcagcagtggggaatattgcacaatgggcgcaagcctgatgcagcgacgccgcgtgcgggatggaggccttcgggttgtaaaccgcttttgtttgggagcaagcccttcggggtgagtgtacctttcgaataagcaccggctaactacgtgccagcagccgcggtaatacgtagggtgcgagcgttatccggatttattgggcgtaaagggctcgtaggcggttcgtcgcgtccggtgtgaaagtccatcgcctaacggtggatctgcgccgggtacgggcgggctggagtgcggtaggggagactggaattcccggtgtaacggtggaatgtgtagatatcgggaagaacaccaatggcgaaggcaggtctctgggccgttactgacgctgaggagcgaaagcgtggggagcgaacaggattagataccctggtagtccacgccgtaaacggtggatgctggatgtggggcccttccacgggtcccgtgtcggagccaacgcgttaagcatcccgcctggggagtacggccgcaaggctaaaactcaaagaaattgacgggggcccgcacaagcggcggagcatgcggattaattcgatgcaacgcgaagaaccttacctgggcttgacatgttcccgacgacggcggagacgtcgtttcccttcggggcgggttcacaggtggtgcatggtcgtcgtcagctcgtgtcgtgagatgttgggtcaagtcccgcaacgagcgcaaccctcgccccgtgttgccagcgcgtcatggcgggaactcacgggggaccgccggggttaacccgggaggaaggtggggatgacgtcagatcatcatgccccttacgtccagggcttcacgcatgctacaatggccggtacaacgggatgcgacatggcgacatggagcggatccctgaaaaccggtctcagttcggatcggagcctgcaacccggctccgtgaaggcggagtcgctagtaatcgcggatcagcaacgccgcggtgaatgcgttcccgggccttgtacacaccgcccgtcaagtcatgaaagtgggcagc

SEQ ID NO: 366 - DNA, 1412 bp, Bifidobacterium urinalis
ctggctcaggacgaacgctggcggcgtgcttaacacatgcaagtcgaacgggatcctttcaagcttgctaggggggtgagagtggcgaacgggtgagtaacgcgtgattaacctgccgtgtagtttggaatagctcctggaaacgggtggtaatgccgaatgttccacatgctcgcatgggtgtgtgggaaaacgttttagtgctatgcgatgggatcgcgtcctatcagcttgttggtggggtagtggcctaccaaggcttcgacgggtagccggcctgagagggcgaccggccacattgggactgagatacggcccagactcctacgggaggcagcagtggggaatattgcacaatggggggaaccctgatgcagcgacgccgcgtgcgggatgacggccttcgggttgtaaaccgcttttattggggagcaagcgtgagtgagtgtaccttttgaataagcaccggctaactacgtgccagcagccgcggtaatacgtagggtgcaagcgttgtccggaattattgggcgtaaagagctcgtaggcggtttgtcgcgtctggtgtgaaagtccatcgcttaacggtggattggcgcttggtacgggcaggctagagtgtagtaggggagactggaattctcggtgtaacggtggaatgtgtagatatcgggaagaacaccaatggcgaaggcaggtctctgggctattactgacgctgaggagcgaaagcgtggggagcgaacaggattagataccctggtaatccacgccgtaaacggtggatgctggatgtggggccctttccacgggttctgtgtcggagctaacgcgttaagcatcccgcctggggagtacggccgcaaggctaaaactcaaagaaattgacgggggcccgcacaagcggcggagcatgcggattaattcgatgcaacgcgaagaaccttaccaagacttgacatgttaacgatggcctcagagatggggtgtctcttcggagcgttttcacaggtggtgcatggtcgtcgtcagctcgtgtcgtgagatgttgggttaagtcccgcaacgagcgcaacccttgtcttgtgttgccagcacgttatggtgggaactcacaagagaccgccggggttaactcggaggaaggtggggatgacgtcagatcatcatgccccttacgtcttgggcttcacgcatgctacaatggccggtacagcgaggtgcgatagggtgacctggagcggatctctgaaaaccggtctcagttcggatcggagcctgcaactcggctccgtgaaggtggagtcgctagtaatcgcagatcagcaacgctgcggtgaatgcgttcccgggccttgtacacaccgcccgtcaagtcatgaaagtgggcagcacccgaagccggtggccta

SEQ ID NO: 367 - DNA, 1551 bp, Bilophila wadsworthia
tcaactggagagtttgattctggctcagattgaacgctggcggcgtgcttaacacatgcaagtcgaacgtgaaagtccttcggggcgagtaaagtggcgcacgggtgagtaacgcgtggataatctacccttaagatggggataacggctggaaacggtcgctaataccgaatacgctcccgattttatcgttggggggaaagatggcctctgcttgcaagctatcgcttaaggatgagtccgcgtcccattagctagttggcggggtaacggcccaccaaggcgacgatgggtagccggtctgagaggatgaccggccacactggaactggaacacggtccagactcctacgggaggcagcagtggggaatattgcgcaatgggcgaaagcctgacgcagcgacgccgcgtgagggatgaaggttctcggatcgtaaacctctgtcaggggggaagaaaccccctcgtgtgaataatgcgagggcttgacggtacccccaaaggaagcaccggctaactccgtgccagcagccgcggtaatacggagggtgcaagcgttaatcggaatcactgggcgtaaagcgcacgtaggcggcttggtaagtcaggggtgaaatcccacagcccaactgtggaactgcctttgatactgccaggcttgagtaccggagagggtggcggaattccaggtgtaggagtgaaatccgtagatatctggaggaacaccggtggcgaaggcggccacctggacggtaactgacgctgaggtgcgaaagcgtgggtagcaaacaggattagataccctggtagtccacgctgtaaacgatgggtgctgggtgctgggatgtatgtctcggtgccgtagctaacgcgataagcaccccgcctggggagtacggtcgcaaggctgaaactcaaagaaattgacgggggcccgcacaagcggtggagtatgtggtttaattcgatgcaacgcgaagaaccttacccaggcttgacatctagggaacccttcggaaatgaaggggtgcccttcggggagccctaagacaggtgctgcatggctgtcgtcagctcgtgccgtgaggtgttgggttaagtcccgcaacgagcgcaacccctatcttcagttgccagcaggtaaggctgggcactctggagagaccgccccggtcaacggggaggaaggtggggacgacgtcaagtcatcatggcccttacgcctggggctacacacgtactacaatggcgcgcacaaagggtagcgagaccgcgaggtggagccaatcccaaaaaacgcgtcccagtccggattggagtctgcaactcgactccatgaagtcggaatcgctagtaattcgagatcagcatgctcgggtgaatgcgttcccgggccttgtacacaccgcccgtcacaccacgaaagtcggttttacccgaagccggtgagctaactcgcaagaggagcagccgtctacggtagggccgatgattggggtgaagtcgtaacaaggtagccgtaggggaacctgcggctggatcacctcctt

SEQ ID NO: 368 - DNA, 1296 bp, Bisgaard Taxon
attgaacgctggcggcaggcttaacacatgcaagtcgaacgagtggcggacgggtgagtaatgcttgggaatctggcttatggagggggataactgcgggaaactgcagctaataccgcgtattgaaagctgccataagatgagcccaagtgggattaggtagttggtggggtaaaggcctaccaagccgacgatctctagctggtctgagaggatgaccagccacactgggactgagacacggcccagactcctacgggaggcagcagtggggaatattgcgcaatgggggaaaccctgacgcagccatgccgcgtgaatgaagaaggccttcgggttgtaaagttctttcggtaatgaggatgacgttaattacagaagaagcaccggctaactccgtgccagcagccgcggtaatacggagggtgcgagcgttaatcggaataactgggcgtaaagggcccgcaggcggacttttaagtgagatgtgaaatccctgggcttaacctaggaactgcatttcagactgggagtctagagtactttagggaggggtagaattccacgtgtagcggtgaaatgcgtagagatgtggaggaataccgaaggcgaaggcagccccttgggaatactgacgctcatgtgcgaaagcgtggggagcaaacaggattagataccctggtagtccacgctgtaaacgctgtcgatttggggattgggcttggtgcccgaagctaacgtgataaatcgaccgcctggggagtacggccgcaaggttaaaactcaaatgaattgacgggggcccgcacaagcggtggagcatgtggtttaattcgatgcaacgcgaagaaccttacctactcttgacatcgacaggtgctgcatggctgtcgtcagctcgtgttgtgaaatgttgggttaagtcccgcaacgagcgcaacccttatcctttgttgccagcgatcgggaactcaaaggagactgccagtgacaaactggaggaaggtggggatgacgtcaagtcatcatggcccttacgagtagggctacacacgtgctacaatggtgcacagagggcggcgagacggcgacgttgagcgaatctcagtgcatctaagtccggatggagtctgcaactcgactccagaagtcggaatcgctagtaatcgcaaatcagaatgttgcggtgaatacgttcccgggccttgtacacaccgcccgtcacaccatgggagtgggttgtaccagaagtagatgcttagggcgtttaccacggtatgattcatgactggggtg

SEQ ID NO: 369 - DNA, 1296 bp, Bisgaard Taxon; identical to SEQ ID NO: 368

SEQ ID NO: 370 - DNA, 1296 bp, Bisgaard Taxon; identical to SEQ ID NO: 368

SEQ ID NO: 371 - DNA, 1296 bp, Bisgaard Taxon; identical to SEQ ID NO: 368

SEQ ID NO: 372 - DNA, 1477 bp, Blastomonas natatoria
agagtttgatcctggctcagaacgaacgctggcggcatgcctaacacatgcaagtcgaacgaaggcttcggccttagtggcgcacgggtgcgtaacgcgtgggaatctgcccttgggttcggaataacagtgagaaattactgctaataccggatgatgacttcggtccaaagatttatcgcccaaggatgagcccgcgtaagattagctagttggtgaggtaaaggctcaccaaggcgacgatctttagctggtctgagaggatgatcagccacactgggactgagacacggcccagactcctacgggaggcagcagtggggaatattggacaatgggcgaaagcctgatccagcaatgccgcgtgagtgatgaaggccttagggttgtaaagctcttttaccagggatgataatgacagtacctggagaataagctccggctaactccgtgccagcagccgcggtaatacggagggagctagcgttgttcggaattactgggcgtaaagcgcacgtaggcggccattcaagtcagaggtgaaagcccggggctcaaccccggaactgcctttgaaactagatggcttgaatcttggagaggcgagtggaattccgagtgtagaggtgaaattcgtagatattcggaagaacaccagtggcgaaggcgactcgctggacaagtattgacgctgaggtgcgaaagcgtggggagcaaacaggattagataccctggtagtccacgccgtaaacgatgataactagctgtccgggttcatggaacttgggtggcgcagctaacgcattaagttatccgcctggggagtacggtcgcaagattaaaactcaaaggaattgacgggggcctgcacaagcggtggagcatgtggtttaattcgaagcaacgcgcagaaccttaccagcgtttgacatgtctagtatgtttcccagagatgggttacttcagttcggctggctagaacacaggtgctgcatggctgtcgtcagctcgtgtcgtgagatgttgggttaagtcccgcaacgagcgcaaccctcgtctttagttgccatcatttagttgggcactctaaagaaaccgccggtgataagccggaggaaggtggggatgacgtcaagtcctcatggcccttacacgctgggctacacacgtgctacaatggcggtgacagtgagcagctagatcgcgagatcatgctaatctcaaaaagccgtctcagttcggattgttctctgcaactcgagagcatgaaggcggaatcgctagtaatcgcggatcagcatgccgcggtgaatacgttcccaggccttgtacacaccgcccgtcacaccatgggagttggattcacccgaaggcgctgcgctaacccgcaagggaggcaggcgaccacggtgggttcagcgactggggtgaagtcgtaacaaggtagccgtaggggaacctgcggctggatcacct

SEQ ID NO: 373 - DNA, 1493 bp, Blautia coccoides
agagtttgatcctggctcaggatgaacgctggcggcgtgcttaacacatgcaagtcgagcgaagcgctaagacagatttcttcggattgaagtctttgtgactgagcggcggacgggtgagtaacgcgtgggtaacctgcctcatacagggggataacagttagaaatgactgctaataccgcataagcgcacaggaccgcatggtctggtgtgaaaaactccggtggtatgagatggacccgcgtctgattagctagttggaggggtaacggcccaccaaggcgacgatcagtagccggcctgagagggtgaacggccacattgggactgagacacggcccagactcctacgggaggcagcagtggggaatattgcacaatgggggaaaccctgatgcagcgacgccgcgtgaaggaagaagtatctcggtatgtaaacttctatcagcagggaagaaaatgacggtacctgactaagaagccccggctaactacgtgccagcagccgcggtaatacgtagggggcaagcgttatccggatttactgggtgtaaagggagcgtagacggaagagcaagtctgatgtgaaaggctggggcttaaccccaggactgcattggaaactgttgttctagagtgccggagaggtaagcggaattcctagtgtagcggtgaaatgcgtagatattaggaggaacaccagtggcgaaggcggcttactggacggtaactgacgttgaggctcgaaagcgtggggagcaaacaggattagataccctggtagtccacgccgtaaacgatgaatactaggtgtcgggtggcaaagccattcggtgccgcagcaaacgcaataagtattccacctggggagtacgttcgcaagaatgaaactcaaaggaattgacggggacccgcacaagcggtggagcatgtggtttaattcgaagcaacgcgaagaaccttaccaagtcttgacatccctctgaccgtcccgtaacgggggcttcccttcggggcagaggagacaggtggtgcatggttgtcgtcagctcgtgtcgtgagatgttgggttaagtcccgcaacgagcgcaacccttatccttagtagccagcacatgatggtgggcactctagggagactgccggggataacccggaggaaggcggggacgacgtcaaatcatcatgccccttatgatttgggctacacacgtgctacaatggcgtaaacaaagggaagcgagacagcgatgttgagcgaatcccaaaaataacgtcccagttcggactgcagtctgcaactcgactgcacgaagctggaatcgctagtaatcgcggatcagaatgccgcggtgaatacgttcccgggtcttgtacacaccgcccgtcacaccatgggagtcagtaacgcccgaagtcagtgacctaaccgaaaggaaggagctgccgaaggcgggaccgataactggggtgaagtcgtaacaaggtaacc

SEQ ID NO: 374 - DNA, 1362 bp, Blautia glucerasea
  modified_base (944)..(944): a, c, t, g, unknown or other
tggaagcttcggtggaaatagcttgttcctagtggcggacgggtgagtaacgcgtgggtaacctgcctcacactgggggataacagtcagaaatgactgctaataccgcataagcgcacgggattgcatgatccagtgtgaaaaactccggtggtgtgagatggacccgcgttggattagccagttggcagggtaacggcctaccaaagcgacgatccatagccggcctgagagggtggacggccacattgggactgagacacggcccagactcctacgggaggcagcagtggggaatattgcacaatgggggaaaccctgatgcagcgacgccgcgtgaaggaagaagtatctcggtatgtaaacttctatcagcagggaagaaaatgacggtacctgactaagaagccccggctaactacgtgccagcagccgcggtaatacgtagggggcaagcgttatccggatttactgggtgtaaagggagcgtagacggagcagcaagtctgatgtgaaaggcaggggctcaacccctggactgcattggaaactgttgatcttgagtaccggagaggtaagcggaattcctagtgtagcggtgaaatgcgtagatattaggaggaacaccagtggcgaaggcggcttactggacggtaactgacgttgaggctcgaaagcgtggggagcaaacaggattagataccctggtagtccacgccgtaaacgatgaatactaggtgtcgggtgcagagccattcggtgccgcagcaaacgcagtaagtattccacctggggagtacgttcgcaagaatgaaactcaaaggaattgacggggacccgcacaagcggtggagcatgtggtttaattcgaagcaacgcgaagaaccttaccaagtcttgacatccctatgaccggcgagtaacgtcgccttttcttcggagcngaggagacaggtggtgcatggttgtcgtcagctcgtgtcgtgagatgttgggttaagtcccgcaacgagcgcaacccctatccttagtagccagcggtttggccgggcactctgaggagactgccagggataacctggaggaaggcggggatgacgtcaaatcatcatgccccttatgatttgggctacacacgtgctacaatggcgtaaacaaagggaagcgagagtgtgagcttaagcaaatcccaaaaataacgtcccagttcggactgcagtctgcaactcgactgcacgaagctggaatcgctagtaatcgcggatcagaatgccgcggtgaatacgttcccgggtcttgtacacaccgcccgtcacaccatgggagtcagtaacgcccgaagtcagtgaccgaaccgaaagg

SEQ ID NO: 375 - DNA, 1026 bp, Blautia glucerasei
  modified_base (10)..(10): a, c, t, g, unknown or other
  modified_base (37)..(39): a, c, t, g, unknown or other
  modified_base (861)..(861): a, c, t, g, unknown or other
  modified_base (932)..(934): a, c, t, g, unknown or other
  modified_base (941)..(943): a, c, t, g, unknown or other
  modified_base (950)..(951): a, c, t, g, unknown or other
  modified_base (953)..(953): a, c, t, g, unknown or other
  modified_base (957)..(957): a, c, t, g, unknown or other
  modified_base (965)..(965): a, c, t, g, unknown or other
  modified_base (967)..(967): a, c, t, g, unknown or other
  modified_base (970)..(972): a, c, t, g, unknown or other
  modified_base (991)..(992): a, c, t, g, unknown or other
  modified_base (1019)..(1019): a, c, t, g, unknown or other
cgaacggggnacattttattggaagcttcggctaggnnntatagcttgttcctagtggcggacgggtgagtaacgcgtgggtaacctgcctcacactgggggataacagtcagaaatgactgctaataccgcataagcgcacgggattgcatgatccagtgtgaaaaactccggtggtgtgagatggacccgcgttggattagccagttggcagggtaacggcctaccaaagcgacgatccatagccggcctgagagggtggacggccacattgggactgagacacggcccagactcctacgggaggcagcagtggggaatattgcacaatgggggaaaccctgatgcagcgacgccgcgtgaaggaagaagtatctcggtatgtaaacttctatcagcagggaagaaaatgacggtacctgactaagaagccccggctaactacgtgccagcagccgcggtaatacgtagggggcaagcgttatccggatttactgggtgtaaagggagcgtagacggagcagcaagtctgatgtgaaaggcaggggctcaacccctggactgcattggaaactgttgatcttgagtaccggagaggtaagcggaattcctagtgtagcggtgaaatgcgtagatattaggaggaacaccagtggcgaaggcggcttactggacggtaactgacgttgaggctcgaaagcgtggggagcaaacaggattagataccctggtagtccacgccgtaaacgatgaatactaggtgtcgggtggcagagccattcggtgccgcagcaaacgcagtaagtattccacctggggagtacgttcgcaagaatgaaactcaaaggaattgacgggganccgcacaagcggtggagcatgtggtttaattcgaagcaacgcgaagaaccttaccaagtcttgacatcccnnngaccggnnngtaacgnngncttnctcttcgnancannngagacaggtggtgcatggnngtcgtcagctcgtgtcgtgagatgttnggttaag

SEQ ID NO: 376 - DNA, 1157 bp, Blautia hansenii
agagtttgatcctggctcaggatgaacgctggcggcgtgcttaacacatgcaagtcgagcgaagcacttatcattgactcttcggaagatttgatatttgactgagcggcggacgggtgagtaacgcgtgggtaacctgcctcatacaggggaataacagttagaaatggctgctaatgccgcataagcgcacaggatcgcatggtctggtgtgaaaaactgaggtggtatgagatggacccgcgtctgattaggtagttggtggggtaacggcctaccaagccgacgatcagtagccggcctgagagggtgaacggccacattgggactgagacacggcccagactcctacgggaggcagcagtggggaatattgcacaatgggggaaaccctgatgcagcgacgccgcgtgaaggaagaagtatctcggtatgtaaacttctatcagcagggaagaaaatgacggtacctgactaagaagccccggctaactacgtgccagcagccgcggtaatacgtagggggcaagcgttatccggatttactgggtgtaaagggagcgtagacggaagagcaagtctgatgtgaaaggctggggcttaaccccaggactgcattggaaactgtttttctagagtgccggagaggtaagcggaattcctagtgtagcggtgaaatgcgtagatattaggaggaacaccagtggcgaaggcggcttactggacggtaactgacgttgaggctcgaaagcgtggggagcaaacaggattagataccctggtagtccacgccgtaaacgatgaatactaggtgtcggggtgcaaagcagttcggtgccgcagcaaacgcaataagtattccacctggggagtacgttcgcaagaatgaaactcaaaggaattgacggggacccgcacaagcggtggagcatgtggtttaattcgaagcaacgcgaagaaccttaccaagtcttgacatctgcctgaccgttccttgaccggagctttccttcgggacaggcaagacaggtggtgcatggttgtcgtcagctcgtgtcgtgagatgttgggttaagtcccgcaacgagcgcaacccctatccttagtagccagcagttcggctgggcactctagggagactgccggggataacccgg

SEQ ID NO: 377 - DNA, 975 bp, Blautia hydrogenotrophica
  modified_base (23)..(23): a, c, t, g, unknown or other
  modified_base (947)..(947): a, c, t, g, unknown or other
  modified_base (952)..(953): a, c, t, g, unknown or other
  modified_base (963)..(964): a, c, t, g, unknown or other
tttcggttgaagttttctattgnctgagtggcggacgggtgagtaacgcgtgggtaacctgccctatacagggggataacagttagaaatgactgctaataccgcataagcgcacagcttcgcatgaagcggtgtgaaaaactgaggtggtataggatggacccgcgttggattagctagttggtgaggtaacggcccaccaaggcgacgatccatagccggcctgagagggtgaacggccacattgggactgagacacggcccaaactcctacgggaggcagcagtggggaatattgcacaatgggggaaaccctgatgcagcgacgccgcgtgaaggaagaagtatctcggtatgtaaacttctatcagcagggaagaaagtgacggtacctgactaagaagccccggctaattacgtgccagcagccgcggtaatacgtaaggggcaagcgttatccggatttactgggtgtaaagggagcgtagacggtttggcaagtctgatgtgaaaggcatgggctcaacctgtggactgcattggaaactgtcagacttgagtgccggagaggcaagcggaattcctagtgtagcggtgaaatgcgtagatattaggaggaacaccagtggcgaaggcggcctgctggacggtaactgacgttgaggctcgaaagcgtggggagcaaacaggattagataccctggtagtccacgctgtaaacgatgaatactaggtgtcgggtggcaaagccattcggtgccgcagcaaacgcaataagtattccacctggggagtacgttcgcaagaatgaaactcaaaggaattgacggggacccgcacaagcggtggagcatgtggtttaattcgaagcaacgcgaagaaccttaccaaatcttgacatccctctgaccgggaagtaatgttcccttttcttcggaacagagganacagnnggtgcatggnngtcgtcagctc

SEQ ID NO: 378 - DNA, 998 bp, Blautia luti
  modified_base (33)..(33): a, c, t, g, unknown or other
  modified_base (765)..(767): a, c, t, g, unknown or other
  modified_base (771)..(775): a, c, t, g, unknown or other
  modified_base (915)..(916): a, c, t, g, unknown or other
  modified_base (929)..(929): a, c, t, g, unknown or other
  modified_base (940)..(940): a, c, t, g, unknown or other
  modified_base (949)..(949): a, c, t, g, unknown or other
  modified_base (958)..(958): a, c, t, g, unknown or other
  modified_base (966)..(968): a, c, t, g, unknown or other
  modified_base (972)..(973): a, c, t, g, unknown or other
  modified_base (975)..(976): a, c, t, g, unknown or other
  modified_base (979)..(979): a, c, t, g, unknown or other
  modified_base (981)..(981): a, c, t, g, unknown or other
  modified_base (984)..(985): a, c, t, g, unknown or other
  modified_base (991)..(992): a, c, t, g, unknown or other
tcgaacgggaattactttattgaaacttcggtngatttaatttaattctagtggcggacgggtgagtaacgcgtgggtaacctgccttatacagggggataacagtcagaaatggctgctaataccgcataagcgcacagagctgcatggctcagtgtgaaaaactccggtggtataagatggacccgcgttggattagcttgttggtggggtaacggcccaccaaggcgacgatccatagccggcctgagagggtgaacggccacattgggactgagacacggcccagactcctacgggaggcagcagtggggaatattgcacaatgggggaaaccctgatgcagcgacgccgcgtgaaggaagaagtatctcggtatgtaaacttctatcagcagggaagatagtgacggtacctgactaagaagccccggctaactacgtgccagcagccgcggtaatacgtagggggcaagcgttatccggatttactgggtgtaaagggagcgtagacggtgtggcaagtctgatgtgaaaggcatgggctcaacctgtggactgcattggaaactgtcatacttgagtgccggaggggtaagcggaattcctagtgtagcggtgaaatgcgtagatattaggaggaacaccagtggcgaaggcggcttactggacggtaactgacgttgaggctcgaaagcgtggggagcaaacaggattagataccctggtagtccacgccgtaaacgatgaatactaggtgtcgggnnncatnnnnncttcggtgccgtcgcaaacgcagtaagtattccacctggggagtacgttcgcaagaatgaaactcaaaggaattgacggggacccgcacaagcggtggagcatgtggtttaattcgaagcaacgcgaagaaccttaccanntcttgacatcccnctgaccggatnctttaatcnggatctttnccttcggnnnaganngnnacngnggnncatggnngtcgtc

SEQ ID NO: 379 - DNA, 1393 bp, Blautia producta
  modified_base (10)..(10): a, c, t, g, unknown or other
  modified_base (15)..(16): a, c, t, g, unknown or other
  modified_base (42)..(42): a, c, t, g, unknown or other
agcgaagcancttgnncggatttcttcggattgaagtttttngtgactgagcggcggacgggtgagtaacgcgtgggtaacctgcctcatacagggggataacagttagaaatggctgctaataccgcataagcgcacaggaccgcatggtctggtgtgaaaaactccggtggtatgagatggacccgcgtctgattagctagttggaggggtaacggcccaccaaggcgacgatcagtagccggcctgagagggtgaacggccacattgggactgagacacggcccagactcctacgggaggcagcagtggggaatattgcacaatgggggaaaccctgatgcagcgacgccgcgtgaaggaagaagtatctcggtatgtaaacttctatcagcagggaagaaaatgacggtacctgactaagaagccccggctaactacgtgccagcagccgcggtaatacgtagggggcaagcgttatccggatttactgggtgtaaagggagcgtagacggaagagcaagtctgatgtgaaaggctggggcttaaccccaggactgcattggaaactgtttttctagagtgccggagaggtaagcggaattcctagtgtagcggtgaaatgcgtagatattaggaggaacaccagtggcgaaggcggcttactggacggtaactgacgttgaggctcgaaagcgtggggagcaaacaggattagataccctggtagtccacgccgtaaacgatgaatactaggtgtcgggtggcaaagccattcggtgccgcagcaaacgcaataagtattccacctggggagtacgttcgcaagaatgaaactcaaaggaattgacggggacccgcacaagcggtggagcatgtggtttaattcgaagcaacgcgaagaaccttaccaagtcttgacatccctctgaccggcccgtaacggggccttcccttcggggcagaggagacaggtggtgcatggttgtcgtcagctcgtgtcgtgagatgttgggttaagtcccgcaacgagcgcaacccctatccttagtagccagcaggtgaagctgggcactctagggagactgccggggataacccggaggaaggcggggacgacgtcaaatcatcatgccccttatgatttgggctacacacgtgctacaatggcgtaaacaaagggaagcgagacagcgatgttgagcaaatcccaaaaataacgtcccagttcggactgcagtctgcaactcgactgcacgaagctggaatcgctagtaatcgcgaatcagaatgtcgcggtgaatacgttcccgggtcttgtacacaccgcccgtcacaccatgggagtcagtaacgcccgaagttcagtgacccaaccttataggagggagct

SEQ ID NO: 380 - DNA, 1366 bp, Blautia schinkii
tgacagagacttcggttgaagtcgttataatcctagtggcggacgggtgagtaacgcgtgggtaacctgcctcacactgggggataacagtcagaaatgactgctaataccgcataagcgcacggggctgcatggttcagtgtgaaaaactccggtggtgtgagatggacccgcgttggattagccagttggcagggtaacggcctaccaaagcgacgatccatagccggcctgagagggtggacggccacattgggactgagacacggcccagactcctacgggaggcagcagtggggaatattgcacaatgggggaaaccctgatgcagcgacgccgcgtgaaggaagaagtatctcggtatgtaaacttctatcagcagggaagaaaatgacggtacctgactaagaagccccggctaactacgtgccagcagccgcggtaatacgtagggggcaagcgtatccggatttactgggtgtaaagggagcgtagacggagcagcaagtctgatgtgaaaggcgggggctcaacccccggactgcattggaaactgttgatcttgagtaccggagaggtaagcggaattcctagtgtagcggtgaaatgcgtagatattaggaggaacaccagtggcgaaggcggcttactggacggtaactgacgttgaggctcgaaagcgtggggagcaaacaggattagataccctggtagtccacgccgtaaacgatgaatactaggtgtcgggtggcagagccattcggtgccgcagcaaacgcagtaagtattccacctggggagtacgttcgcaagaatgaaactcaaaggaattgacggggacccgcacaagcggtggagcatgtggtttaattcgaagcaacgcgaagaaccttaccaagtcttgacatccctatgaccggtgagtaacgtcacctttccttcgggacagaggagacaggtggtgcatggttgtcgtcagctcgtgtcgtgagatgttgggttaagtcccgcaacgagcgcaacccctatccttagtagccagcggtttggccgggcactctgaggagactgccagggataacctggaggaaggcggggatgacgtcaaatcatcatgccccttatgatttgggctacacacgtgctacaatggcgtaaacaaagggaagcgagagtgtgagcttaagcaaatcccaaaaataacgtcccagttcggactgcagtctgcaactcgactgcacgaagctggaatcgctagtaatcgcggatcagaatgccgcggtgaatacgttcccgggtcttgtacacaccgcccgtcacaccatgggagtcagtaacgcccgaagtcagtgaccgaaccgaaagg

SEQ ID NO: 381 - DNA, 1015 bp, Blautia sp.
  M25
  modified_base (77)..(77): a, c, t, g, unknown or other
gaaggaagaagtatctcggtatgtaaacttctatcagcagggaagataatgacggtacctgactaagaagccccggnctaactacgtgccagcagccgcggtaatacgtagggggcgagcgttatccggatttactgggtgtaaagggagcgtagacggcgtatcaagtctgatgtgaaaggcaggggcttaacccctggactgcattggaaactggtatgcttgagtgccggaggggtaagcggaattcctagtgtagcggtgaaatgcgtagatattaggaggaacaccagtggcgaaggcggcttactggacggtaactgacgttgaggctcgaaagcgtggggagcaaacaggattagataccctggtagtccacgccgtaaacgatgaatactaggtgtctgggagcacagctcttaggtgccgccgcaaacgcattaagtattccacctggggagtacgttcgcaagaatgaaactcaaaggaattgacggggacccgcacaagcggtggagcatgtggtttaattcgaagcaacgcgaagaaccttaccaaatcttgacatccctctgacagagtatgtaatgtacttttccttcgggacaggggagacaggtggtgcatggttgtcgtcagctcgtgtcgtgagatgttgggttaagtcccgcaacgagcgcaacccctatccttagtagccagcaagtaatgttgggcactctgaggagactgccagggataacctggaggaaggcggggatgacgtcaaatcatcatgccccttatgatttgggctacacacgtgctacaatggcgtaaacaaagggaagcgaacctgtgagggtgggcaaatctcaaaaataacgtcccagttcggactgcagtctgcaactcgactgcacgaagctggaatcgctagtaatcgcggatcagaatgccgcggtgaatacgttcccgggtcttgtacacaccgcccgtcacaccatgggagtcagtaacgcccgaagtcagtgac

SEQ ID NO: 382 - DNA, 1372 bp, Blautia stercoris
tgcaagtcgagcgaagcgcttacgacagaaccttcgggggaagatgtaagggactgagcggcggacgggtgagtaacgcgtgggtaacctgcctcatacagggggataacagttggaaacggctgctaataccgcataagcgcacggtatcgcatgatacagtgtgaaaaactccggtggtatgagatggacccgcgtctgattagctagttggaggggtaacggcccaccaaggcgacgatcagtagccggcctgagagggtgaacggccacattgggactgagacacggcccagactcctacgggaggcagcagtggggaatattgcacaatgggggaaaccctgatgcagcgacgccgcgtgaaggaagaagtatctcggtatgtaaacttctatcagcagggaagaaaatgacggtacctgactaagaagccccggctaactacgtgccagcagccgcggtaatacgtagggggcaagcgttatccggatttactgggtgtaaagggagcgtagacggaagagcaagtctgatgtgaaaggctggggcttaaccccaggactgcattggaaactgtttttcttgagtgccggagaggtaagcggaattcctagtgtagcggtgaaatgcgtagatattaggaggaacaccagtggcgaaggcggcttactggacggtaactgacgttgaggctcgaaagcgtggggagcaaacaggattagataccctggtagtccacgccgtaaacgatgaatactaggtgttggggagcaaagctcttcggtgccgcagcaaacgcaataagtattccacctggggagtacgttcgcaagaatgaaactcaaaggaattgacggggacccgcacaagcggtggagcatgtggtttaattcgaagcaacgcgaagaaccttaccaagtcttgacatcgatctgaccggttcgtaatggaacctttccttcgggacagagaagacaggtggtgcatggttgtcgtcagctcgtgtcgtgagatgttgggttaagtcccgcaacgagcgcaacccctatcctcagtagccagcaggtgaagctgggcactctgtggagactgccagggataacctggaggaaggcggggacgacgtcaaatcatcatgccccttatgatttgggctacacacgtgctacaatggcgtaaacaaagggaagcgagcccgcgagggggagcaaatcccaaaaataacgtcccagttcggactgcagtctgcaactcgactgcacgaagctggaatcgctagtaatcgcgaatcagaatgtcgcggtgaatacgttcccgggtcttgtacacaccgcccgtcacaccatgggagtcagtaacgcccgaagtc

SEQ ID NO: 383 - DNA, 1375 bp, Blautia wexlerae
  modified_base (12)..(13): a, c, t, g, unknown or other
  modified_base (17)..(17): a, c, t, g, unknown or other
  modified_base (21)..(21): a, c, t, g, unknown or other
  modified_base (27)..(27): a, c, t, g, unknown or other
  modified_base (47)..(47): a, c, t, g, unknown or other
  modified_base (917)..(917): a, c, t, g, unknown or other
  modified_base (958)..(958): a, c, t, g, unknown or other
tcgaacgggaanntatnttcnattganacttcggtggatttagattntatttcgtagtggcggacgggtgagtaacgcgtgggtaacctgccttatacagggggataacagtcagaaatggctgctaataccgcataagcgcacagagctgcatggctcagtgtgaaaaactccggtggtataagatggacccgcgttggattagctagttggtggggtaacggcccaccaaggcgacgatccatagccggcctgagagggtgaacggccacattgggactgagacacggcccagactcctacgggaggcagcagtggggaatattgcacaatgggggaaaccctgatgcagcgacgccgcgtgaaggaagaagtatctcggtatgtaaacttctatcagcagggaagatagtgacggtacctgactaagaagccccggctaactacgtgccacagccgcgaagggggcagcgttatccggatttactgggtgtaaagggagcgtagacggtgtggcaagttgatgtgaaaggcatgggctcaacctgtggatgcattggaaactgtcatacttgagtgccggaggggtaagcggaattctagtgtagcggtgaaatgcgtagatattaggaggaacaccagtggcgaaggcggcttactggacggtaactgacgttgaggctcgaaagcgtggggagcaaacaggattagataccctggtagtccacgccgtaaacgatgaatactaggtgtcgggtggcaaccttcggtgccgtcgcaaacgcagtaagtattccacctggggagtacgttcgcaagaatgaaactcaaaggaattgacggggacccgcacaagcggtggagcatgtggtttaattcgaagcaacgcgaagaaccttaccaagtcttgacatccnatttaacgggtcttaaaggggcgtttacgttggggaaagtntgatatgagaggcatgtgcttaacctgctcgtgtcgtgagatgttgggttaagtcccgcaacgagcgcaacccctatcctcagtagccagcatttaaggtgggcactctggggagactgccagggataacctggaggaaggcggggatgacgtcaaatcatcatgccccttatgatttgggctacacacgtgctacaatggcgtaaacaaagggaagcgagattgtgagatggagcaaatcccaaaaataacgtcccagttcggactgtagtctgcaacccgactacacgaagctggaatcgctagtaatcgcggatcagaatgccgcggtgaatacgttcccgggtcttgtacacaccgcccgtcacaccatgggagtcagtaacgcccgaagtcagtgacctaactgcaaagaag

SEQ ID NO: 384 - DNA, 1464 bp, Bordetella bronchiseptica
  modified_base (87)..(87): a, c, t, g, unknown or other
  modified_base (160)..(160): a, c, t, g, unknown or other
  modified_base (243)..(243): a, c, t, g, unknown or other
  modified_base (331)..(331): a, c, t, g, unknown or other
  modified_base (380)..(380): a, c, t, g, unknown or other
  modified_base (958)..(958): a, c, t, g, unknown or other
  modified_base (1287)..(1287): a, c, t, g, unknown or other
  modified_base (1391)..(1391): a, c, t, g, unknown or other
  modified_base (1409)..(1409): a, c, t, g, unknown or other
aactgaagagtttgatcctggctcagattgaacgctggcgggatgctttacacatgcaagtcggacggcagcacgggcttcggcctngtggcgagtggcgaacgggtgagtaatgtatcggaacgtgcccagtagcgggggataactacgcgaaagcgtngctaataccgcatacgccctacgggggaaagcgggggaccttcgggcctcgcactattggagcggccgatatcggattagctngttggtggggtaacggcctaccaaggcgacgatccgtagctggtttgagaggacgaccagccacactgggactgagacacggcccagnctcctacgggaggcagcagtggggaattttggacaatgggggcaacccngatccagccatcccgcgtgtgcgatgaaggccttcgggttgtaaagcacttttggcaggaaagaaacggcacgggctaatatcctgtgcaactgacggtacctgcagaataagcaccggctaactacgtgccagcagccgcggtaatacgtagggtgcaagcgttaatcggaattactgggcgtaaagcgtgcgcaggcggttcggaaagaaagatgtgaaatcccagggcttaaccttggaactgcatttttaactaccgggctagagtgtgtcagagggaggtggaattccgcgtgtagcagtgaaatgcgtagatatgcggaggaacaccgatggcgaaggcagcctcctgggataacactgacgctcatgcacgaaagcgtggggagcaaacaggattagataccctggtagtccacgccctaaacgatgtcaactagctgttggggccttcgggccttggtagcgcagctaacgcgtgaagttgaccgcctggggagtacggtcgcaagattaaaactcaaaggaattgacggggacccgcacaagcggtggatgatgtggattaattcgatncaacgcgaaaaaccttacctacccttgacatgtctggaatcccgaagagatttgggagtgctcgcaagagaaccggaacacaggtgctgcatggctgtcgtcagctcgtgtcgtgagatgttgggttaagtcccgcaacgagcgcaacccttgtcattagttgctacgaaagggcactctaatgagactgccggtgacaaaccggaggaaggtggggatgacgtcaagtcctcatggcccttatgggtagggcttcacacgtcatacaatggtcgggacagagggtcgccaacccgcgagggggagccaatcccagaaacccgatcgtngtccggatcgcagtctgcaactcgactgcgtgaagtcggaatcgctagtaatcgcggatcagcatgtcgcggtgaatacgttcccgggtcttgtacacaccgcncgtcacaccatgggagtnggttttaccagaagtagttagcctaaccgcaaggggggcgattaccacggtagga

SEQ ID NO: 385 - DNA, 1292 bp, Bordetella holmesii
attgaacgctggcgggatgctttacacatgcaagtcggacgagtggcgaacgggtgagtaatgtatcggaacgtgcccggtagcgggggataactacgcgaaagcgtggctaataccgcatacggaaaggcactattggagcggccgatatcggattagctagttggtggggtaacggcctaccaaggcgacgatccgtagctggtttgagaggacgaccagtcacactgggactgagacacggcccagactcctacgggaggcagcagtggggaattttggacaatgggggcaaccctgatccagccatcccgcgtgtgcgatgaaggccttcgggttgtaaagcacttttggcaggaaagatgacggtacctgcagaataagcaccggctaactacgtgccagcagccgcggtaatacgtagggtgcaagcgttaatcggaattactgggcgtaaagcgtgcgcaggcggttcggaaagaaagatgtgaaatcccagggcttaaccttggaactgcatttttaactaccgagctagagtgtgtcagagggaggtggaattccgcgtgtagcagtgaaatgcgtagatatgcggaggaacaccgatggcgaaggcagcctcctgggataactgacgctcatgcacgaaagtgtggggagcaaacaggattagataccctggtagtccacgccctaaacgatgtcaactagctgttggggccttggtagcgcagctaacgcgtgaagttgaccgcctggggagtacggtcgcaagattaaaactcaaaggaattgacggggacccgcacaagcggtggatgatgtggattaattcgatgcaacgcgaaaaaccttacctacccttgacatgcacaggtgctgcatggctgtcgtcagctcgtgtcgtgagatgttgggttaagtcccgcaacgagcgcaacccttgtcattagttgctacggcactctaatgagactgccggtgacaaaccggaggaaggtggggatgacgtcaagtcctcatggcccttatgggtagggcttcacacgtcatacaatggtcggcagagggttgccaacccgcgagggggagccaatcccagccggtcgtagtccggacgcagtctgcaactcgactgcggaagtcggaatcgctagtaatcgcggatcagcatgtcgcggtgaatacgttcccgggtcttgtacacaccgcccgtcacaccatgggagtgggttttaccagaagtagttgcctagggcgattaccacggtaggattcatgactggggtgaa

SEQ ID NO: 386 - DNA, 1464 bp, Bordetella parapertussis
  modified_base (87)..(87): a, c, t, g, unknown or other
  modified_base (243)..(243): a, c, t, g, unknown or other
  modified_base (331)..(331): a, c, t, g, unknown or other
  modified_base (1229)..(1229): a, c, t, g, unknown or other
  modified_base (1371)..(1371): a, c, t, g, unknown or other
  modified_base (1391)..(1391): a, c, t, g, unknown or other
aactgaagagtttgatcctggctcagattgaacgctggcgggatgctttacacatgcaagtcggacggcagcacgggcttcggcctngtggcgagtggcgaacgggtgagtaatgtatcggaacgtgcccagtagcgggggataactacgcgaaagcgtagctaataccgcatacgccctacgggggaaagcgggggaccttcgggcctcgcactattggagcggccgatatcggattagctngttggtggggtaacggcctaccaaggcgacgatccgtagctggtttgagaggacgaccagccacactgggactgagacacggcccagnctcctacgggaggcagcagtggggaattttggacaatgggggcaaccctgatccagccatcccgcgtgtgcgatgaaggccttcgggttgtaaagcacttttggcaggaaagaaacggcacgggctaatatcctgtgcaactgacggtacctgcagaataagcaccggctaactacgtgccagcagccgcggtaatacgtagggtgcaagcgttaatcggaattactgggcgtaaagcgtgcgcaggcggttcggaaagaaagatgtgaaatcccagggcttaaccttggaactgcatttttaactaccgggctagagtgtgtcagagggaggtggaattccgcgtgtagcagtgaaatgcgtagatatgcggaggaacaccgatggcgaaggcagcctcctgggataacactgacgctcatgcacgaaagcgtggggagcaaacaggattagataccctggtagtccacgccctaaacgatgtcaactagctgttggggccttcgggccttggtagcgcagctaacgcgtgaagttgaccgcctggggagtacggtcgcaagattaaaactcaaaggaattgacggggacccgcacaagcggtggatgatgtggattaattcgatgcaacgcgaaaaaccttacctacccttgacatgtctggaatcccgaagagatttgggagtgctcgcaagagaaccggaacacaggtgctgcatggctgtcgtcagctcgtgtcgtgagatgttgggttaagtcccgcaacgagcgcaacccttgtcattagttgctacgaaagggcactctaatgagactgccggtgacaaaccggaggaaggtggggatgacgtcaagtcctcatggcccttatgggtagggcttcacacgtcatacaatngtcgggacagagggtcgccaacccgcgagggggagccaatcccagaaacccgatcgtagtccggatcgcagtctgcaactcgactgcgtgaagtcggaatcgctagtaatcgcggatcagcatgtcgcggtgaatacgttcncgggtcttgtacacaccgcncgtcacaccatgggagtgggttttaccagaagtagttagcctaaccgcaaggggggcgattaccacggtagga

SEQ ID NO: 387 - DNA, 1533 bp, Bordetella pertussis
ttgaactgaagagtttgatcctggctcagattgaacgctggcgggatgctttacacatgcaagtcggacggcagcacgggcttcggcctggtggcgagtggcgaacgggtgagtaatgtatcggaacgtgcccagtagcgggggataactacgcgaaagcgtggctaataccgcatacgccctacgggggaaagcgggggaccttcgggcctcgcactattggagcggccgatatcggattagctagttggtggggtaacggcctaccaaggcgacgatccgtagctggtttgagaggacgaccagccacactgggactgagacacggcccagactcctacgggaggcagcagtggggaattttggacaatgggggcaaccctgatccagccatcccgcgtgtgcgatgaaggccttcgggttgtaaagcacttttggcaggaaagaaacggcacgggctaatatcctgtgcaactgacggtacctgcagaataagcaccggctaactacgtgccagcagccgcggtaatacgtagggtgcaagcgttaatcggaattactgggcgtaaagcgtgcgcaggcggttcggaaagaaagatgtgaaatcccagggcttaaccttggaactgcatttttaactaccgggctagagtgtgtcagagggaggtggaattccgcgtgtagcagtgaaatgcgtagatatgcggaggaacaccgatggcgaaggcagcctcctgggataacactgacgctcatgcacgaaagtgtggggagcaaacaggattagataccctggtagtccacgccctaaacgatgtcaactagctgttggggccttcgggccttggtagcgcagctaacgcgtgaagttgaccgcctggggagtacggtcgcaagattaaaactcaaaggaattgacggggacccgcacaagcggtggatgatgtggattaattcgatgcaacgcgaaaaaccttacctacccttgacatgtctggaatcccgaagagatttgggagtgctcgcaagagaaccggaacacaggtgctgcatggctgtcgtcagctcgtgtcgtgagatgttgggttaagtcccgcaacgagcgcaacccttgtcattagttgctacgaaagggcactctaatgagactgccggtgacaaaccggaggaaggtggggatgacgtcaagtcctcatggcccttatgggtagggcttcacacgtcatacaatggtcgggacagagggttgccaacccgcgagggggagccaatcccagaaacccggtcgtagtccggatcgcagtctgcaactcgactgcgtgaagtcggaatcgctagtaatcgcggatcagcatgtcgcggtgaatacgttcccgggtcttgtacacaccgcccgtcacaccatgggagtgggttttaccagaagtagttagcctaaccgcaaggggggcgattaccacggtaggattcatgactggggtgaagtcgtaacaaggtagccgtatcggaaggtgcggctggatcacctccttt

SEQ ID NO: 388 - DNA, 1533 bp, Borrelia afzelii
gaagagtttgatcctggcttagaactaacgctggcagtgcgtcttaagcatgcaagtcaaacggaatgtagcaatacatttagtggcgaacgggtgagtaacgcgtggatgatctacctatgagatggggataactactagaaatagtagctaataccgaataaggtcaattaatttgttaattgatgaaaggaagcctttaaagcttcgcttgtagatgagtctgcgtcttattagttagttggtggggtaaatgcctaccaagacgatgataagtaaccggcctgagagggtgaacggtcacactggaactgagatacggtccagactcctacgggaggcagcagctaagaatcttccgcaatgggcgaaagcctgacggagcgacactgcgtgaatgaagaaggtcgaaagattgtaaaattcttttataaatgaggaataagctttgtaggaaatgacaaagcgatgacgttaatttatgaataagccccggctaattacgtgccagcagccgcggtaatacgtaaggggcgagcgttgttcgggattattgggcgtaaagggtgagtaggcggatatataagtctatgcataaaataccacagctcaactgtggagctatgttggaaactatatgtctagagtctgatagaggaagttagaattcctggtgtaagggtggaatctgttgatatcaggaagaataccggaggcgaaggcgaacttctgggtcaagactgacgctgagtcacgaaagcgtaggtagcaaacaggattagataccctggtagtctacgctgtaaacgatgcacacttggtgttaactaaaagttagtaccgaagctaacgtgttaagtgtgccgcctggggagtatgctcgcaagagtgaaactcaaaggaattgacgggggcccgcacaagcggtggagcatgtggtttaattcgatgatacgcgaggaaccttaccagggcttgacatatataggatatagttagagataattattccccgtttggggtctatatacaggtgctgcatggttgtcgtcagctcgtgctgtgaggtgttgggttaagtcccgcaacgagcgcaacccttgttatctgttaccagcatgtaatgatggggactcagataagactgccggtgataagtcggaggaaggtgaggatgacgtcaaatcatcatggcccttatgtcctgggctacacacgtgctacaatggcctgtacaaagcgaagcgaaacagtgatgtgaagcaaaacgcacaaagcaggtctcagtccggattgaagtctgaaactcgacttcatgaagttggaatcgctagtaatcgtatatcagaatgatacggtgaatacgttctcgggccttgtacacaccgcccgtcacaccacccgagttgaggatacccgaagctattattctaacccgtaagggaggaaggtatttaaggtatgtttagtgaggggggtgaagtcgtaacaaggtagccgtactggaaagtgcggctggatcacctcctttct

SEQ ID NO: 389 - DNA, 1533 bp, Borrelia burgdorferi
gaagagtttgatcctggcttagaactaacgctggcagtgcgtcttaagcatgcaagtcaaacgggatgtagcaatacattcagtggcgaacgggtgagtaacgcgtggatgatctacctatgagatggggataactattagaaatagtagctaataccgaataaggtcagttaatttgttaattgatgaaaggaagcctttaaagcttcgcttgtagatgagtctgcgtcttattagctagttggtagggtaaatgcctaccaaggcaatgataagtaaccggcctgagagggtgaacggtcacactggaactgagatacggtccagactcctacgggaggcagcagctaagaatcttccgcaatgggcgaaagcctgacggagcgacactgcgtgaatgaagaaggtcgaaagattgtaaaattcttttataaatgaggaataagctttgtaggaaatgacaaagtgatgacgttaatttatgaataagccccggctaattacgtgccagcagccgcggtaatacgtaaggggcgagcgttgttcgggattattgggcgtaaagggtgagtaggcggatatataagtctatgcataaaataccacagctcaactgtggacctatgttggaaactatatgtctagagtctgatagaggaagttagaatttctggtgtaagggtggaatctgttgatatcagaaagaataccggaggcgaaggcgaacttctgggtcaagactgacgctgagtcacgaaagcgtagggagcaaacaggattagataccctggtagtctacgctgtaaacgatgcacacttggtgttaactaaaagttagtaccgaagctaacgtgttaagtgtgccgcctggggagtatgctcgcaagagtgaaactcaaaggaattgacgggggcccgcacaagcggtggagcatgtggtttaattcgatgatacgcgaggaaccttaccagggcttgacatatataggatatagttagagataattattccccgtttggggtctatatacaggtgctgcatggttgtcgtcagctcgtgctgtgaggtgttgggttaagtcccgcaacgagcgcaacccttgttatctgttaccagcatgtaatggtggggactcagataagactgccggtgataagtcggaggaaggtgaggatgacgtcaaatcatcatggcccttatgtcctgggctacacacgtgctacaatggcctgtacaaagcgaagcgaaacagtgatgtgaagcaaaacgcataaagcaggtctcagtccggattgaagtctgaaactcgacttcatgaagttggaatcgctagtaatcgtatatcagaatgatacggtgaatacgttctcgggccttgtacacaccgcccgtcacaccacccgagttgaggatacccgaagctattattctaacccgtaagggaggaaggtatttaaggtatgtttagtgaggggggtgaagtcgtaacaaggtagccgtactggaaagtgcggctggatcacctcctttct

SEQ ID NO: 390 - DNA, 1299 bp, Borrelia crocidurae
cctggcttagaactaacgctggcagtgcgtcttaagcatgcaagtcagacgagtggcgaacgggtgagtaacgcgtggataatctacctatgagatggggataactattagaaatagtagctaataccgaataaggaaagtcgcttgtagatgagtctgcgtcttattagctagttggtagggtaagagcctaccaaggctatgataagtaaccggcctgagagggtgaacggtcacactggaactgagatacggtccagactcctacgggaggcagcagctaagaatcttccgcaatgggcgaaagcctgacggagcgacactgcgtgaacgaagaaggtcgaaagattgtaaagttcttttataaatgaggatgacgttaatttatgaataagccccggctaattacgtgccagcagccgcggtaatacgtaaggggcgagcgttgttcgggattattgggcgtaaagggtgagtaggcggatatgcaagtctggcgtaaaataccacagctcaactgtggagctatgctagaaactgcatgactagagtctgataggggaagttagaattcctggtgtaagggtggaatctgttgatatcaggaagaataccagaggcgaaggcgaacttctaggtcaactgacgctgagtcacgaaagcgtagggagcaaacaggattagataccctggtagtctacgctgtaaacgatgcacacttggtgttaatcggttagtaccgaagctaacgtgttaagtgtgccgcctggggagtatgctcgcaagagtgaaactcaaaggaattgacgggggcccgcacaagcggtggagcatgtggtttaattcgatgatacgcgaggaaccttaccagggcttgacatatacaggtgctgcatggttgtcgtcagctcgtgctgtgaggtgttgggttaagtcccgcaacgagcgcaacccttattgtctgttaccagcatatggggactcagacgagactgccggtgataagccggaggaaggtgaggatgacgtcaaatcatcatggcccttatgtcctgggctacacacgtgctacaatggcctgcaaagcgatgcgaaacagtgatgtgaagcaaaacgcatcaggtctcagtccagatgaagtctgaaactcgacttcagaagttggaatcgctagtaatcgtatatcagaatgatacggtgaatacgttctcgggccttgtacacaccgcccgtcacaccacccgagttgaggatacccgaagctattttctaggaaggtatctaaggtatgtttagtga

SEQ ID NO: 391 - DNA, 1534 bp, Borrelia duttonii
gaagagtttgatcctggcttagaactaacgctggcagtgcgtcttaagcatgcaagtcaaacgggatgtagcaatacattcagtggcgaacgggtgagtaacgcgtggataatctacctatgagatggggataactattagaaatagtagctaataccgaataaggtcagttgagatgtcaattgatgaaaggaagcctttaaagcttcgcttgtagatgagtctgcgtcttattagctagttggtagggtaagagcctaccaaggctatgataagtaaccggcctgagagggtgaacggtcacactggaactgagatacggtccagactcctacgggaggcagcagctaagaatcttccgcaatgggcgaaagcctgacggagcgacactgcgtgaacgaagaaggtcgaaagattgtaaagttcttttataaatgaggaataagctttgtaggaaatgacaaggtgatgacgttaatttatgaataagccccggctaattacgtgccagcagccgcggtaatacgtaaggggcgagcgttgttcgggattattgggcgtaaagggtgagtaggcggatatgcaagtctgtgcgtaaaataccacagctcaactgtggagctatgctagaaactgcatgactagagtctgataggggaagttagaattcctggtgtaagggtggaatctgttgatatcaggaagaataccagaggcgaaggcgaacttctaggtcaagactgacgctgagtcacgaaagcgtagggagcaaacaggattagataccctggtagtctacgctgtaaacgatgcacacttggtgttaatcgagaggttagtaccgaagctaacgtgttaagtgtgccgcctggggagtatgctcgcaagagtgaaactcaaaggaattgacgggggcccgcacaagcggtggagcatgtggtttaattcgatgatacgcgaggaaccttaccagggcttgacatatacaggatgtagttagagataactattccccgtttggggtctgtatacaggtgctgcatggttgtcgtcagctcgtgctgtgaggtgttgggttaagtcccgcaacgagcgcaacccttattgtctgttaccagcatgtaaagatggggactcagacgagactgccggtgataagccggaggaaggtgaggatgacgtcaaatcatcatggcccttatgtcctgggctacacacgtgctacaatggcctgtacaaagcgatgcgaaacagtgatgtgaagcaaaacgcataaagcaggtctcagtccagattgaagtctgaaactcgacttcatgaagttggaatcgctagtaatcgtatatcagaatgatacggtgaatacgttctcgggccttgtacacaccgcccgtcacaccacccgagttgaggatacccgaagctattattctaacccgcaagggaggaaggtatctaaggtatgtttagtgaggggggtgaagtcgtaacaaggtagccgtactggaaagtgtggctggatcacctcctttct

SEQ ID NO: 392 - DNA, 1533 bp, Borrelia garinii
gaagagtttgatcctggcttagaactaacgctggcagtgcgtcttaagcatgcaagtcaaacgggatgtagcaatacatctagtggcgaacgggtgagtaacgcgtggatgatctacctacgagatggggataactattagaaatagtagctaataccgaataaagtcaattaatttgttaattgatgaaaggaagcctttaaagcttcgcttgtagatgagtctgcgtcttattagctagttggtagggtaaatgcctaccaaggcgatgataagtaaccggcctgagagggtgaacggtcacactggaactgagatacggtccagactcctacgggaggcagcagctaagaatcttccgcaatgggcgaaagcctgacggagcgacactgcgtgaatgaagaaggtcgaaagattgtaaaattcttttataaatgaggaataagctttgtaggaaatgacaaagtgatgacgttaatttatgaataagccccggctaattacgtgccagcagccgcggtaatacgtaaggggcgagcgttgttcgggattattgggcgtaaagggtgagtaggcggatatataagtctatgcataaaataccacagctcaactgtggaactatgttggaaactatatgtctagagtctgatagaggaagttagaatttctggtgtaagggtggaatctgttgatatcagaaagaataccggaggcgaaggcgaacttctgggtcaagactgacgctgagtcacgaaagcgtagggagcaaacaggattagataccctggtagtctacgctgtaaacgatgcacacttggtgttaactaaaagttagtaccgaagctaacgtgttaagtgtgccgcctggggagtatgctcgcaagagtgaaactcaaaggaattgacgggggcccgcacaagcggtggagcatgtggtttaattcgatgatacgcgaggaaccttaccagggcttgacatatataggatatagttagagataattattccccgtttggggtctatatacaggtgctgcatggttgtcgtcagctcgtgctgtgaggtgttgggttaagtcccgcaacgagcgcaacccttgttatctgttaccagcatgtaatggtggggactcagataagactgccggtgataagtcggaggaaggtgaggatgacgtcaaatcatcatggcccttatgtcctgggctacacacgtgctacaatggcctgtacaaagcgaagcgaaacagtgatgtgaagcaaaacgcataaagcaggtctcagtccggattgaagtctgaaactcgacttcatgaagttggaatcgctagtaatcgtatatcagaatgatacggtgaatacgttctcgggccttgtacacaccgcccgtcacaccacccgagttgaggatacccgaagctattattctaacccgtaagggaggaaggtatttaaggtatgtttagtgaggggggtgaagtcgtaacaaggtagccgtactggaaagtgcggctggatcacctcctttct

SEQ ID NO: 393 - DNA, 1273 bp, Borrelia hermsii
gggtgagtaacgcgtggataatctacctatgagatggggataactattagaaatagtagctaataccgaataaggtcaattgagatgttaattgatgaaaggaagcctttaaagcttcgcttgtagatgagtctgcgtcttattagctagttggtagggtaaaagcctaccaaggctgtgataagtaaccggcctgagagggtgaacggtcacactggaactgagatacggtccagactcctacgggaggcagcagctaagaatcttccgcaatgggcgaaagcctgacggagcgacactgcgtgaacgaagaaggtcgaaagattgtaaagttcttttataaatgaggaataagctttgtaggaaatgacaaagtgatgacgttaatttatgaataagccccggctaattacgtgccagcagccgcggtaatacgtaaggggcgagcgttgttcgggattattgggcgtaaagggtgagtaggcggatatgcaagtctatgcgtaaaataccacagctcaactgtgggaatatgctggaaactgcatgactagagtctgataggggaagttagaattcctggtgtaagggtggaatctgttgatatcaggaagaataccagaggcgaaggcgaacttctaggtcaagactgacgctgagtcacgaaagcgtagggagcaaacaggattagataccctggtagtctacgctgtaaacgatgcacacttggtgttaatcgaaaggttagtaccgaagctaacgtgttaagtgtgccgcctggggagtatgctcgcaagagtgaaactcaaaggaattgacgggggcccgcacaagcggtggagcatgtggtttaattcgatgatacgcgaggaaccttaccagggcttgacatatacaggatgtagttagagataactattccccgtttggggtctgtatacaggtgctgcatggttgtcgtcagctcgtgctgtgaggtgttgggttaagtcccgcaacgagcgcaacccttattgtctgttaccagcatgtaaagatggggactcagacgagactgccggtgataagccggaggaaggtgaggatgacgtcaaatcatcatggcccttatgtcctgggctacacacgtgctacaatggcctgtacaaagcgatgcgaaacagtgatgtgaagcaaaacgcataaagcaggtctcagtccagattgaagtctgaaactcgacttcatgaagttggaatcgctagtaatcgtatatcagaatgatacggtgaat

SEQ ID NO: 394 - DNA, 1300 bp, Borrelia hispanica
tcctggcttagaactaacgctggcagtgcgtcttaagcatgcaagtcagacgagtggcgaacgggtgagtaacgcgtggataatctacctatgagatggggataactattagaaatagtagctaataccgaataaggaaagtcgcttgtagatgagtctgcgtcttattagctagttggtagggtaagagcctaccaaggctatgataagtaaccggcctgagagggtgaacggtcacactggaactgagatacggtccagactcctacgggaggcagcagctaagaatcttccgcaatgggcgaaagcctgacggagcgacactgcgtgaacgaagaaggtcgaaagattgtaaagttcttttataaatgaggatgacgttaatttatgaataagccccggctaattacgtgccagcagccgcggtaatacgtaaggggcgagcgttgttcgggattattgggcgtaaagggtgagtaggcggatatgcaagtctagcgtaaaataccacagctcaactgtggagctatgctagaaactgcatgactagagtctgataggggaagttagaattcctggtgtaagggtggaatctgttgatatcaggaagaataccagaggcgaaggcgaacttctaggtcaactgacgctgagtcacgaaagcgtagggagcaaacaggattagataccctggtagtctacgctgtaaacgatgcacacttggtgttaatcggttagtaccgaagctaacgtgttaagtgtgccgcctggggagtatgctcgcaagagtgaaactcaaaggaattgacgggggcccgcacaagcggtggagcatgtggtttaattcgatgatacgcgaggaaccttaccagggcttgacatatacaggtgctgcatggttgtcgtcagctcgtgctgtgaggtgttgggttaagtcccgcaacgagcgcaacccttattgtctgttaccagcatatggggactcagacgagactgccggtgataagccggaggaaggtgaggatgacgtcaaatcatcatggcccttatgtcctgggctacacacgtgctacaatggcctgcaaagcgatgcgaaacagtgatgtgaagcaaaacgcatcaggtctcagtccagatgaagtctgaaactcgacttcagaagttggaatcgctagtaatcgtatatcagaatgatacggtgaatacgttctcgggccttgtacacaccgcccgtcacaccacccgagttgaggatacccgaagctattttctaggaaggtatctaaggtatgtttagtga

SEQ ID NO: 395 - DNA, 1526 bp, Borrelia persica
agtttgatcctggcttagaactaacgctggcagtgcgtcttaagcatgcaagtcagacgggatgtagcaatacattcagtggcgaacgggtgagtaacgcgtggataatctacctatgagatggggataactattagaaatagtagctaataccgaataaggtcagttgagatgtcaattgatgaaaggaagcctttaaagcttcgcttgtagatgagtctgcgtcttattagctagttggtggggtaagagcctaccaaggctatgataagtaaccggcctgagagggtgaacggtcacactggaactgagatacggtccagactcctacgggaggcagcagctaagaatcttccgcaatgggcgaaagcctgacggagcgacactgcgtgaacgaagaaggtcgaaagattgtaaagttcttttataaatgaggaataagctttgtaggaaatgacaaggtgatgacgttaatttatgaataagccccggctaattacgtgccagcagccgcggtaatacgtaaggggcgagcgttgttcgggattattgggcgtaaagggtgagtaggcggatatgcaagtctatgcgtaaaataccacagctcaactgtggagctatgctggaaactgcatgactagagtctgataggggaagttagaattcctggtgtaagggtggaatctgttgatatcaggaagaataccagaggcgaaggcgaacttctaggtcaagactgacgctgagtcacgaaagcgtagggagcaaacaggattagataccctggtagtctacgctgtaaacgatgcacacttggtgttaattgagagattagtaccgaagctaacgtgttaagtgtgccgcctggggagtatgctcgcaagagtgaaactcaaaggaattgacgggggcccgcacaagcggtggagcatgtggtttaattcgatgatacgcgagaaaccttaccagggcttgacatatacaggatgtagttagagataattattccccgtttggggtctgtatacaggtgctgcatggttgtcgtcagctcgtgctgtgaggtgttgggttaagtcccgcaacgagcgcaacccttattgtctgttaccagcatgtaaagatgggaactcagatgagactgccggtgataagccggaggaaggtgaggatgacgtcaaatcatcatggcccttatgccctgggctacacacgtgctacaatggcctgtacaaagcgaagcgaaacagtgatgtgaagcaaaacgcattaaagcaggtctcagtccagattgaagtctgaaactcgacttcatgaagttggaatcgctagtaatcgtatatcagcatgatacggtgaatacgttctcgggccttgtacacaccgcccgtcacaccacccgagttgaggatacccgaagctattattctaacccgcaagggaggaaggtatctaaggtatgtttagtgaggggggtgaagtcgtaacaaggtagccgtactggaaagtgtggctggatcacctcc

SEQ ID NO: 396 - DNA, 1525 bp, Borrelia recurrentis
agtttgatcctggcttagaactaacgctggcagtgcgtcttaagcatgcaagtcaaacgggatgtagcaatacattcagtggcgaacgggtgagtaacgcgtggataatctacctatgagatggggataactattagaaatagtagctaataccgaataaggtcagttgagatgtcaattgatgaaaggaagcctttaaagctttgcttgtagatgagtctgcgtcttattagctagttggtagggtaagagcctaccaaggctatgataagtaaccggcctgagagggtgaacggtcacactggaactgagatacggtccagactcctacgggaggcagcagctaagaatcttccgcaatgggcgaaagcctgacggagcgacactgcgtgaacgaagaaggtcgaaagattgtaaagttcttttataaatgaggaataagctttgtaggaaatgacaaggtgatgacgttaatttatgaataagtcccggctaattacgtgccagcagccgcggtaatacgtaaggggcgagcgttgttcgggattattgggcgtaaagggtgagtaggcggatatgcaagtctgtgcgtaaaataccacagctcaactgtggagctatgctagaaactgcatgactagagtctgataggggaagttagaattcctggtgtaagggtggaatctgttgatatcaggaagaataccagaggcgaaggcgaacttctaggtcaagactgacgctgagtcacgaaagcgtagggagcaaacaggattagataccctggtagtctacgctgtaaacgatgcacacttggtgttaatcgagaggttagtaccgaagctaacgtgttaagtgtgccgcctggggagtatgctcgcaagagtgaaactcaaaggaattgacgggggcccgtacaagcggtggagcatgtggtttaattcgatgatacgcgaggaaccttaccagggcttgacatatacaggatgtagttagagataactattccccgtttggggtctgtatacaggtgctgcatggttgtcgtcagctcgtgctgtgaggtgttgggttaagtcccgcaacgagcgcaacccttattgtctgttaccagcatgtaaagatggggactcagacgagactgccggtgataagccggaggaaggtgaggatgacgtcaaatcatcatggcccttatgtcctgggctacacacgtgctacaatggcctgtacaaagcgatgcgaaacagtgatgtgaagcaaaacgcataaagcaggtctcagtccagattgaagtctgaaactcgacttcatgaagttggaatcgctagtaatcgtatatcagaatgatacggtgaatacgttctcgggccttgtacacaccgcccgtcacaccacccgagttgaggatacccgaagctattattttaacccgcaagggaggaaggtatctaaggtatgtttagtgaggggggtgaagtcgtaacaaggtagccgtactggaaagtgtggctggatcacctcc

SEQ ID NO: 397 - DNA, 1467 bp, Borrelia sp.
  NE49
ctggcttagaactaacgctggcagtgcgtcttaagcatgcaagtcaaacggaatgtagcaatacattcagtggcgaacgggtgagtaacgcgtggatgatctgcctatgagatggggataactattagaaatagtagctaataccgaataaggtcaattaatttgttaattgatgaaaggaagcctttaaagcttcgcttgtagatgagtctgcgtcttattagctagttggtagggtaaatgcctaccaaggcgatgataagtaaccggcctgagagggtgaacggtcacactggaactgagatacggtccagactcctacgggaggcagcagctaagaatcttccgcaatgggcgaaagcctgacggagcgacactgcgtgaatgaagaaggtcgaaagattgtaaaattcttttataaatgaggaataagctttgtaggaaatgacaaagtgatgacgttaatttatgaataagccccggctaattacgtgccagcagccgcggtaatacgtaaggggcgagcgttgttcgggattattgggcgtaaagggtgagtaggcggatatataagtctatgcataaaataccacagctcaactgtggacctatgttggaaactatatgtctagagtctgatagaggaagttagaatttctggtgtaagggtggaatctgttgatatcagaaagaataccggaggcgaaggcgaacttctgggtcaagactgacgctgagtcacgaaagcgtagggagcaaacaggattagataccctggtagtctacgctgtaaacgatgcacacttggtgttaactaaaagttagtaccgaagctaacgtgttaagtgtgccgcctggggagtatgctcgcaagagtgaaactcaaaggaattgacgggggcccgcacaagcggtggagcatgtggtttaattcgatgatacgcgaggaaccttaccagggcttgacatatataggatatagttagagataattattccccgtttggggtctatatacaggtgctgcatggttgtcgtcagctcgtgctgtgaggtgttgggttaagtcccgcaacgagcgcaacccttgttatctgttaccagcatgtaatggtggggactcagataagactgccggtgataagtcggaggaaggtgaggatgacgtcaaatcatcatggcccttatgtcctgggctacacacgtgctacaatggcctgtacaaagcgaagcgaaacagtgatgtgaagcaaaacgcataaagcaggtctcagtccggattgaagtctgaaactcgacttcatgaagttggaatcgctagtaatcgtatatcagaatgatacggtgaatacgttctcgggccttgtacacaccgcccgtcacaccacccgagttgaggatacccgaagctattattctaacccgtaagggaggaaggtatttaaggtatgtttagtgaggggggtg

SEQ ID NO: 398 - DNA, 1531 bp, Borrelia spielmanii
agagtttgatcctggcttagaactaacgctggcagtgcgtcttaagcatgcaagtcaaacgggatgtagcaatacatctagtggcgaacgggtgagtaacgcgtggatgatctacctatgagatggggataactactagaaatagtagctaataccgaataaggtcaattaatttgttaattgatgaaaggaagcctttaaagcttcgcttgtagatgagtctgcgtcttattagttagttggtggggtaaatgcctaccaaggcgatgataagtaaccggcctgagagggtgaacggtcacactggaactgagatacggtccagactcctacgggaggcagcagctaagaatcttccgcaatgggcgaaagcctgacggagcgacactgcgtgaatgaagaaggtcgaaagattgtaaaattcttttataaatgaggaataagctttgtaggaaatgacaaggtgatgacgttaatttatgaataagccccggctaattacgtgccagcagccgcggtaatacgtaaggggcgagcgttgttcgggattattgggcgtaaagggtgagtaggcggatatataagtctatgcataaaataccacagctcaactgtggaactatgttggaaactatatgtctagagtctgatagaggaagttagaattcctggtgtaagggtggaatctgttgatatcaggaagaataccggaggcgaaggcgaacttctgggtcaagactgacgctgagtcacgaaagcgtagggagcaaacaggattagataccctggtagtctacgctgtaaacgatgcacacttggtgttaactaaaagttagtaccgaagctaacgtgttaagtgtgccgcctggggagtatgctcgcaagagtgaaactcaaaggaattgacgggggcccgcacaagcggtggagcatgtggtttaattcgatgatacgcgaggaaccttaccagggcttgacatatataggatatagttagagataattattccccgtttggggcctatatacaggtgctgcatggttgtcgtcagctcgtgctgtgaggtgttgggttaagtcccgcaacgagcgcaacccttgttatctgttaccagcatgtaatgatggggactcagataagactgccggtgataagtcggaggaaggtgaggatgacgtcaaatcatcatggcccttatgtcctgggctacacacgtgctacaatggcctgtacaaagcgaagcgaaacagtgatgtgaagcaaaacgcacaaagcaggtctcagtccggattgaagtctgaaactcgacttcatgaagttggaatcgctagtaatcgtatatcagaatgatacggtgaatacgttctcgggccttgtacacaccgcccgtcacaccacccgagttgaggatacccgaagctattattctaacccgtaagggaggaaggtatttaaggtatgtttagtgaggggggtgaagtcgtaacaaggtagccgtactggaaagtgcggctggatcacctcctttct

SEQ ID NO: 399 - DNA, 1532 bp, Borrelia turicatae
agagtttgatcctggcttagaactaacgctggcagtgcgtcttaagcatgcaagtcagacggaatgtagcaatacattcagtggcgaacgggtgagtaacgcgtggataatctacctatgagatggggataactattagaaatagtagctaataccgaataaggtcaattgagatgttaattgatgaaaggaagcctttaaagcttcgcttgtagatgagtctgcgtcttattagctagttggtagggtaagagcctaccaaggctatgataagtaaccggcctgagagggtgaacggtcacactggaactgagatacggtccagactcctacgggaggcagcagctaagaatcttccgcaatgggcgaaagcctgacggagcgacactgcgtgaacgaagaaggtcgaaagattgtaaagttcttttataaatgaggaataagctttgtaggaaatgacaaggtgatgacgttaatttatgaataagccccggctaattacgtgccagcagccgcggtaatacgtaaggggcgagcgttgttcgggattattgggcgtaaagggtgagtaggcggatatgtaagtctatgcgtaaaataccacagctcaactgtggaactatgctggaaactgcatgactagagtctgataggggaagttagaattcctggtgtaagggtggaatctgttgatatcaggaagaataccagaggcgaaggcgaacttctaggtcaagactgacgctgagtcacgaaagcgtagggagcgaacaggattagataccctggtagtctacgctgtaaacgatgcacacttggtgttaatcgaaaggttagtaccgaagctaacgtgttaagtgtgccgcctggggagtatgctcgcaagagtgaaactcaaaggaattgacgggggcccgcacaagcggtggagcatgtggtttaattcgatgatacgcgaggaaccttaccagggcttgacatatacaggatgtagttagagataactattccccgtttggggtctgtatacaggtgctgcatggttgtcgtcagctcgtgctgtgaggtgttgggttaagtcccgcaacgagcgcaacccttattgtctgttaccagcatgtaaagatggggactcagacgagactgccggtgataagccggaggaaggtggggatgacgtcaaatcatcatggcccttatgtcctgggctacacacgtgctacaatggcctgtacaaagcgatgcgaaacagtgatgtgaagcaaaacgcataaagcaggtctcagtccagattgaagtctgaaactcgacttcatgaagttggaatcgctagtaatcgtatatcagaatgatacggtgaatacgttctcgggccttgtacacaccgcccgtcacaccacccgagttgaggatacccgaagctattattctaacccgcaagggaggaaggtatctaaggtatgtttagtgaggggggtgaagtcgtaacaaggtagccgtactggaaagtgtggctggatcacctcctttct

SEQ ID NO: 400 - DNA, 1533 bp, Borrelia valaisiana
gaagagtttgatcctggcttagaactaacgctggcagtgcgtcttaagcatgcaagtcaaacgggatgtagtaatacatctagtggcgaacgggtgagtaacgcgtggatgatctacctatgagatggggataactactagaaatagtagctaataccgaataaggtcaattaatttgttaattgatgaaaggaagcctttaaagcttcgcttgtagatgagtctgcgtcttattagttagttggtggggtaaatgcctaccaaggcgatgataagtaaccggcctgagagggtgaacggtcacactggaactgagatacggtccagactcctacgggaggcagcagctaagaatcttccgcaatgggcgaaagcctgacggagcgacactgcgtgaatgaagaaggtcgaaagattgtaaaattcttttataaatgaggaataagctttgtaggaaatgacaaagtgatgacgttaatttatgaataagccccggctaattacgtgccagcagccgcggtaatacgtaaggggcgagcgttgttcgggattattgggcgtaaagggtgagtaggcggacatataagtctatgcataaaataccacagctcaactgtggaactatgttggaaactatatgcctagagtctgatagaggaagttagaattcctggtgtaagggtggaatctgttgatatcaggaagaataccggaggcgaaggcgaacttctgggtcaagactgacgctgagtcacgaaagcgtagggagcaaacaggattagataccctggtagtctacgctgtaaacgatgcacacttggtgttaactgaaagttagtaccgaagctaacgtgttaagtgtgccgcctggggagtatgctcgcaagagtgaaactcaaaggaattgacgggggcccgcacaagcggtggagcatgtggtttaattcgatgatacgcgaggaaccttaccagggcttgacatatataggatatagttagagataattattccccgtttggggtctatatacaggtgctgcatggttgtcgtcagctcgtgctgtgaggtgttgggttaagtcccgcaacgagcgcaacccttgttatctgttaccagcatgtaatgatggggactcagataagactgccggtgataagtcggaggaaggtgaggatgacgtcaaatcatcatggcccttatgtcctgggctacacacgtgctacaatggcctgtacaaagcgaagcgaaacagtgatgtgaagcaaaacgcataaagcaggtctcagtccggattgaagtctgaaactcgacttcatgaagttggaatcgctagtaatcgtatatcagaatgatacggtgaatacgttctcgggccttgtacacaccgcccgtcacaccacccgagttgaggatacccgaagctattattctaacccgtaagggaggaaggtatttaaggtatgtttagtgaggggggtgaagtcgtaacaaggtagccgtactggaaagtgcggctggatcacctcctttct

SEQ ID NO: 401 - DNA, 1512 bp, Brachybacterium alimentarium
  modified_base (11)..(12): a, c, t, g, unknown or other
agagtttgatnntggctcaggacgaacgctggcggcgtgcttaacacatgcaagtcgaacgatgacgaccgagcttgctcggtctgattagtggcgaacgggtgagtaacacgtgagtaacctgccccccacttcgggataacttcgagaaatcgtggctaataccggatatgaacttccgccgcatggtggttgttggaaagtttttcggtgggggatggactcgcggcctatcagtttgttggtgaggtaatggctcaccaagacgatgacgggtagccggcctgagagggcgaccggccacactgggactgagacacggcccagactcctacgggaggcagcagtggggaatattgcacaatgggcgaaagcctgatgcagcgacgccgcgtgagggatgacggcctttgggttgtaaacctctttcagtagggaagaagcgagagtgacggtacctgcagaagaagcgccggctaactacgtgccagcagccgcggtaatacgtagggcgcaagcgttgtccggaattattgggcgtaaagagcttgtaggtggcttgtcgcgtctgccgtgaaaacccgaggctcaacctcgggcgtgcggtgggtacgggcaggctagagtgtggtaggggagactggaactcctggtgtagcggtgaaatgcgcagatatcaggaagaacaccgatggcgaaggcaggtctctgggccattactgacactgagaagcgaaagcatgggtagcgaacaggattagataccctggtagtccatgccgtaaacgttgggcactaggtgtgggggacattccacgttttccgcgccgtagctaacgcattaagtgccccgcctggggagtacggccgcaaggctaaaactcaaaggaattgacgggggcccgcacaagcggcggagcatgctgattaattcgatgcaacgcgaagaaccttaccaaggcttgacatggaccggacggctgcaaaaatgtggctttcttcggactggttcacaggtggtgcatggttgtcgtcagctcgtgtcgtgagatgttgggttaagtcccgcaacgagcgcaaccctcgttctatgttgccagcgcgttatggcggggactcatgggagactgccggggtcaactcggaggaaggtggggacgacgtcaaatcatcatgccccttatgtcttgggcttcaagcatgctacaatggtcggtacaatgggttgcgaaactgtgaggtggagcgaatcctaaaaagccggcctcagttcggattggggtctgcaactcgaccccatgaagtcggagtcgctagtaatcgcagatcagcaacgctgcggtgaatacgttcccgggccttgtacacaccgcccgtcaagtcacgaaagtcggtaacacccgaagccagtggcccatcctcgtgagggagctgtcgaaggtgggatcggtgattgggactaagtcgtaacaaggtagccgtaccggaaggtgcggctggatcacctccttt

SEQ ID NO: 402 - DNA, 1458 bp, Brachybacterium conglomeratum
tggctcaggacgaacgctggcggcgtgcttaacacatgcaagtcgaacgatgacggtggtgcttgcaccgcctgattagtggcgaacgggtgagtaacacgtgagtaacctgccctccacttcgggataacctcgggaaatcgtggctaataccggatatgagcactcatcgcatggtgggtgttggaaagatttatcggtgggggatggactcgcggcctatcagtttgttggtgaggtgatggctcaccaagacgatgacgggtagccggcctgagagggcgaccggccacactgggactgagacacggcccagactcctacgggaggcagcagtggggaatattgcacaatgggcgaaagcctgatgcagcgacgccgcgtgggggatgacggccttcgggttgtaaacccctttcagtagggaagaagcgagagtgacggtacctgcagaagaagcgccggctaactacgtgccagcagccgcggtaatacgtagggcgcaagcgttgtccggaattattgggcgtaaagagcttgtaggtggcttgtcgcgtctgccgtgaaaacccgaggctcaacctcgggcgtgcggtgggtacgggcaggctagagtgtggtaggggagactggaactcctggtgtagcggtgaaatgcgcagatatcaggaagaacaccgatggcgaaggcaggtctctgggccattactgacactgagaagcgaaagcatgggtagcgaacaggattagataccctggtagtccatgccgtaaacgttgggcactaggtgtgggggacattccacgttttccgcgccgtagctaacgcattaagtgccccgcctggggagtacggccgcaaggctaaaactcaaaggaattgacgggggcccgcacaagcggcggagcatgctgattaattcgatgcaacgcgaagaaccttaccaaggcttgacatgcactggacggctgcagagatgtggctttctttggactggtgcacaggtggtgcatggttgtcgtcagctcgtgtcgtgagatgttgggttaagtcccgcaacgagcgcaaccctcgttctatgttgccagcacgtaatggtggggactcataggagactgccggggtcaactcggaggaaggtggggacgacgtcaaatcatcatgccccttatgtcttgggcttcaagcatgctacaatggtcggtacaatgggttgcgaaactgtgaggtggagcgaatcccaaaaagccggcctcagttcggattggggtctgcaactcgaccccatgaagtcggagtcgctagtaatcgcagatcagcaacgctgcggtgaatacgttcccgggccttgtacacaccgcccgtcaagtcacgaaagtcggtaacacccgaagccagtggcccatcctcgtgagggagctgtctaaggtgggatcggtgattgggactaagtcgta

SEQ ID NO: 403 - DNA, 1512 bp, Brachybacterium tyrofermentans
  modified_base (11)..(12): a, c, t, g, unknown or other
agagtttgatnntggctcaggatgaacgctggctgcgtgcttaacacatgcaagtcgaacgatgacgaccgagcttgctcggtctgattagtggcgaacgggtgagtaacacgtgagtaacctgcccctcacttcgggataacctcgagaaattgtggctaataccggatatgaacttccgccgcatggtggttgttggaaagtttttcggtgagggatggactcgcggcctatcagtttgttggtgaggtaatggctcaccaagacgatgacgggtagccggcctgagagggcgaccggccacactgggactgagacacggcccagactcctacgggaggcagcagtggggaatattgcacaatgggcgaaagcctgatgcagcgacgcagcgtgggggatgactgccttcgggttgtaaacctctttcagtagggaagaagcgaaagtgacggtacctgcagaagaagcgccggctaactacgtgccagcagccgcggtaatacgtagggcgcaagcgttatccgtaattattgggcgtaaagagcttgtaggtggcttgtcgcgtctgccgtgaaaacccgaggctcaacctcgggcgtgcggtgggtacgggcaggctagagtgtggtaggggagactggaactcctggtgtagcggtgaaatgcgcagatatcaggaagaacaccgatggcgaaggcaggtctctgggccattactgacactgagaagcgaaagcatgggtagcgaacaggattagataccctggtagtccatgccgtaaacgttgggcactagatgtgggggacattccacgttttccgcgtcgtagctaacgcattaagtgccccgcctggggagtacggccgcaaggctaaaactcaaaggaattgacgggggcccgcacaagcggcggagcatgctgattaattcgatgcaacgcgaagaaccttaccaaggcttgacatggaccggacggctgcagaaatgtggctttcttcggactggttcacaggtggtgcatggttgtcgtcagctcgtgtcgtgagatgttgggttaagtcccgcaacgagcgcaaccctcgttctatgttgccagcgcgttatggcggggactcataggagactgccggggtcaactcggaggaaggtggggacgacgtcaaatcatcatgccccttatgtcttgggcttcaagcatgctacaatggtcggtacaatgggttgcgaaactgtgaggtggagcgaatcccaaaaagccggcctcagttcggattggggtctgcaactcgaccccatgaagtcggagtcgctagtaatcgcagatcagcaacgctgcggtgaatacgttcccgggccttgtacacaccgcccgtcaagtcacgaaagtcggtaacacccgaagccagtggcccatcctcgtgagggagctgtctaaggtgggattggtgattgggactaagtcgtaacaaggtagccgtaccggaaggtgcggctggatcacctccttt

SEQ ID NO: 404 - DNA, 1270 bp, Brachyspira aalborgi
agcgaacgttggcgatgcgtcttaagcatgcaagtcgagcgagcggcgaactggtgagtaacacgtaggtaatctgccgtagagtgggggataacccatggaaacatggactaataccgcatatagaaagccgctttacgatgagcctgcggcctattagcctgttggtgagataaaagcccaccaaagctacgataggtagccgacctgagagggtgaccggccacattgggactgagatacggcccagactcctacgggaggcagcagctgagaatcttccacaatggacgaaagtctgatggagcgacatcgcgtgagggatgaaggccttcgggttgtaaaccttggaaattatcgaagatgacagtagataatgtaagcctcggctaactacgtgccagcagccgcggtaatacgtaggaggcaaacgttgctcggatttactgggcgtaaagggtgagtaggcggaactataagtctaaggtgaaatatcgaagctcaacttcggagacgcctcggatactgtggttcttggatattgtaggggatgatggaattctcggtgtagcggtggaatgtatagatatcgagaagaacacctatagcgaaggcagtcatctgggcatatcgacgctgaatcacgaaagctgggggagcaaacaggcttagataccctggtagtcccagccgtaaacgttgcacactaggtgctcctaggcgtgccgtagctaacgtcttaagtgtgccgcctgaggagtatgcccgcaagggtgaaactcaaagaaattgacgggtccccgcacaagtggtggagcatgtggtttaattcgatgatacgcgaaaaaccttacctgggtttgaattgcataggtgctgcatggctgtcgtcagctcgtgtcgtgagatgttgggttaagtcccgcaacgagcgcaacccttaccctttgttgctaccgatcgggcactcttaggggaccgcctacgttaagtaggaggaaggtggggatgatgtcaagtcctcatggcccttatgtccagggctacacacgtgctacaatggcaaccaaagagaagcgagaccgcgaggtggagcaaatctcaagttgcctcagttcggatggagtctgaaactcgactccagaagttggaatcactagtaatcgtagatcagaacgctacggtgaatacgttcccggggattgtacacaccgcccgtcacgccatcggagttggttttacctgaagtcgttgcctagggcggcgccga

SEQ ID NO: 405 - DNA, 1506 bp, Brachyspira pilosicoli
agagtttgattctggctcagagcgaacgttggcgatgcgtcttaagcatgcaagtcgagcgggcttattcgggcaactggataagttagcggcgaactggtgagtaacacgtaggtaatctgccgtgaagcgggggataacccatggaaacatggactaataccgcatatactcttgctacataagtagagtagaggaaagttttttcgcttcacgatgagcctgcggcctattagcctgttggtagggtaatggcctaccaaagctacgataggtagccgacctgagagggtgaccggccacattgggactgagatacggcccagactcctacgggaggcagcagctgagaatcttccacaatggacgaaagtctgatggagcgacatcgcgtgagggatgaaggccttcgggttgtaaacctcggaaattatcgaagaatgagtgacagtagataatgtaagcctcggctaactacgtgccagcagccgcggtaatacgtaggaggcaaacgttgctcggatttactgggcgtaaagggtgagtaggcggatttataagtctaaggtgaaagaccgaagctcaacttcgggaacgcctcggatactgtaagtcttggatattgtaggggatgatggaattctcggtgtagcggtggaatgcgcagatatcgagaggaacacctatagcgaaggcagtcatctgggcatttatcgacgctgaatcacgaaagctaggggagcaaacaggcttagataccctggtagtcctagccgtaaacgttgtacactaggtgcttctatttaaataggagtgccgtagctaacgtcttaagtgtaccgcctgaggagtatgcccgcaagggtgaaactcaaagaaattgacgggtccccgcacaagtggtggagcatgtggtttaattcgatgatacgcgaaaaaccttacctgggtttgaattgttagatgaatgatttagagataagtcagaccgcaaggacgtttaacataggtgctgcatggctgtcgtcagctcgtgtcgtgagatgttgggttaagtcccgcaacgagcgcaaccctcaccctctgttgctaccgagtaatgtcgagcactcttaggggactgcctacgttcaagtaggaggaaggtggggatgatgtcaagtcctcatggcccttatgtccagggctacacacgtgctacaatggcaagtacaaagagaagcaagaccgcgaggtggagcaaaactcaaaaaagttgcctcagttcggattggagtctgaaactcgactccatgaagttggaatcactagtaatcgtagatcagaacgctacggtgaatacgttcccggggattgtacacaccgcccgtcacgccatcggagttggttttacctgaagccgttagcctaaccgcaaggagggcggcgtcgaaggtgggactgatgatgagggtgaagtcgtaacaaggcagccgtaccggaaggtgtggctggatcacctccttt

SEQ ID NO: 406 - DNA, 1272 bp, Brachyspira sp.
  HIS3
agcgaacgttggcgatgcgtcttaagcatgcaagtcgagcgagcggcgaactggtgagtaacacgtaggtaatctgccgtgaagtgggggataacccatggaaacatggactaataccgcatatagaaagtcgcttcacgatgagcctgcggcctattagcctgttggtagggtaatggcctaccaaagctacgataggtagccgacctgagagggtgaccggccacattgggactgagatacggcccagactcmtacgggaggcagcagctgagaatcttccacaatggacgaaagtctgatggagcgacatcgcgtgagggatgaaggccttcgggttgtaaacctcggaaattatcgaagatgacagtagataatgtaagcctcggctaactacgtgccagcagccgcggtaatacgtaggaggcaaacgttgctcggatttactgggcgtaaagggtgagtaggcggatttataagtctaaggtgaaagaccgaagctcaacttcgggaacgcctcggatactgtagatcttggatattgtaggggatgatggaattctcggtgtagcggtggaatgcgcagatatcgagaggaacacctatagcgaaggcagtcatctgggcatatcgacgctgaatcacgaaagctaggggagcaaacaggcttagataccctggtagtcctagccgtaaacgttgtacactaggtgcttctataggagtgccgtagctaacgtcttaagtgtaccgcctgaggagtatgcccgcaagggtgaaactcaaagaaattgacgggtccccgcacaagtggtggagcatgtggtttaattcgatgatacgcgaaaaaccttacctgggtttgaattgcataggtgctgcatgcctgtcgtcagctcgtgtcgtgagatgttgggttaagtcccgcaacgagcgcaaccctcaccctctgttgctaccgatcgagtactcttaggggactgcctacgtcaagtaggaggaaggtggggatgatgtcaagtcctcatggcccttatgtccagggctacacacgtgctacaatggcaagcaaagagaagcaagaccgcgaggtggagcaaaactcaagttgcctcagttcggatggagtctgaaactcgactccagaagttggaatcactagtaatcgtagatcagaacgctacggtgaatacgttcccggggattgtacacaccgcccgtcacgccatcggagttggttttacctgaagccgttgcctagggcggcgtcga

SEQ ID NO: 407 - DNA, 1325 bp, Brachyspira sp.
  HIS4
agcgaacgttggcgatgcgtcttaagcatgcaagtcgagcgagcggcgaactggtgagtaacacgtaggtaatctgccgtgaagtgggggataacccatggaaacatggactaataccgtatatagaaagtcgcttcacgatgagcctgcggcctattagcctgttggtagggtaatggcctaccaaagctacgataggtagccgacctgagagggtgaccggccacattgggactgagatacggcccagactcctacgggaggcagcagctgagaatcttccacaatggacgaaagtctgatggagcgacatcgcgtgagggatgaaggccttcgggttgtaaacctcggaaattatcgaagatgacagtagataatgtaagcctcggctaactacgtgccagcagccgcggtaatacgtaggaggcaaacgttgctcggatttactgggcgtaaagggtgagtaggcggatttataagtctaaggtgaaagaccgaagctcaacttcgggaacgcctcggatactgtagatcttggatattgcaggggatgatggaattctcggtgtagcggtggaatgcgcagatatcgagaggaacacctatagcgaaggcagtcatctgggcatatcgacgctgaatcacgaaagctaggggagcaaacaggcttagataccctggtagtcctagccgtaaacgttgtacactaggtgcttctataggagtgccgtagctaacgtcttaagtgtaccgcctgaggagtatgcccgcaagggtgaaactcaaagaaattgacgggtccccgcacaagtggtggagcatgtggtttaattcgatgatacgcgaaaaaccttacctgggtttgaattgcataggtgctgcatgcctgtcgtcagctcgtgtcgtgagatgttgggttaagtcccgcaacgagcgcaaccctcaccctctgttgctaccgatcgagtactcttaggggactgcctacgtcaagtaggaggaaggtggggatgatgtcaagtcctcatggcccttatgtccagggctacacacgtgctacaatggcaagcaaagagaagcaagaccgcgaggtggagcaaaactcaagttgcctcagttcggatggagtctgaaactcgactccagaagttggaatcactagtaatcgtagatcagaacgctacggtgaatacgttcccggggattgtacacaccgcccgtcacgccatcggagttggttttacctgaagccgttgcctagggcggcgtcgaaggtgggactgatgatgagggtgaagtcgtaacaaggcagccgtaccggaagg

SEQ ID NO: 408 - DNA, 1278 bp, Brachyspira sp.
  HIS5
gaacgttggcgatgcgtcttaagcatgcaagtcgagcgagcggcgaactggtgagtaacacgtaggtaatctgccgtgaagtgggggataacccatggaaacatggactaataccgcatatagaaagtcgcttcacgatgagcctgcggcctattagcctgttggtagggtaatggcctaccaaagctacgataggtagccgacctgagagggtgaccggccacattgggactgagatacggcccagactcctacgggaggcagcagctgagaatcttccacaatggacgaaagtctgatggagcgacatcgcgtgagggatgaaggccttcgggttgtaaacctcggaaattatcgaagatgacagtagataatgtaagcctcggctaactacgtgccagcagccgcggtaatacgtaggaggcaaacgttgctcggatttactgggcgtaaagggtgagtaggcggatttataagtctaaggtgaaagaccgaagctcaacttcgggaacgcctcggatactgtagatcttggatattgtaggggatgatggaattctcggtgtagcggtggaatgcgcagatatcgagaggaacacctatagcgaaggcagtcatctgggcatatcgacgctgaatcacgaaagctaggggagcaaacaggcttagataccctggtagtcctagccgtaaacgttgtacactaggtgcttctataggagtgccgtagctaacgtcttaagtgtaccgcctgaggagtatgcccgcaagggtgaaactcaaagaaattgacgggtccccgcacaagtggtggagcatgtggtttaattcgatgatacgcgaaaaaccttacctgggtttgaattgcataggtgctgcatgcctgtcgtcagctcgtgtcgtgagatgttgggttaagtcccgcaacgagcgcaaccctcaccctctgttgctaccgatcgagtactcttaggggactgcctacgtcaagtaggaggaaggtggggatgatgtcaagtcctcatggcccttatgtccagggctacacacgtgctacaatggcaagcaaagagaagcaagaccgcgaggtggagcaaaactcaagttgcctcagttcggatggagtctgaaactcgactccagaagttggaatcactagtaatcgtagatcagaacgctacggtgaatacgttcccggggattgtacacaccgcccgtcacgccatcggagttggttttacctgaagccgttgcctagggcggcgtcgaaggtgggac

SEQ ID NO: 409 - DNA, 1029 bp, Brevibacillus agri
  modified_base (9)..(9): a, c, t, g, unknown or other
  modified_base (11)..(11): a, c, t, g, unknown or other
  modified_base (22)..(22): a, c, t, g, unknown or other
  modified_base (58)..(60): a, c, t, g, unknown or other
  modified_base (70)..(70): a, c, t, g, unknown or other
aaagttctntntcagagacgancaagtaccgttcgaacagggcggtaccttgacggtnnngacgagaaanccacggctaactacgtgccagcagccgcggtaatacgtaggtggcaagcgttgtccggaattattgggcgtaaagcgcgcgcaggcggctatgtaagtctggtgttaaagcccggggctcaaccccggttcgcatcggaaactgtgtagcttgagtgcagaagaggaaagcggtattccacgtgtagcggtgaaatgcgtagagatgtggaggaacaccagtggcgaaggcggctttctggtctgtaactgacgctgaggcgcgaaagcgtggggagcaaacaggattagataccctggtagtccacgccgtaaacgatgagtgctaggtgttgggggtttcaataccctcagtgccgcagctaacgcaataagcactccgcctggggagtacgctcgcaagagtgaaactcaaaggaattgacgggggcccgcacaagcggtggagcatgtggtttaattcgaagcaacgcgaagaaccttaccaggtcttgacatcccgctgaccgtcctagagatagggcttcccttcggggcagcggtgacaggtggtgcatggttgtcgtcagctcgtgtcgtgagatgttgggttaagtcccgcaacgagcgcaacccttatctttagttgccagcattcagttgggcactctagagagactgccgtcgacaagacggaggaaggcggggatgacgtcaaatcatcatgccccttatgacctgggctacacacgtgctacaatggctggtacaacgggaagctagctcgcgagagtatgccaatctcttaaaaccagtctcagttcggattgcaggctgcaactcgcctgcatgaagtcggaatcgctagtaatcgcggatcagcatgccgcggtgaatacgttcccgggccttgtacacaccgcccgtcacaccacgggagtttgcaacacccgaagtcggtgaggtaaccgcaaggagcca

SEQ ID NO: 410 - DNA, 1461 bp, Brevibacillus brevis
  modified_base (44)..(45): a, c, t, g, unknown or other
  modified_base (54)..(55): a, c, t, g, unknown or other
gacgaacgctggcggcgtgcctaatacatgcaagtcgagcgagnntcttcggannctagcggcggacgggtgagtaacacgtaggcaacctgcctctcagactgggataacatagggaaacttatgctaataccggataggtttttggatcgcatgatccgaaaagaaaaggcggcttcggctgtcactgggagatgggcctgcggcgcattagctagttggtggggtaacggcctaccaaggcgacgatgcgtagccgacctgagagggtgaccggccacactgggactgagacacggcccagactcctacgggaggcagcagtagggaattttccacaatggacgaaagtctgatggagcaacgccgcgtgaacgatgaaggtcttcggattgtaaagttctgttgttagggacgaataagtaccgttcgaatagggcggtaccttgacggtacctgacgagaaagccacggctaactacgtgccagcagccgcggtaatacgtaggtggcaagcgttgtccggatttattgggcgtaaagcgcgcgcaggcggctatgtaagtctggtgttaaagcccggggctcaaccccggttcgcatcggaaactgtgtagcttgagtgcagaagaggaaagcggtattccacgtgtagcggtgaaatgcgtagagatgtggaggaacaccagtggcgaaggcggctttctggtctgtaactgacgctgaggcgcgaaagcgtggggagcaaacaggattagataccctggtagtccacgccgtaaacgatgagtgctaggtgttgggggtttcaataccctcagtgccgcagctaacgcaataagcactccgcctggggagtacgctcgcaagagtgaaactcaaaggaattgacgggggcccgcacaagcggtggagcatgtggtttaattcgaagcaacgcgaagaaccttaccaggtcttgacatcccgctgaccgctctggagacagagcttcccttcggggcagcggtgacaggtggtgcatggttgtcgtcagctcgtgtcgtgagatgttgggttaagtcccgcaacgagcgcaacccttatctttagttgccagcattcagttgggcactctagagagactgccgtcgacaagacggaggaaggcggggatgacgtcaaatcatcatgccccttatgacctgggctacacacgtgctacaatggttggtacaacgggatgctacctcgcgagaggacgccaatctcttaaaaccaatctcagttcggattgtaggctgcaactcgcctacatgaagtcggaatcgctagtaatcgcggatcagcatgccgcggtgaatacgttcccgggccttgtacacaccgcccgtcacaccacgggagtttgcaacacccgaagtcggtgaggtaaccgcaaggagccagccgccgaaggtggggtagatgactggggtgaag

SEQ ID NO: 411 - DNA, 1419 bp, Brevibacillus centrosporus
  modified_base (23)..(23): a, c, t, g, unknown or other
  modified_base (27)..(27): a, c, t, g, unknown or other
  modified_base (156)..(156): a, c, t, g, unknown or other
  modified_base (162)..(162): a, c, t, g, unknown or other
  modified_base (180)..(181): a, c, t, g, unknown or other
  modified_base (198)..(198): a, c, t, g, unknown or other
  modified_base (200)..(200): a, c, t, g, unknown or other
  modified_base (212)..(212): a, c, t, g, unknown or other
  modified_base (321)..(321): a, c, t, g, unknown or other
  modified_base (411)..(411): a, c, t, g, unknown or other
  modified_base (450)..(450): a, c, t, g, unknown or other
  modified_base (478)..(478): a, c, t, g, unknown or other
  modified_base (644)..(644): a, c, t, g, unknown or other
  modified_base (717)..(717): a, c, t, g, unknown or other
  modified_base (870)..(870): a, c, t, g, unknown or other
  modified_base (1403)..(1403): a, c, t, g, unknown or other
gagagtttgatcctggctcaggncgancgctggcggcgtgcctaatacatgcaagtcgagcgagtctcttcggaggctagcggcggacgggtgagtaacacgtaggcaacctgcctctcagactgggataacatagggaaacttatgctaataccngatagngtcttgtctcgcatgagnnaagacggaaaggtagcncnggctatcacttncggatgggcctgcggcgcattagctagttggtggggtaatggcctaccaaggcgacgatgcgtagccgacctgagagggtgaccggccacactgggactgagacacggnccagactcctacgggaggcagcagtagggaattttccacaatggacgaaagtctgatggagcaacgccgcgtgaacgatgaaggtcttcngattgtaaagttctgttgttagggacgaacaagtaccgntcgaatagggcggtaccttgacggtacntgacgagaaagccacggctaactacgtgccagcagccgcggtaatacgtaggtggcaagcgttgtccggatttattgggcgtaaagcgcgcgcaggcggctatgtaagtctggtgttaaagcccggagctcaactccggttcgcatcggaaactgtgtagcttgantgcagaagaggaaagcggtattccacgtgtagcggtgaaatgcgtagagatgtggaggaacaacagtggcganggcggctttctggtctgtaactgacgctgaggcgcgaaagcgtggggagcaaacaggattagataccctggtagtccacgccgcaaacgatgagtgctaggtgttgggggtttcaataccctcagtgccgcagctaacgcaataagcactccncctggggagtacgctcgcaagagtgaaactcaaaggaattgacgggggcccgcacaagcggtggagcatgtggtttaattcgaagcaacgcgaagaaccttaccaggtcttgacatcccgctgaccgctctggagacagagcttcccttcggggcagcggtgacaggtggtgcatggttgtcgtcagctcgtgtcgtgagatgttgggttaagtcccgcaacgagcgcaacccttatttctagttgccagcattcagttgggcactctagagagactgccgtcgacaagacggaggaaggcggggatgacgtcaaatcatcatgccccttatgacctgggctacacacgtgctacaatggttggtacaacgggatgctacctcgcgagaggacgccaatctcttaaaaccaatctcagttcggattgtaggctgcaactcgcctacatgaagtcggaatcgctagtaatcgcggatcagcatgccgcggtgaatacgttcccgggccttgtacacaccgcccgtcacaccacnggagtttgcaacaccc

SEQ ID NO: 412 - DNA, 1486 bp, Brevibacillus choshinensis
  modified_base (44)..(44): a, c, t, g, unknown or other
  modified_base (51)..(51): a, c, t, g, unknown or other
cgaacgctggcggcgtgcctaatacatgcaagtcgagcgagtcncttcggnggctagcggcggacgggtgagtaacacgtaggcaacctgcctctcagactgggataacatagggaaacttatgctaataccggataggtttttggatcgcatgatccgaaaagaaaaggcggcttcggctgtcactgggagatgggcctgcggcgcattagctagttggtggggtaacggcctaccaaggcgacgatgcgtagccgacctgagagggtgaccggccacactgggactgagacacggcccagactcctacgggaggcagcagtagggaattttccacaatggacgaaagtctgatggagcaacgccgcgtgaacgatgaaggtcttcggattgtaaagttctgttgttagggacgaacaagtaccgttcgaatagggcggtaccttgacggtacctgacgagaaagccacggctaactacgtgccagcagccgcggtaatacgtaggtggcaagcgttgtccggatttattgggcgtaaagcgcgcgcaggcggctatgtaagtctggtgttaaagcccggagctcaactccggttcgcatcggaaactgtgtagcttgagtgcagaagaggaaagcggtattccacgtgtagcggtgaaatgcgtagagatgtggaggaacaccagtggcgaaggcggctttctggtctgtaactgacgctgaggcgcgaaagcgtggggagcaaacaggattagataccctggtagtccacgccgtaaacgatgagtgctaggtgttgggggtttcaataccctcagtgccgcagctaacgcaataagcactccgcctggggagtacgctcgcaagagtgaaactcaaaggaattgacgggggcccgcacaagcggtggagcatgtggtttaattcgaagcaacgcgaagaaccttaccaggtcttgacatcccgctgaccgctctggagacagagcttcccttcggggcagcggtgacaggtggtgcatggttgtcgtcagctcgtgtcgtgagatgttgggttaagtcccgcaacgagcgcaacccttatttctagttgccagcattcagttgggcactctagagagactgccgtcgacaagacggaggaaggcggggatgacgtcaaatcatcatgccccttatgacctgggctacacacgtgctacaatggttggtacaacgggatgctacctcgcgaggggacgccaatctcttaaaaccaatctcagttcggattgtaggctgcaactcgcctacatgaagtcggaatcgctagtaatcgcggatcagcatgccgcggtgaatacgttcccgggccttgtacacaccgcccgtcacaccacgggagtttgcaacacccgaagtcggtgaggtaaccgcaaggagccagccgccgaaggtggggtagatgactggggtgaagtcgtaacaaggtatccgtaccggaagg

SEQ ID NO: 413 - DNA, 1391 bp, Brevibacillus invocatus
tcgagcgagtcccttcgggggctagcggcggacgggtgagtaacacgtaggcaacctgcccgtaagctcgggataacatggggaaactcatgctaataccggatagggtcttctctcgcatgagaggagacggaaaggtggcgcaagctaccacttacggatgggcctgcggcgcattagctagttggtggggtaacggcctaccaaggcgacgatgcgtagccgacctgagagggtgaccggccacactgggactgagacacggcccagactcctacgggaggcagcagtagggaattttccacaatggacgaaagtctgatggagcaacgccgcgtgaacgatgaaggtcttcggattgtaaagttctgttgtcagagacaacaagtaccgttcgaacagggcggtaccttgcggtacctgacgagaaagccacggctaactacgtgccagcagccgcggtaatacgtaggtggcaagcgttgtccggaattattgggcgtaaagcgcgcgcaggcggctatgtaagtctggtgttaaagcccggggctcaaccccggttcgcatcggaaactgtgtagcttgagtgcagaagaggaaagcggtattccacgtgtagcggtgaaatgcgtagagatgtggaggaacaccagtggcgaaggcggctttctggtctgtaactgacgctgaggcgcgaaagcgtggggagcaaacaggattagataccctggtagtccacgccgtaaacgatgagtgctaggtgttgggggtttcaataccctcagtgccgcagctaacgcaataagcactccgcctggggagtacgctcgcaagagtgaaactcaaaggaattgacgggggcccgcacaagcggtggagcatgtggtttaattcgaagcaacgcgaagaaccttaccaggtcttgacatcccgctgaccgtcctacatatagggcttcccttcggggcagcggtgacaggtggtgcatggttgtcgtcagctcgtgtcgtgagatgttgggttaagtcccgcaacgagcgcaacccttatctttagttgccagcattcagttgggcactctagagagactgccgtcgacaagacggaggaaggcggggatgacgtcaaatcatcatgccccttatgacctgggctacacacgtgctacaatggctggtacaacgggaagctagctcgcgagagtatgccaatctcttaaaaccagtctcagttcggattgcaggctgcaactcgcctgcatgaagtcggaatcgctagtaatcgcggatcagcatgccgcggtgaatacgttcccgggccttgtacacaccgcccgtcacaccacgggagtttgcaacacccgaagtcggtgaggtaaccgcaaggagcca

SEQ ID NO: 414 - DNA, 1470 bp, Brevibacillus laterosporus
  modified_base (231)..(231): a, c, t, g, unknown or other
gacgaacgctggcggcgtgcctaatacatgcaagtcgagcgagggtcttcggaccctagcggcggacgggtgagtaacacgtaggcaacctgcctgtaagactgggataacatagggaaacttatgctaataccggatagggttttgcttcgcctgaagcgaaacggaaagatggcgcaagctatcacttacagatgggcctgcggcgcattagctagttggtgaggtaanggctcaccaaggcgacgatgcgtagccgacctgagagggtgaccggccacactgggactgagacacggcccagactcctacgggaggcagcagtagggaattttccacaatggacgaaagtctgatggagcaacgccgcgtgaacgatgaaggctttcgggtcgtaaagttctgttgttagggaagaaacagtgctatttaaataaggtagcaccttgacggtacctaaccagaaagccacggctaactacgtgccagcagccgcggtaatacgtaggtggcaagcgttgtccggaattattgggcgtaaagcgcgcgcaggtggctatgtaagtctgatgttaaagcccgaggctcaacctcggttcgcattggaaactgtgtagcttgagtgcaggagaggaaagtggtattccacgtgtagcggtgaaatgcgtagagatgtggaggaacaccagtggcgaaggcgactttctggcctgtaactgacactgaggcgcgaaagcgtggggagcaaacaggattagataccctggtagtccacgccgtaaacgatgagtgctaggtgttaggggtttcaatacccttagtgccgcagctaacgcaataagcactccgcctggggagtacgctcgcaagagtgaaactcaaaggaattgacgggggcccgcacaagcggtggagcatgtggtttaattcgaagcaacgcgaagaaccttaccaggtcttgacatcccactgaccgctctagagatagagcttcccttcggggcagtggtgacaggtggtgcatggttgtcgtcagctcgtgtcgtgagatgttgggttaagtcccgcaacgagcgcaacccttatctttagttgccagcattcagttgggcactctagagagactgccgtcgacaagacggaggaaggcggggatgacgtcaaatcatcatgccccttatgacctgggctacacacgtgctacaatggttggtacaacgggatgctacttcgcgagaagatgctaatctcttaaaaccaatctcagttcggattgtaggctgcaactcgcctacatgaagtcggaatcgctagtaatcgcggatcagcatgccgcggtgaatacgttcccgggccttgtacacaccgcccgtcacaccacgggagtttgcaacacccgaagtcggtgaggtaaccgtaaggagccagccgccgaaggtggggtagataactggggtgaagtcgtaacaa

SEQ ID NO: 415 - DNA, 1486 bp, Brevibacillus parabrevis
cgaacgctggcggcgtgcctaatacatgcaagtcgagcgagggttttcggaccctagcggcggacgggtgagtaacacgtaggcaacctgcctctcagaccgggataacatagggaaacttatgctaataccggataggtttttggattgcatgatccgaaaagaaaagatggcttcggctatcactgggagatgggcctgcggcgcattagctagttggtggggtaacggcctaccaaggcgacgatgcgtagccgacctgagagggtgaccggccacactgggactgagacacggcccagactcctacgggaggcagcagtagggaattttccacaatggacgaaagtctgatggagcaacgccgcgtgaacgatgaaggtcttcggattgtaaagttctgttgtcagggacgaacacgtgccgttcgaatagggcggtaccttgacggtacctgacgagaaagccacggctaactacgtgccagcagccgcggtaatacgtaggtggcaagcgttgtccggatttattgggcgtaaagcgcgcgcaggcggctatgtaagtctggtgttaaagcccggagctcaactccggttcgcatcggaaactgtgtagcttgagtgcagaagaggaaagcggtattccacgtgtagcggtgaaatgcgtagagatgtggaggaacaccagtggcgaaggcggctttctggtctgtaactgacgctgaggcgcgaaagcgtggggagcaaacaggattagataccctggtagtccacgccgtaaacgatgagtgctaggtgttgggggtttcaataccctcagtgccgcagctaacgcaataagcactccgcctggggagtacgctcgcaagagtgaaactcaaaggaattgacgggggcccgcacaagcggtggagcatgtggtttaattcgaagcaacgcgaagaaccttaccaggtcttgacatcccgctgaccgctctggagacagagcttcccttcggggcagcggtgacaggtggtgcatggttgtcgtcagctcgtgtcgtgagatgttgggttaagtcccgcaacgagcgcaacccttatctttagttgccagcattcagttgggcactctagagagactgccgtcgacaagacggaggaaggcggggatgacgtcaaatcatcatgccccttatgacctgggctacacacgtgctacaatggttggtacaacgggatgctacctcgcgagaggacgccaatctctgaaaaccaatctcagttcggattgtaggctgcaactcgcctacatgaagtcggaatcgctagtaatcgcggatcagcatgccgcggtgaatacgttcccgggccttgtacacaccgcccgtcacaccacgggagtttgcaacacccgaagtcggtgaggtaaccgcaaggagccagccgccgaaggtggggtagatgactggggtgaagtcgtaacaaggtatccgtaccggaagg

SEQ ID NO: 416 - DNA, 1486 bp, Brevibacillus reuszeri
  modified_base (994)..(994): a, c, t, g, unknown or other
cgaacgctggcggcgtgcctaatacatgcaagtcgagcgagtctcttcggaggctagcggcggacgggtgagtaacacgtaggcaacctgcctctcagactgggataacatagggaaacttatgctaataccggataggtttttggaccgcatggtccgaaaagaaaagatggcttcggctatcactgggagatgggcctgcggcgcattagctagttggtggggtaacggcctaccaaggcgacgatgcgtagccgacctgagagggtgaccggccacactgggactgagacacggcccagactcctacgggaggcagcagtagggaattttccacaatggacgaaagtctgatggagcaacgccgcgtgaacgatgaaggtcttcggattgtaaagttctgttgttagggacgaataagtaccgttcgaatagggcggtaccttgacggtacctgacgagaaagccacggctaactacgtgccagcagccgcggtaatacgtaggtggcaagcgttgtccggatttattgggcgtaaagcgcgcgcaggcggctatgtaagtctggtgttaaagcccggagctcaactccggttcgcatcggaaactgtgtagcttgagtgcagaagaggaaagcggtattccacgtgtagcggtgaaatgcgtagagatgtggaggaacaccagtggcgaaggcggctttctggtctgtaactgacgctgaggcgcgaaagcgtggggagcaaacaggattagataccctggtagtccacgccgtaaacgatgagtgctaggtgttgggggtttcaataccctcagtgccgcagctaacgcaataagcactccgcctggggagtacgctcgcaagagtgaaactcaaaggaattgacgggggcccgcacaagcggtggagcatgtggtttaattcgaagcaacgcgaagaaccttaccaggtcttgacatcccgctgaccgctctggagacagagcttccnttcggggcagcggtgacaggtggtgcatggttgtcgtcagctcgtgtcgtgagatgttgggttaagtcccgcaacgagcgcaacccttatctttagttgccagcattcagttgggcactctagagagactgccgtcgacaagacggaggaaggcggggatgacgtcaaatcatcatgccccttatgacctgggctacacacgtgctacaatggttggtacaacgggacgctagcccgcgagggtatgccaatctcttaaaaccaatctcagttcggattgtaggctgcaactcgcctacatgaagtcggaatcgctagtaatcgcggatcagcatgccgcggtgaatacgttcccgggccttgtacacaccgcccgtcacaccacgggagtttgcaacacccgaagtcggtgaggtaaccgcaaggagccagccgccgaaggtggggtagatgactggggtgaagtcgtaacaaggtatccgtaccggaagg

SEQ ID NO: 417 - DNA, 1477 bp, Brevibacillus sp.
  phR
gatcctggctcaggacgaacgctggcggcgtgcctaatacatgcaagtcgagcgaaggacttcggtccttagcggcggacgggtgagtaacacgtaggcaacctgcccgtcagacygggataacatagggaaacttatgctaataccagataggtttctsgactgcatggtaggaraaggaaagayggcgcaagctgtcacttggggatgggcctgcggcgcattagctggttggcggggtaacggcccaccaaggcgacgatgcgtagccgacctgagagggtgaccggccacactgggactgagacacggcccagactcctacgggaggcagcagtagggaattttccacaatggacgaaagtctgatggagcaacgccgcgtgaacgatgaaggccttcgggttgtaaagttctgttgtcagggacgaacaagtacctgttcgaacagggcggtaccttgacggtacctgacgagaaagccacggctaactacgtgccagcagccgcggtaatacgtaggtggcaagcgttgtccggaattattgggcgtaaagcgcgcgcaggcggctatgtaagtctgatgttaaagcccggggctcaactccggttcgcattggaaactgcgtagcttgagtgcagaagaggaaagcggtattccacgtgtagcggtgaaatgcgtagagatgtggaggaacaccagtggcgaaggcggctttctggtctgtaactgacgctgaggcgcgaaagcgtggggagcaaacaggattagataccctggtagtccacgccgtaaacgatgagtgctaggtgttgggggtttcgataccctcagtgccgcagctaacgcaataagcactccgcctggggagtacgctcgcaagagtgaaactcaaaggaattgacgggggcccgcacaagcggtggagcatgtggtttaattcgaagcaacgcgaagaaccttaccaggtcttgacatcccgctgaccgtcctggagacagggcttcccttcggggcagcggtgacaggtggtgcatggttgtcgtcagctcgtgtcgtgagatgttgggttaagtcccgcaacgagcgcaacccttatctttagttgccagcattcggttgggcactctagagagactgccgtcgacaagacggaggaaggcggggatgacgtcaaatcatcatgccccttatgacctgggctacacacgtgctacaatggctggtacaacgggacgcgagcccgcgagggttagccaatctctgaaaaccagtctcagttcggattgcaggctgcaactcgcctgcatgaagtcggaatcgctagtaatcgcggatcagcatgccgcggtgaatacgttcccgggccttgtacacaccgcccgtcacaccacgagagtttgcaacacccgaagtcggtgaggtaaccgcaaggagccagccgccgaaggtggggtagatgattggggtgaagtc

SEQ ID NO: 418 - DNA, 1385 bp, Brevibacillus thermoruber
  modified_base (1374)..(1374): a, c, t, g, unknown or other
tttgaagcttgcttcagacaggttagcggcggacgggtgagtaacacgtaggcaacctgcccgcaagaccgggataacgtagggaaacttacgctaataccggatagggcaccttctcgcatgagagggtgcggaaaggtggcgcaagctaccacttgcggatgggcctgcggcgcattagctagttggtggggtaacggcctaccaaggcgacgatgcgtagccgacctgagagggtgaccggccacactgggactgagacacggcccagactcctacgggaggcagcagtagggaattttccacaatgggcgaaagcctgatggagcaacgccgcgtgaacgatgaaggtcttcggattgtaaagttctgttgtcagggacgaacaagtaccgttcgaacagggcggtaccttgacggtacctgacgagaaagccccggctaactacgtgccagcagccgcggtaatacgtagggggcaagcgttgtccggaattattgggcgtaaagcgcgcgcaggcggtcgggtaagtctgatgtcaaagcccggggctcaaccccggtacgcattggaaactgctcgacttgagtgcagaagaggaaagcggaattccacgtgtagcggtgaaatgcgtagagatgtggaggaacaccagtggcgaaggcggctttctggtctgtaactgcgctgaggcgcgaaagcgtggggagcaaacaggattagataccctggtagtccacgccgtaaacgatgagtgtaggtgttgggggtttcaatcctcagtgccgcagtaacgcaataagcactccgcctggggagtacgctcgcaagagtgaaactcaaaggaattgacgggggcccgcacaagcggtggagcatgtggtttaattcgaagcaacgcgaagaaccttaccggtcttgacatcccgctgaccgcctagagatagggcttcccttcggggcagcggtgacaggtggtgcatggttgtcgtcagctcgtgtcgtgagatgttgggttaagtcccgcaacgagcgcaacccttatctttagttgccagcattcagttgggcactctagagagactgccgtcgacaagacggaggaaggcggggatgacgtcaaatcatcatgccccttatgacctgggctacacacgtgttacaatggttggtacaacgggacgcaagcccgcgagggtaagccaatctcttaaaaccagtctcagttcggattgcaggctgcaactcgcctgcatgaagtcggaatcgctagtaatcgcggatcagcatgccgcggtgaatacgttcccgggccttgtacacaccgcccgtcacaccacgagagtttgcaacacccgaagtcggtgaggtanccgcaaggagc

SEQ ID NO: 419 - DNA, 1474 bp, Brevibacterium aurantiacum
  modified_base (10)..(10): a, c, t, g, unknown or other
  modified_base (35)..(35): a, c, t, g, unknown or other
  modified_base (418)..(419): a, c, t, g, unknown or other
  modified_base (421)..(421): a, c, t, g, unknown or other
ctgcgtgctnaacacatgcaagtcgaacgctgaanccctggtgcttgcacggggtggatgagtggcgaacgggtgagtaacacgtgagtaacctgcccccgacttcgggataagcccgggaaactgggtctaataccggatatgaccatcactcgcatgagtgatggtggaaagttttttcggttggggatgggctcgcggcctatcagtttgttggtgaggtaatggctcaccaagacgacgacgggtagccggcctgagagggcgaccggccacactgggactgagacacggcccagactcctacgggaggcagcagtggggaatattgcacaatgggggaaaccctgatgcagcgacgcagcgtgcgggatgacggccttcgggttgtaaaccgctttcagcagggaagaagccnntnggggtgacggtacctgcagaagaagtaccggctaactacgtgccagcagccgcggtaatacgtagggtacaagcgttgtccggaattattgggcgtaaagagctcgtaggtggttggtcacgtctgctgtggaaacgcaacgcttaacgttgcgcgtgcagtgggtacgggctgactagagtgcagtaggggagtctggaattcctggtgtagcggtgaaatgcgcagatatcaggaggaacaccggtggcgaaggcgggactctgggctgtaactgacactgaggagcgaaagcatggggagcgaacaggattagataccctggtagtccatgccgtaaacgttgggcactaggtgtgggggacattccacgttctccgcgccgtacgtaacgcattaagtgccccgcctggggagtacggtcgcaaggctaaaactcaaaggaattgacgggggccgcacaagcggcggagcatgcggattaattcgatgcaacgcgaagaaccttaccaaggcttgacatacaccagaccgttctggaaacagttcctccctttggggttggtgtacaggtggtgcatggttgtcgtcagctcgtgtcgtgagatgttgggttaagtcccgcaacgagcgcaaccctcgttctatgttgccagcacgtgatggtgggaactcataggagactgccggggtcaactcggaggaaggtggggatgacgtcaaatcatcatgccctttatgtcttgggcttcacgcatgctacaatggctggtacagagagatgcgagaccgcgaggttttagcgaatcccttaaagccagtctcagttcggatcgtagtctgcaattcgactacgtgaagtcggagtcgctagtaatcgcagatcagcaacgctgcggtgaatacgttcccgggccttgtacacaccgcccgtcaagtcacgaaagtcggtaacacccgaagccggtggcccaacccttgtggagggggccgtctaaggtgggactggtgattgggactaagtcgtaacaaggtagccgtaccggaaggtgc

SEQ ID NO: 420 - DNA, 1389 bp, Brevibacterium casei
tgcagtcgtacgctgaagcctgtagcttgcaccgggtggatgagtggcgaacgggtgagtaacacgtgagtaacctgcccctgacttcgggataagcccgggaaactgggtctaataccggatacgactgccggacgcatgtctggtggtggaaagttttttcggttggggatgggctcgcggcctatcagtttgttggtgaggtaatggctcaccaagacgacgacgggtagccggcctgagagggcgaccggccacactgggactgagacacggcccagactcctacgggaggcagcagtggggaatattgcacaatgggggaaaccctgatgcagcgacgcagcgtgcgggatgacggccttcgggttgtaaaccgctttcagcagggaagaagcgcaagtgacggtacctgcagaagaagtaccggctaactacgtgccagcagccgcggtaatacgtagggtacgagcgttgtccggaattattgggcgtaaagagctcgtaggtggttggtcacgtctgctgtggaaacgcaacgcttaacgttgcgcgtgcagtgggtacgggctgactagagtgcagtaggggagtctggaattcctggtgtagcggtgaaatgcgcagatatcaggaggaacaccggtggcgaaggcgggactctgggctgtaactgacactgaggagcgaaagcatggggagcgaacaggattagataccctggtagtccatgccgtaaacgttgggcactaggtgtggggggcattccacgttctccgcgccgtagctaacgcattaagtgccccgcctggggagtacggtcgcaaggctaaaactcaaaggaattgacgggggcccgcacaagcggcggagcatgcggattaattcgatgcaacgcgaagaaccttaccaaggcttgacatacaccggaccgtcctggaaacaggtcctcttctttgaagctggtgtacaggtggtgcatggttgtcgtcagctcgtgtcgtgagatgttgggttaagtcccgcaacgagcgcaaccctcgttctatgttgccagcacgtgatggtgggaactcataggagactgccggggtcaactcggaggaaggtggggatgacgtcaaatcatcatgccctttatgtcttgggcttcacgcatgctacaatggctggtacagagagaggcgaacccgtgagggcaagcgaatcccttaaagccagtctcagttcggatcgtagtctgcaattcgactacgtgaagtcggagtcgctagtaatcgcagatcagcaacgctgcggtgaatacgttcccgggccttgtacacaccgcccgtcaagtcacgaaagtcggtaacacccgaagccggtggcctaaccgtaaggaggggg

SEQ ID NO: 421 - DNA, 1480 bp, Brevibacterium epidermidis
  modified_base (162)..(162): a, c, t, g, unknown or other
ctgcgtgcttaacacatgcaagtcgaacgctgaagccgacagcttgctgttggtggatgagtggcgaacgggtgagtaacacgtgagtaacctgcccctgatttcgggataagcctgggaaactgggtctaataccggatacgaccacctgacgcatgttgngtggtggaaagtttttcgatcggggatgggctcgcggcctatcagcttgttggtggggtaatggcctaccaaggcgacgacgggtagccggcctgagagggcgaccggccacactgggactgagacacggcccagactcctacgggaggcagcagtggggaatattgcacaatgggggaaaccctgatgcagcgacgcagcgtgcgggatgacggccttcgggttgtaaaccgctttcagcagggaagaagcgaaagtgacggtacctgcagaagaagtaccggctaactacgtgccagcagccgcggtaatacgtagggtacgagcgttgtccggaattattgggcgtaaagagctcgtaggtggttggtcacgtctgctgtggaaacgcaacgcttaacgttgcgcgtgcagtgggtacgggctgactagagtgcagtaggggagtctggaattcctggtgtagcggtgaaatgcgcagatatcaggaggaacaccggtggcgaaggcgggactctgggctgtaactgacactgaggagcgaaagcatggggagcgaacaggattagataccctggtagtccatgccgtaaacgttgggcactaggtgtgggggacattccacgttctccgcgccgtacgtaacgcattaagtgccccgcctggggagtacggtcgcaaggctaaaactcaaaggaattgacgggggccgcacaagcggcggagcatgcggattaattcgatgcaacgcgaagaaccttaccaaggcttgacatacactggaccgttctggaaacagttcttctctttggagctggtgtacaggtggtgcatggttgtcgtcagctcgtgtcgtgagatgttgggttaagtcccgcaacgagcgcaaccctcgttctatgttgccagcacgtgatggtgggaactcataggagactgccggggtcaactcggaggaaggtggggatgacgtcaaatcatcatgccctttatgtcttgggcttcacgcatgctacaatggctggtacagagagaggcgaacccgtgagggtaagcgaatcccttaaagccagtctcagttcggatcgtagtctgcaattcgactacgtgaagtcggagtcgctagtaatcgcagatcagcaacgctgcggtgaatacgttcccgggccttgtacacaccgcccgtcaagtcacgaaagtcggtaacacccgaagccggtgtcccaacccttttgggagggggccgtctaaggtgggactggtgattgggactaagtcgtaacaaggtagccgtaccggaaggtgcgctggatcacct

SEQ ID NO: 422 - DNA, 1540 bp, Brevibacterium frigoritolerans
gtttgatcctggctcaggacgaacgctggcggcgtgcctaatacatgcaagtcgagcgaatcgacgggagcttgctccctgagattagcggcggacgggtgagtaacacgtgggcaacctgcctataagactgggataacttcgggaaaccggagctaataccggatacgttcttttctcgcatgagagaagatggaaagacggtttacgctgtcacttatagatgggcccgcggcgcattagctagttggtgaggtaatggctcaccaaggcgacgatgcgtagccgacctgagagggtgatcggccacactgggactgagacacggcccagactcctacgggaggcagcagtagggaatcttccgcaatggacgaaagtctgacggagcaacgccgcgtgaacgaagaaggccttcgggtcgtaaagttctgttgttagggaagaacaagtaccagagtaactgctggtaccttgacggtacctaaccagaaagccacggctaactacgtgccagcagccgcggtaatacgtaggtggcaagcgttgtccggaattattgggcgtaaagcgcgcgcaggtggttccttaagtctgatgtgaaagcccacggctcaaccgtggagggtcattggaaactggggaacttgagtgcagaagaggaaagtggaattccaagtgtagcggtgaaatgcgtagagatttggaggaacaccagtggcgaaggcgactttctggtctgtaactgacactgaggcgcgaaagcgtggggagcaaacaggattagataccctggtagtccacgccgtaaacgatgagtgctaagtgttagagggtttccgccctttagtgctgcagctaacgcattaagcactccgcctggggagtacggccgcaaggctgaaactcaaaggaattgacgggggcccgcacaagcggtggagcatgtggtttaattcgaagcaacgcgaagaaccttaccaggtcttgacatcctctgacaaccctagagatagggctttccccttcgggggacagagtgacaggtggtgcatggttgtcgtcagctcgtgtcgtgagatgttgggttaagtcccgcaacgagcgcaacccttgatcttagttgccagcattcagttgggcactctaaggtgactgccggtgacaaaccggaggaaggtggggatgacgtcaaatcatcatgccccttatgacctgggctacacacgtgctacaatggatggtacaaagggctgcaaacctgcgaaggtaagcgaatcccataaagccattctcagttcggattgcaggctgcaactcgcctgcatgaagccggaatcgctagtaatcgcggatcagcatgccgcggtgaatacgttcccgggccttgtacacaccgcccgtcacaccacgagagtttgtaacacccgaagtcggtgaggtaaccttcatggagccagccgcctaaggtgggacagatgattggggtgaagtcgtaacaaggtagccgtatcggaaggtgcggctggatcacctcctt

SEQ ID NO: 423 - DNA, 1515 bp, Brevibacterium linens
tcaggacgaacgctggctgcgtgcttaacacatgcaagtcgaacgctgaagccctggtgcttgcaccggggtggatgagtggcgaacgggtgagtaacacgtgagtaacctgcccccgacttcgggataagcccgggaaactgggtctaataccggatatgacsaysrmtsgcatswktgrtkgtggaaagttttttcggttggggatgggctcgcggcctatcagtttgttggtgaggtaatggctcaccaagacgacgacgggtagccggcctgagagggcgaccggccacactgggactgagacacggcccagactcctacgggaggcagcagtggggaatattgcacaatgggggaaaccctgatgcagcgacgcagcgtgcgggatgacggccttcgggttgtaaaccgctttcagcagggaagaagcctttcggggtgacggtacctgcagaagaagtaccggctaactacgtgccagcagccgcggtaatacgtagggtacaagcgttgtccggaattattgggcgtaaagagctcgtaggtggttggtcacgtctgctgtggaaacgcaacgcttaacgttgcgcgtgcagtgggtacgggcttgactagagtgcagtaggggagtctggaattcctggtgtagcggtgaaatgcgcagatatcaggaggaacaccggtggcgaaggcgggactctgggctgtaactgacactgaggagcgaaagcatggggagcgaacaggattagataccctggtagtccatgccgtaaacgttgggcactaggtgtgggggacattccacgttctccgcgccgtagctaacgcattaagtgccccgcctggggagtacggtcgcaaggctaaaactcaaaggaattgacgggggcccgcacaagcggcggagcatgcggattaattcgatgcaacgcgaagaaccttaccaaggcttgactatacaccagaccgttctggaaacagttcctcccctttggggttggtgtacaggtggtgcatggttgtcgtcagctcgtgtcgtgagatgttgggttaagtcccgcaacgagcgcaaccctcgttctatgttgccagcacgtaatggtgggaactcataggagactgccggggtcaactcggaggaaggtggggatgacgtcaaatcatcatgccctttatgtcttgggcttcacgcatgctacaatggctggtacagagagatgcgagaccgcgaggttttagcgaatcccttaaagccagtctcagttcggatcgtagtctgcaattcgactacgtgaagtcggagtcgctagtaatcgcagatcagcaacgctgcggtgaatacgttcccgggccttgtacacaccgcccgtcaagtcacgaaagtcggtaacacccgaagccggtggcccaacccttgtggagggggccgtctaaggtgggactggtgattgggactaagtcgtaacaaggtagccgtaccggaaggtgcggctggatcacctcctttct

SEQ ID NO: 424 - DNA, 1527 bp, Brevibacterium mcbrellneri
tttttgtggagagtttgatcctggctcaggacgaacgctggcggcgtgcttaacacatgcaagtcgaacgctgaagcttggtgttttcactgggtggatgagtggcgaacgggtgagtaacacgtgagtaacctgccctttacttcgggataagcttgggaaactgggtctaataccggatattctgcgtgatcgtatggttgtgtaggaaagattttttggtaagggatgggctcgcggcctatcagtttgttggtggggtgatggcctaccaagacgacgacgggtagccggcctgagagggcgaccggccacactgggactgagacacggcccagactcctacgggaggcagcagtggggaatattgcacaatgggggaaaccctgatgcagcgacgccgcgtgggggatgacggccttcgggttgtaaacctctttcagtagggaagaagcgtaagtgacggtacctgcagaagaagtaccggctaactacgtgccagcagccgcggtaatacgtagggtactagcgttgtccggaattattgggcgtaaagagctcgtaggtggtttgtcgcgtctgctgtggaaacgtgccgcttaacggtgcgcgtgcagtgggtacgggcggactagagtgcagtaggggagtctggaattcctggtgtagcggtgaaatgcgcagatatcaggaggaacaccggtggcgaaggcgggactctgggctgttactgacgctgaggagcgaaagcatggggagcgaacaggattagataccctggtagtccatgccgtaaacgttgggcactaggtgtggggtccattccacggattctgcgccgtagctaacgcattaagtgccccgcctggggagtacggccgcaaggctaaaactcaaaggaattgacgggggcccgcacaagcggcggagcatgcggattaattcgatgcaacgcgaagaaccttaccaaggcttgacatgcactggatcgctgcagagatgtggttttctttttgactggtgtacaggtggtgcatggttgtcgtcagctcgtgtcgtgagatgttgggttaagtcccgcaacgagcgcaaccctcgttctatgttgccagcacgtgatggtgggaactcatgggagactgccggggtcaactcggaggaaggtggggatgacgtcaaatcatcatgccctttatgtcttgggcttcacgcatgctacaatggccggtacagagggtggcgataccgtgaggtggagcgaatctcttaaagccggtctcagttcggatcgtagtctgcaactcgactacgtgaagtcggagtcgctagtaatcgcagatcagcaatgctgcggtgaatacgttcccgggccttgtacacaccgcccgtcaagtcacgaaagtcggtaacacccgaagccggtggcctaaccttttggggggagccgtcgaaggtgggactggtgattgggactaagtcgtaacaaggtagccgtaccggaaggtgcggctggatcacctcctttct

SEQ ID NO: 425 - DNA, 1441 bp, Brevibacterium paucivorans
gaagctggcggcgtgcttaacacatgcaagtcgaacgatgaagctctagcttgctggggtggattagtggcgaacgggtgagtaacacgtgagtaacctgccctttacttcgggataagcttgggaaactgggtctaataccggatattctgcatggtcggatggttgtgtaggaaagattttttggtaagggatgggctcgcggcctatcagtttgttggtggggtgatggcctaccaagacgacgacgggtagccggcctgagagggcgaccggccacactgggactgagacacggcccagactcctacgggaggcagcagtggggaatattgcacaatgggggaaaccctgatgcagcgacgccgcgtgggggatgacggccttcgggttgtaaacctctttcagtagggaagaagcgaaagtgacggtacctgcagaagaagtaccggctaactacgtgccagcagccgcggtaatacgtagggtactagcgttgtccggaattattgggcgtaaagagctcgtaggtggtttgtcgcgtctgctgtggaaacgtgccgcttaacggtgcgcgtgcagtgggtacgggcggactagagtgcagtaggggagtctggaattcctggtgtagcggtgaaatgcgcagatatcaggaggaacaccggtggcgaaggcgggactctgggctgttactgacgctgaggagcgaaagcatggggagcgaacaggattagataccctggtagtccatgccgtaaacgttgggcactaggtgtggggtccattccacggattctgcgccgtagctaacgcattaagtgccccgcctggggagtacggccgcaaggctaaaactcaaaggaattgacgggggcccgcacaagcggcggagcatgcggattaattcgatgcaacgcgaagaaccttaccaaggcttgacatgcactagaccatcgcagagatgtggttttctttttgactggtgtacaggtggtgcatggttgtcgtcagctcgtgtcgtgagatgttgggttaagtcccgcaacgagcgcaaccctcgttctatgttgccagcacgtgatggtgggaactcatgggagactgccggggtcaactcggaggaaggtggggatgacgtcaaatcatcatgccctttatgtcttgggcttcacgcatgctacaatggccggtacagagggtggcgataccgtgaggtggagcgaatctcttaaagccggtctcagttcggatcgtagtctgcaactcgactacgtgaagtcggagtcgctagtaatcgcagatcagcaatgctgcggtgaatacgttcccgggccttgtacacaccgcccgtcaagtcacgaaagtcggtaacacccgaagccggtggcctaaccctgtgtggggggagccgtcgaaggtgggactggtgattgggact

SEQ ID NO: 426 - DNA, 1341 bp, Brevibacterium sanguinis
gagtttgatcctggctcaggacgaacgctggctgcgtgcttaacacatgcaagtcgaacgagtggcgaacgggtgagtaacacgtgagtaacctgcccctgacttcgggataagcccgggaaactgggtctaataccggatacggaaagtcggttggggatgggctcgcggcctatcagtttgttggtgaggtaatggctcaccaagacgacgacgggtagccggcctgagagggcgaccggccacactgggactgagacacggcccagactcctacgggaggcagcagtggggaatattgcacaatgggggaaaccctgatgcagcgacgcagcgtgcgggatgacggccttcgggttgtaaaccgctttcagcagggaagatgacggtacctgcagaagaagtaccggctaactacgtgccagcagccgcggtaatacgtagggtacgagcgttgtccggaattattgggcgtaaagagctcgtaggtggttggtcacgtctgctgtggaaacgcaacgcttaacgttgcgcgtgcagtgggtacgggctgactagagtgcagtaggggagtctggaattcctggtgtagcggtgaaatgcgcagatatcaggaggaacaccggtggcgaaggcgggactctgggctgactgacactgaggagcgaaagcatggggagcgaacaggattagataccctggtagtccatgccgtaaacgttgggcactaggtgtgggggtctccgcgccgtagctaacgcattaagtgccccgcctggggagtacggtcgcaaggctaaaactcaaaggaattgacgggggcccgcacaagcggcggagcatgcggattaattcgatgcaacgcgaagaaccttaccaaggcttgacatatacaggtggtgcatgttgtcgtcagctcgtgtcgtgagatgttgggttaagtcccgcaacgagcgcaaccctcgttctatgttgccagcacgtgggaactcataggagactgccggggtcaactcggaggaaggtggggatgacgtcaaatcatcatgccctttatgtcttgggcttcacgcatgctacaatggctggcaaagagaagcgaacccgtgagggtcagcgaatcccttccagtctcagttcggacgtagtctgcaattcgactacggaagtcggagtcgctagtaatcgcagatcagcaacgctgcggtgaatacgttcccgggccttgtacacaccgcccgtcaagtcacgaaagtcggtaacacccgaagccggtgcctagggggccgtctaaggtgggactggtgattgggactaagtcgtaacaaggtagccgtaccg

SEQ ID NO: 427 - DNA, 1367 bp, Brevibacterium sp.
  H15
gagtttgatcctggctcaggacgaacgctggctgcgtgcttaacacatgcaagtcgaacgagtggcgaacgggtgagtaacacgtgagtaacctgcccctgacttcgggataagcccgggaaactgggtctaataccggatacggaaagtcggttggggatgggctcgcggcctatcagtttgttggtgaggtaatggctcaccaagacgacgacgggtagccggcctgagagggcgaccggccacactgggactgagacacggcccagactcctacgggaggcagcagtggggaatattgcacaatgggggaaaccctgatgcagcgacgcagcgtgcgggatgacggccttcgggttgtaaaccgctttcagcagggaagatgacggtacctgcagaagaagtaccggctaactacgtgccagcagccgcggtaatacgtagggtacgagcgttgtccggaattattgggcgtaaagagctcgtaggtggttggtcacgtctgctgtggaaacgcaacgcttaacgttgcgcgtgcagtgggtacgggctgactagagtgcagtaggggagtctggaattcctggtgtagcggtgaaatgcgcagatatcaggaggaacaccggtggcgaaggcgggactctgggctgactgacactgaggagcgaaagcatggggagcgaacaggattagataccctggtagtccatgccgtaaacgttgggcactaggtgtgggggtctccgcgccgtagctaacgcattaagtgccccgcctggggagtacggtcgcaaggctaaaactcaaaggaattgacgggggcccgcacaagcggcggagcatgcggattaattcgatgcaacgcgaagaaccttaccaaggcttgacatatacaggtggtgcatggttgtcgtcagctcgtgtcgtgagatgttgggttaagtcccgcaacgagcgcaaccctcgttctatgttgccagcacgtgggaactcataggagactgccggggtcaactcggaggaaggtggggatgacgtcaaatcatcatgccctttatgtcttgggcttcacgcatgctacaatggctggcagagagaggcgaacccgtgagggcaagcgaatcccttccagtctcagttcggacgtagtctgcaattcgactacggaagtcggagtcgctagtaatcgcagatcagcaacgctgcggtgaatacgttcccgggccttgtacacaccgcccgtcaagtcacgaaagtcggtaacacccgaagccggtgcctagggggccgtctaatgtgggactggtgattgggactaattcgtaacaaggtagccgtaccggaaggtgcggctggatcacctcctt

SEQ ID NO: 428 - DNA, 1491 bp, Brevibacterium sp.
  JC43
tagagtttgatcctggctcaggacgaacgctggcggcgtgcttaacacatgcaagtcgaacgatgaagctcctgcttgcaggagtggattagtggcgaacgggtgagtaacacgtgagtaacctgcccctgactgcgggataagcccgggaaactgggtctaataccgcatatgacacctggccgcatggtctgggtgtggaaagtttttcggttggggatgggctcgcggcctatcagcttgttggtggggtaacggcctaccaaggcgacgacgggtagccggcctgagagggcgaccggccacactgggactgagacacggcccagactcctacgggaggcagcagtggggaatattgcacaatgggggaaaccctgatgcagcgacgccgcgtgagggatgacggccttcgggttgtaaacctctttcagtagggaagaagccttcgggtgacggtacctgcagaagaagtaccggctaactacgtgccagcagccgcggtaatacgtagggtacaagcgttgtccggaattattgggcgtaaagagctcgtaggcggttcgtcgcgtctgctgtggaaacgcaaggctcaaccttgcgcgtgcagtgggtacgggcggactagagtgcagtaggggagtctggaattcctggtgtagcggtgaaatgcgcagatatcaggaggaacaccggtggcgaaggcgggactctgggctgtaactgacgctgaggagcgaaagcatggggagcgaacaggattagataccctggtagtccatgccgtaaacgttgggcactaggtgtggggctcattccacgagttccgcgccgcagctaacgcattaagtgccccgcctggggagtacggccgcaaggctaaaactcaaaggaattgacgggggcccgcacaagcggcggagcatgcggattaattcgatgcaacgcgaagaaccttaccaaggcttgacatacactggaatgtgccagagatggttcagcccttttgggctggtgtacaggtggtgcatggttgtcgtcagctcgtgtcgtgagatgttgggttaagtcccgcaacgagcgcaaccctcgttctatgttgccagcacgtgatggtgggaactcataggagactgccggggtcaactcggaggaaggtggggatgacgtcaaatcatcatgccctttatgtcttgggcttcacgcatgctacaatggtcggtacaaagggttgcgatgccgtgaggtggagcgaatcccagaaagccgatctcagttcggatcgtagtctgcaactcgactacgtgaagtcggagtcgctagtaatcgcagatcagcaacgctgcggtgaatacgttcccgggccttgtacacaccgcccgtcaagtcacgaaagtcggtaacacccgaagccggtggcccaacccttgtggggggagccgtcgaaggtgggactggtgattgggactaagtcgtaacaaggtagccgta

SEQ ID NO: 429 - DNA, 1449 bp, Brevundimonas subvibrioides
agagtttgatcctggctcagagcgaacgctggcggcaggcctaacacatgcaagtcgaacggacctctcggggttagtggcggacgggtgagtaacacgtgggaacgtgccttttggttcggaatagctcctggaaacgggtggtaatgccgaatgtgccctttgggggaaagatttatcgccattagagcggcccgcgtctgattagctagttggtgaggtaaaggctcaccaaggctacgatcagtagctggtctgagaggatgaccagccacattgggactgagacacggcccaaactcctacgggaggcagcagtggggaatcttgcgcaatgggcgaaagcctgacgcagccatgccgcgtgtatgatgaaggtcttaggattgtaaaatactttcaccggtgaagataatgactgtagccggagaagaagccccggctaacttcgtgccagcagccgcggtaatacgaagggggctagcgttgctcggaattactgggcgtaaagggagcgtaggcggacatttaagtcaggggtgaaatcccagagctcaactctggaactgcctttgatactgggtgtcttgagtgtgagagaggtatgtggaactccgagtgtagaggtgaaattcgtagatattcggaagaacaccagtggcgaaggcgacatactggctcattactgacgctgaggctcgaaagcgtggggagcaaacaggattagataccctggtagtccacgccgtaaacgatgattgctagttgtcgggatgtttacatctcggtgacgcagctaacgcattaagcaatccgcctggggagtacggtcgcaagattaaaactcaaaggaattgacgggggcccgcacaagcggtggagcatgtggtttaattcgaagcaacgcgcagaaccttaccaccttttgacatgcctggaccgccagagagatctggctttcccttcggggactaggacacaggtgctgcatggctgtcgtcagctcgtgtcgtgagatgttgggttaagtcccgcaacgagcgcaaccctcgccattagttgccatcatttagttgggaactctaatgggactgccggtgctaagccggaggaaggtggggatgacgtcaagtcctcatggcccttacagggtgggctacacacgtgctacaatggcgactacagagggttaatccttaaaagtcgtctcagttcggattgtcctctgcaactcgagggcatgaagttggaatcgctagtaatcgcggatcagcatgccgcggtgaatacgttcccgggccttgtacacaccgcccgtcacaccatgggagttggttctacccgaaggcgatgcgctaaccgcaaggaggcagtcgaccacggtagggtcagcgactggggtgaagtcgtaacaaggtagccgtaggggaacctgcggctggatcacct

SEQ ID NO: 430 - DNA, 1493 bp, Brucella abortus
aacttgagagtttgatcctggctcagaacgaacgctggcggcaggcttaacacatgcaagtcgagcgccccgcaaggggagcggcagacgggtgagtaacgcgtgggaacgtaccatttgctacggaataactcagggaaacttgtgctaataccgtatgtgcccttcgggggaaagatttatcggcaaatgatcggcccgcgttggattagctagttggtggggtaaaggctcaccaaggcgacgatccatagctggtctgagaggatgatcagccacactgggactgagacacggcccagactcctacgggaggcagcagtggggaatattggacaatgggcgcaagcctgatccagccatgccgcgtgagtgatgaaggccctagggttgtaaagctctttcaccggtgaagataatgacggtaaccggagaagaagccccggctaacttcgtgccagcagccgcggtaatacgaagggggctagcgttgttcggatttactgggcgtaaagcgcacgtaggcggacttttaagtcaggggtgaaatcccggggctcaaccccggaactgcctttgatactggaagtcttgagtatggtagaggtgagtggaattccgagtgtagaggtgaaattcgtagatattcggaggaacaccagtggcgaaggcggctcactggaccattactgacgctgaggtgcgaaagcgtggggagcaaacaggattagataccctggtagtccacgccgtaaacgatgaatgttagccgtcggggtgtttacacttcggtggcgcagctaacgcattaaacattccgcctggggagtacggtcgcaagattaaaactcaaaggaattgacgggggcccgcacaagcggtggagcatgtggtttaattcgaagcaacgcgcagaaccttaccagcccttgacatcccggtcgcggttagtggagacactatccttcagttaggctggaccggagacaggtgctgcatggctgtcgtcagctcgtgtcgtgagatgttgggttaagtcccgcaacgagcgcaaccctcgcccttagttgccagcattcagttgggcactctaaggggactgccggtgataagccgagaggaaggtggggatgacgtcaagtcctcatggcccttacgggctgggctacacacgtgctacaatggtggtgacagtgggcagcgagcacgcgagtgtgagctaatctccaaaagccatctcagttcggattgcactctgcaactcgagtgcatgaagttggaatcgctagtaatcgcggatcagcatgccgcggtgaatacgttcccgggccttgtacacaccgcccgtcacaccatgggagttggttttacccgaaggcgctgtgctaaccgcaaggaggcaggcgaccacggtagggtcagcgactggggtgaagtcgtaacaaggtagccgtaggggaacctgcggctggatcacctcctttctaaggaag

SEQ ID NO: 431 - DNA, 981 bp, Brucella canis
tgacggtaaccggagaagaagccccggctaacttcgtgccagcagccgcggtaatacgaagggggctagcgttgttcggatttactgggcgtaaagcgcacgtaggcggacttttaagtcaggggtgaaatcccggggctcaaccccggaactgcctttgatactggaagtcttgagtatggaagaggtaagtggaattgcgagtgtagaggtgaaattcgtagatattcgcaggaacaccagtggcgaaggcggcttactggtccattactgacgctgaggtgcgaaagcgtggggagcaaacaggattagataccctggtagtccacgccgtaaacgatgaatgttagccgtcggggtgtttacacttcggtggcgcagctaacgcattaaacattccgcctggggagtacggtcgcaagattaaaactcaaaggaattgacgggggcccgcacaagcggtggagcatgtggtttaattcgaagcaacgcgcagaaccttaccagctcttgacatgcctatgaatgttagtggagacactttcagcctttcggggcgtaggacacaggtgctgcatggctgtcgtcagctcgtgtcgtgagatgttgggttaagtcccgcaacgagcgcaaccctcgcctttagttgccatcatttagttgggcactctaaagggactgccagtgataagctggaggaaggtggggatgacgtcaagtcctcatggcccttacgggctgggctacacacgtgctacaatggtggtgacagtgggcagcgagaccgcgaggtcgagctaatctccaaaagccatctcagttcggattgcactctgcaactcgagtgcatgaagttggaatcgctagtaatcgcggatcagaatgccgcggtgaatacgttcccgggccttgtacacaccgcccgtcacaccatgggagttggttttacccgaaggcgctgtgctaaccgcaaggaggcag

SEQ ID NO: 432 - DNA, 1485 bp, Brucella ceti
caacttgagagtttgatcctggctcagaacgaacgctggcggcaggcttaacacatgcaagtcgagcgccccgcaaggggagcggcagacgggtgagtaacgcgtgggaacgtaccatttgctacggaataactcagggaaacttgtgctaataccgtatgtgcccttcgggggaaagatttatcggcaaatgatcggcccgcgttggattagctagttggtggggtaaaggctcaccaaggcgacgatccatagctggtctgagaggatgatcagccacactgggactgagacacggcccagactcctacgggaggcagcagtggggaatattggacaatgggcgcaagcctgatccagccatgccgcgtgagtgatgaaggccctagggttgtaaagctctttcaccggtgaagataatgacggtaaccggagaagaagccccggctaacttcgtgccagcagccgcggtaatacgaagggggctagcgttgttcggatttactgggcgtaaagcgcacgtaggcggacttttaagtcaggggtgaaatcccggggctcaaccccggaactgcctttgatactggaagtcttgagtatggtagaggtgagtggaattccgagtgtagaggtgaaattcgtagatattcggaggaacaccagtggcgaaggcggctcactggaccattactgacgctgaggtgcgaaagcgtggggagcaaacaggattagataccctggtagtccacgccgtaaacgatgaatgttagccgtcggggtgtttacacttcggtggcgcagctaacgcattaaacattccgcctggggagtacggtcgcaagattaaaactcaaaggaattgacgggggcccgcacaagcggtggagcatgtggtttaattcgaagcaacgcgcagaaccttaccagcccttgacatcccggtcgcggttagtggagacactatccttcagttaggctggaccggagacaggtgctgcatggctgtcgtcagctcgtgtcgtgagatgttgggttaagtcccgcaacgagcgcaaccctcgcccttagttgccagcattcagttgggcactctaaggggactgccggtgataagccgagaggaaggtggggatgacgtcaagtcctcatggcccttacgggctgggctacacacgtgctacaatggtggtgacagtgggcagcgagcacgcgagtgtgagctaatctccaaaagccatctcagttcggattgcactctgcaactcgagtgcatgaagttggaatcgctagtaatcgcggatcagcatgccgcggtgaatacgttcccgggccttgtacacaccgcccgtcacaccatgggagttggttttacccgaaggcgctgtgctaaccgcaaggaggcaggcgaccacggtagggtcagcgactggggtgaagtcgtaacaaggtagccgtaggggaacctgcggctggatcacctccttt

SEQ ID NO: 433 - DNA, 1500 bp, Brucella melitensis
aattttcaacttgagagtttgatcctggctcagaacgaacgctggcggcaggcttaacacatgcaagtcgagcgccccgcaaggggagcggcagacgggtgagtaacgcgtgggaacgtaccatttgctacggaataactcagggaaacttgtgctaataccgtatgtgcccttcgggggaaagatttatcggcaaatgatcggcccgcgttggattagctagttggtggggtaaaggctcaccaaggcgacgatccatagctggtctgagaggatgatcagccacactgggactgagacacggcccagactcctacgggaggcagcagtggggaatattggacaatgggcgcaagcctgatccagccatgccgcgtgagtgatgaaggccctagggttgtaaagctctttcaccggtgaagataatgacggtaaccggagaagaagccccggctaacttcgtgccagcagccgcggtaatacgaagggggctagcgttgttcggatttactgggcgtaaagcgcacgtaggcggacttttaagtcaggggtgaaatcccggggctcaaccccggaactgcctttgatactggaagtcttgagtatggtagaggtgagtggaattccgagtgtagaggtgaaattcgtagatattcggaggaacaccagtggcgaaggcggctcactggaccattactgacgctgaggtgcgaaagcgtggggagcaaacaggattagataccctggtagtccacgccgtaaacgatgaatgttagccgtcggggtgtttacacttcggtggcgcagctaacgcattaaacattccgcctggggagtacggtcgcaagattaaaactcaaaggaattgacgggggcccgcacaagcggtggagcatgtggtttaattcgaagcaacgcgcagaaccttaccagcccttgacatcccggtcgcggttagtggagacactatccttcagttaggctggaccggagacaggtgctgcatggctgtcgtcagctcgtgtcgtgagatgttgggttaagtcccgcaacgagcgcaaccctcgcccttagttgccagcattcagttgggcactctaaggggactgccggtgataagccgagaggaaggtggggatgacgtcaagtcctcatggcccttacgggctgggctacacacgtgctacaatggtggtgacagtgggcagcgagcacgcgagtgtgagctaatctccaaaagccatctcagttcggattgcactctgcaactcgagtgcatgaagttggaatcgctagtaatcgcggatcagcatgccgcggtgaatacgttcccgggccttgtacacaccgcccgtcacaccatgggagttggttttacccgaaggcgctgtgctaaccgcaaggaggcaggcgaccacggtagggtcagcgactggggtgaagtcgtaacaaggtagccgtaggggaacctgcggctggatcacctcctttctaaggaag

SEQ ID NO: 434 - DNA, 1390 bp, Brucella microti
caggcttaacacatgcaagtcgagcgccccgcaaggggagcggcagacgggtgagtaacgcgtgggaacgtaccatttgctacggaataactcagggaaacttgtgctaataccgtatgtgcccttcgggggaaagatttatcggcaaatgatcggcccgcgttggattagctagttggtggggtaaaggctcaccaaggcgacgatccatagctggtctgagaggatgatcagccacactgggactgagacacggcccagactcctacgggaggcagcagtggggaatattggacaatgggcgcaagcctgatccagccatgccgcgtgagtgatgaaggccctagggttgtaaagctctttcaccggtgaagataatgacggtaaccggagaagaagccccggctaacttcgtgccagcagccgcggtaatacgaagggggctagcgttgttcggatttactgggcgtaaagcgcacgtaggcggacttttaagtcaggggtgaaatcccggggctcaaccccggaactgcctttgatactggaagtcttgagtatggtagaggtgagtggaattccgagtgtagaggtgaaattcgtagatattcggaggaacaccagtggcgaaggcggctcactggaccattactgacgctgaggtgcgaaagcgtggggagcaaacaggattagataccctggtagtccacgccgtaaacgatgaatgttagccgtcggggtgtttacacttcggtggcgcagctaacgcattaaacattccgcctggggagtacggtcgcaagattaaaactcaaaggaattgacgggggcccgcacaagcggtggagcatgtggtttaattcgaagcaacgcgcagaaccttaccagcccttgacatcccggtcgcggttagtggagacactatccttcagttaggctggaccggagacaggtgctgcatggctgtcgtcagctcgtgtcgtgagatgttgggttaagtcccgcaacgagcgcaaccctcgcccttagttgccagcattcagttgggcactctaaggggactgccggtgataagccgagaggaaggtggggatgacgtcaagtcctcatggcccttacgggctgggctacacacgtgctacaatggtggtgacagtgggcagcgagcacgcgagtgtgagctaatctccaaaagccatctcagttcggattgcactctgcaactcgagtgcatgaagttggaatcgctagtaatcgcggatcagcatgccgcggtgaatacgttcccgggccttgtacacaccgcccgtcacaccatgggagttggttttacccgaaggcgctgtgctaaccgcaaggaggcaggcgaccacggtagggtcagcgactgggg

SEQ ID NO: 435 - DNA, 1489 bp, Brucella ovis
ttcaacttgagagtttgatcctggctcagaacgaacgctggcggcaggcttaacacatgcaagtcgagcgccccgcaaggggagcggcagacgggtgagtaacgcgtgggaacgtaccatttgctacggaataactcagggaaacttgtgctaataccgtatgtgcccttcgggggaaagatttatcggcaaatgatcggcccgcgttggattagctagttggtggggtaaaggctcaccaaggcgacgatccatagctggtctgagaggatgatcagccacactgggactgagacacggcccagactcctacgggaggcagcagtggggaatattggacaatgggcgcaagcctgatccagccatgccgcgtgagtgatgaaggccctagggttgtaaagctctttcaccggtgaagataatgacggtaaccggagaagaagccccggctaacttcgtgccagcagccgcggtaatacgaagggggctagcgttgttcggatttactgggcgtaaagcgcacgtaggcggacttttaagtcaggggtgaaatcccggggctcaaccccggaactgcctttgatactggaagtcttgagtatggtagaggtgagtggaattccgagtgtagaggtgaaattcgtagatattcggaggaacaccagtggcgaaggcggctcactggaccattactgacgctgaggtgcgaaagcgtggggagcaaacaggattagataccctggtagtccacgccgtaaacgatgaatgttagccgtcggggtgtttacacttcggtggcgcagctaacgcattaaacattccgcctggggagtacggtcgcaagattaaaactcaaaggaattgacgggggcccgcacaagcggtggagcatgtggtttaattcgaagcaacgcgcagaaccttaccagcccttgacatcccggtcgcggttagtggagacactatccttcagttaggctggaccggagacaggtgctgcatggctgtcgtcagctcgtgtcgtgagatgttgggttaagtcccgcaacgagcgcaaccctcgcccttagttgccagcattcagttgggcactctaaggggactgccggtgataagccgagaggaaggtggggatgacgtcaagtcctcatggcccttacgggctgggctacacacgtgctacaatggtggtgacagtgggcagcgagcacgcgagtgtgagctaatctccaaaagccatctcagttcggattgcactctgcaactcgagtgcatgaagttggaatcgctagtaatcgcggatcagcatgccgcggtgaatacgttcccgggccttgtacacaccgcccgtcacaccatgggagttggttttacccgaaggcgctgtgctaaccgcaaggaggcaggcgaccacggtagggtcagcgactggggtgaagtcgtaacaaggtagccgtaggggaacctgcggctggatcacctcctttct

SEQ ID NO: 436 - DNA, 1489 bp, Brucella sp.
  83/13
ttcaacttgagagtttgatcctggctcagaacgaacgctggcggcaggcttaacacatgcaagtcgagcgccccgcaaggggagcggcagacgggtgagtaacgcgtgggaacgtaccatttgctacggaataactcagggaaacttgtgctaataccgtatgtgcccgaaaggggaaagatttatcggcaaatgatcggcccgcgttggattagctagttggtggggtaaaggcccaccaaggcgacgatccatagctggtctgagaggatgatcagccacactgggactgagacacggcccagactcttacgggaggcagcagtggggaatattggacaatgggcgcaagcctgatccagccatgccgcgtgagtgatgaaggccctagggttgtaaagctctttcaccggtgaagataatgacggtaaccggagaagaagccccggctaacttcgtgccagcagccgcggtaatacgaagggggctagcgttgttcggatttactgggcgtaaagcgcacgtaggcggacttttaagtcaggggtgaaatcccggggctcaaccccggaactgcctttgatactggaagtcttgagtatggtagaggtgagtggaattccgagtgtagaggtgaaattcgtagatattcggaggaacaccagtggcgaaggcggctcactggaccattactgacgctgaggtgcgaaagcgtggggagcaaacaggattagataccctggtagtccacgccgtaaacgatgaatgttagccgtcggggtgtttacacttcggtggcgcagctaacgcattaaacattccgcctggggagtacggtcgcaagattaaaactcaaaggaattgacgggggcccgcacaagcggtggagcatgtggtttaattcgaagcaacgcgcagaaccttaccagcccttgacatcccggtcgcggttagtggagacactatccttcagttaggctggaccggagacaggtgctgcatggctgtcgtcagctcgtgtcgtgagatgttgggttaagtcccgcaacgagcgcaaccctcgcccttagttgccagcattcagttgggcactctaaggggactgccggtgataagccgagaggaaggtggggatgacgtcaagtcctcatggcccttacgggctgggctacacacgtgctacaatggtggtgacagtgggcagcgagcacgcgagtgtgagctaatctccaaaagccatctcagttcggattgcactctgcaactcgagtgcatgaagttggaatcgctagtaatcgcggatcagcatgccgcggtgaatacgttcccgggccttgtacacaccgcccgtcacaccatgggagttggttttacccgaaggcgctgtgctaaccgcaaggaggtaggcgaccacggtagggtcagcgactggggtgaagtcgtaacaaggtagccgtaggggaacctgcggctggatcacctcctttct

SEQ ID NO: 437 - DNA, 1412 bp, Brucella sp.
  BO1
ctcagaacgaacgctggcggcaggcttaacacatgcaagtcgagcgccccgcaaggggagcggcagacgggtgagtaacgcgtgggaacgtaccatttgctacggaataactcagggaaacttgtgctaataccgtatgtgcccgaaaggggaaagatttatcggcaaatgatcggcccgcgttggattagctagttggtggggtaaaggcccaccaaggcgacgatccatagctggtctgagaggatgatcagccacactgggactgagacacggcccagactcctacgggaggcagcagtggggaatattggacaatgggcgcaagcctgatccagccatgccgcgtgagtgatgaaggccctagggttgtaaagctctttcaccggtgaagataatgacggtaaccggagaagaagccccggctaacttcgtgccagcagccgcggtaatacgaagggggctagcgttgttcggatttactgggcgtaaagcgcacgtaggcggacttttaagtcaggggtgaaatcccggggctcaaccccggaactgcctttgatactggaagtcttgagtatggtagaggtgagtggaattccgagtgtagaggtgaaattcgtagatattcggaggaacaccagtggcgaaggcggctcactggaccattactgacgctgaggtgcgaaagcgtggggagcaaacaggattagataccctggtagtccacgccgtaaacgatgaatgttagccgtcggggtgtttacacttcggtggcgcagctaacgcattaaacattccgcctggggagtacggtcgcaagattaaaactcaaaggaattgacgggggcccgcacaagcggtggagcatgtggtttaattcgaagcaacgcgcagaaccttaccagcccttgacatcccggtcgcggttagtggagacactatccttcagttaggctggaccggagacaggtgctgcatggctgtcgtcagctcgtgtcgtgagatgttgggttaagtcccgcaacgagcgcaaccctcgcccttagttgccagcattcagttgggcactctaaggggactgccggtgataagccgagaggaaggtggggatgacgtcaagtcctcatggcccttacgggctgggctacacacgtgctacaatggtggtgacagtgggcagcgagcacgcgagtgtgagctaatctccaaaagccatctcagttcggattgcactctgcaactcgagtgcatgaagttggaatcgctagtaatcgcggatcagcatgccgcggtgaatacgttcccgggccttgtacacaccgcccgtcacaccatgggagttggttttacccgaaggcgctgtgctaaccgcaaggaggcaggcgaccacggtagggtcagcgactggggtg

SEQ ID NO: 438 - DNA, 1493 bp, Brucella suis
aacttgagagtttgatcctggctcagaacgaacgctggcggcaggcttaacacatgcaagtcgagcgctccgcaaggggagcggcagacgggtgagtaacgcgtgggaacgtaccatttgctacggaataactcagggaaacttgtgctaataccgtatgtgcccttcgggggaaagatttatcggcaaatgatcggcccgcgttggattagctagttggtggggtaaaggctcaccaaggcgacgatccatagctggtctgagaggatgatcagccacactgggactgagacacggcccagactcctacgggaggcagcagtggggaatattggacaatgggcgcaagcctgatccagccatgccgcgtgagtgatgaaggccctagggttgtaaagctctttcaccggtgaagataatgacggtaaccggagaagaagccccggctaacttcgtgccagcagccgcggtaatacgaagggggctagcgttgttcggatttactgggcgtaaagcgcacgtaggcggacttttaagtcaggggtgaaatcccggggctcaaccccggaactgcctttgatactggaagtcttgagtatggtagaggtgagtggaattccgagtgtagaggtgaaattcgtagatattcggaggaacaccagtggcgaaggcggctcactggaccattactgacgctgaggtgcgaaagcgtggggagcaaacaggattagataccctggtagtccacgccgtaaacgatgaatgttagccgtcggggtgtttacacttcggtggcgcagctaacgcattaaacattccgcctggggagtacggtcgcaagattaaaactcaaaggaattgacgggggcccgcacaagcggtggagcatgtggtttaattcgaagcaacgcgcagaaccttaccagcccttgacatcccggtcgcggttagtggagacactatccttcagttaggctggaccggagacaggtgctgcatggctgtcgtcagctcgtgtcgtgagatgttgggttaagtcccgcaacgagcgcaaccctcgcccttagttgccagcattcagttgggcactctaaggggactgccggtgataagccgagaggaaggtggggatgacgtcaagtcctcatggcccttacgggctgggctacacacgtgctacaatggtggtgacagtgggcagcgagcacgcgagtgtgagctaatctccaaaagccatctcagttcggattgcactctgcaactcgagtgcatgaagttggaatcgctagtaatcgcggatcagcatgccgcggtgaatacgttcccgggccttgtacacaccgcccgtcacaccatgggagttggttttacccgaaggcgctgtgctaaccgcaaggaggcaggcgaccacggtagggtcagcgactggggtgaagtcgtaacaaggtagccgtaggggaacctgcagctggatcacctcctttctaaggaag

SEQ ID NO: 439 - DNA, 1535 bp, Bryantella formatexigens
ttttatttgagagtttgatcctggctcaggatgaacgctggcggcgtgcttaacacatgcaagtcgagcgaagcattttaaatgaagttttcggacggaatttaaaatgactgagcggcggacgggtgagtaacgcgtggataacctgccttatacagggggataacagccagaaatggctgctaataccgcataagcgcacggtaccgcatggtacagtgtgaaaaactccggtggtataagatgggtccgcgttggattaggcagttggcggggtaaaggcccaccaaaccgacgatccatagccggcctgagagggtggacggccacattgggactgagacacggcccagactcctacgggaggcagcagtggggaatattgcacaatgggggaaaccctgatgcagcgacgccgcgtgggtgaagaagtatttcggtatgtaaagccctatcagcagggaagaaaatgacggtacctgaccaagaagccccggctaactacgtgccagcagccgcggtaatacgtagggggcaagcgttatccggatttactgggtgtaaagggagcgtagacggccatgcaagtctggtgtgaaaggcgggggctcaacccccggactgcattggaaactgtatggcttgagtgccggagaggtaagcggaattcctggtgtagcggtgaaatgcgtagatatcaggaggaacaccagtggcgaaggcggcttactggacggtaactgacgttgaggctcgaaagcgtggggagcaaacaggattagataccctggtagtccacgccgtaaacgatgaataccaggtgtcgggggacacggtccttcggtgccgcagcaaacgcactaagtattccacctggggagtacgttcgcaagaatgaaactcaaaggaattgacggggacccgcacaagcggtggagcatgtggtttaattcgaagcaacgcgaagaaccttaccaggtcttgacatccggacgaccggacagtaacgtgtccttcccttcggggcgtccgagacaggtggtgcatggttgtcgtcagctcgtgtcgtgagatgttgggttaagtcccgcaacgagcgcaacccctgttcccagtagccagcattcaggatgggcactctggggagactgccagggataacctggaggaaggcggggatgacgtcaaatcatcatgccccttatgatctgggctacacacgtgctacaatggcgtgaacagagggaagcgaacccgcgagggggagcaaatcccagaaataacgtcccagttcggattgtagtctgcaacccggctacatgaagctggaatcgctagtaatcgcggatcagcatgccgcggtgaatacgttcccgggtcttgtacacaccgcccgtcacaccatgggagtcggaaatgcccgaagtcagtgacccaaccggaaggagggagctgccgaaggcggggccggtaactggggtgaagtcgtaacaaggtagccgtatcggaaggtgcggctggatcacctcctttct

SEQ ID NO: 440 - DNA, 1519 bp, Buchnera aphidicola
agagtttgatcatggctcagattgaacgctggcggcaagcttaacacatgcaagtcgagcggcatcgaagaaaagtttacttttctggcggcgagcggcaaacgggtgagtaacatctggggatctacctaaaagagggggacaaccattggaaacgatggctaataccgcataatgtttttaaataaaccaaagtaggggactaaaatttttagccttatgcttttagatgaacccagacgagattagcttgatggtaaggtaatggcttaccaaggcgacgatctctagctggtctgagaggataaccagccacactggaactgagatacggtccagactcctacgggaggcagcagtggggaatattgcacaatgggctaaagcctgatgcagctatgccgcgtgtatgaagaaggccttagggttgtaaagtactttcagcggggaggaaagaattatgtctaatatacatattttgtgacgttacccgaagaagaagcaccggctaactccgtgccagcagccgcggtaatacggagggtgcgagcgttaatcagaattactgggcgtaaagagcacgtaggcggtttattaagtcagatgtgaaatccctaggcttaacttaggaactgcatttgaaactaatagactagagtctcatagagggaggtagaattctaggtgtagcggtgaaatgcgtagatatctagaggaatacccgtggcgaaagcgacctcctaaatgaaaactgacgctgaggtgcgaaagcgtggggagcaaacaggattagataccctggtagtccatgctgtaaacgatgtcgacttggaggttgtttcctagagaagtggcttccgaagctaacgcattaagtcgaccgcctggggagtacggtcgcaaggctaaaactcaaatgaattgacgggggcccgcacaagcggtggagcatgtggtttaattcgatgcaacgcgaagaaccttacctggtcttgacatccatagaattttttagagataaaagagtgccttagggaactatgagacaggtgctgcatggctgtcgtcagctcgtgttgtgaaatgttgggttaagtcccgcaacgagcgcaacccctatcctttgttgccatcaggttatgctgggaactcagaggagactgccggttataaaccggaggaaggtggggatgacgtcaagtcatcatggcccttacgaccagggctacacacgtgctacaatggcatatacaaagagatgcaactctgcgaagataagcaaacctcataaagtatgtcgtagtccggactggagtctgcaactcgactccacgaagtaggaatcgctagtaatcgtggatcagaatgccacggtgaatacgttcccgggccttgtacacaccgcccgtcacaccatgggagtgggttgcaaaagaagcaggtagcttaaccagattattttattggagggcgcttaccactttgtgattcatgactggggtgaagtcgtaacaaggta

SEQ ID NO: 441 - DNA, 1528 bp, Bulleidia extructa
tcaaatgaagagtttgatcctggctcaggataaacgctggcggcgtgcctaatacatgcaagtcgaacgccggacacctagcttgctagggagaaggagtggcgaacgggtgagtaatacataagcaatctgcccacaaagactgggataacctctggaaacggggactaataccggataggtaggagagaggcatctttcttctattaaagatgagaagcactagtggatgagcttatggcgcattagttagttggtgaggtaacggcccaccaagacgatgatgcgtagccggcctgagagggtgaacggccacattgggactgagacacggcccagactcctacgggaggcagcagtagggaattttcggcaatggggggaaccctgaccgagcaacgccgcgtgagtgaagacggccttcgggttgtaaagctctgttgtaagaaaagataaactaggagaggatcttagtcagacattatcttaccagaaagccacggctaactacgtgccagcagccgcggtaatacgtaggtggcgagcgttatccggaattattgggcgtaaagggtgcgtaggcggtctgttaagttcatggtcaaattgtggggctcaaccccatcgcgccatggatactggcagactagagtattggagaggcaagtggaattccatgtgtagcggtaaaatgcgtagatatatggaggaacaccggtggcgaaggcgacttgctagccaaagactgacgctgaggcacgaaagcgtggggagcaaataggattagataccctagtagtccacgctgtaaacgatgaatactaagtattggggagactcagtgctgcagctaacgcattaagtattccgcctgtggagtatgcacgcaagtgtgaaacataaaggaattgacgggggcccgcacaagcggtggagtatgtggtttaattcgacgcaacgcgaagaaccttaccaggccttgacatcccttgcgaagttctagagataggatagaggttatcaaggagacaggtggtgcatggttgtcgtcagctcgtgtcgtgagatgttgggttaagtcccgcaacgagcgcaacccttgtcttcagttaccatcattaagttggggactctggagagactgccggtgataaaccggaggaaggtggggatgacgtcaaatcatcatgccccttatggcctgggctacacacgtactacaatggctattacaacgtggagcgactgtgcgaacagaagcgaatcactgaaagatagtctcagttcggattggagtctgcaactcgactccatgaagttggaatcgctagtaatcgcggatcagcatgccgcggtgaatacgttctcgggccttgtacacaccgcccgtcataccatgagagttggtaatacccgaagccggtggcctaaccgaaaggaaggagccgtcgaaggtaggactaatgattggggtcaagtcgtaacaaggtatccctacgagaacgtggggatggatcacctcctttct

SEQ ID NO: 442 - DNA, 1537 bp, Burkholderia ambifaria
ttaaactgaagagtttgatcctggctcagattgaacgctggcggcatgccttacacatgcaagtcgaacggcagcacgggtgcttgcacctggtggcgagtggcgaacgggtgagtaatacatcggaacatgtcctgtagtgggggatagcccggcgaaagccggattaataccgcatacgatccacggatgaaagcgggggaccttcgggcctcgcgctatagggttggccgatggctgattagctagttggtggggtaaaggcctaccaaggcgacgatcagtagctggtctgagaggacgaccagccacactgggactgagacacggcccagactcctacgggaggcagcagtggggaattttggacaatgggcgaaagcctgatccagcaatgccgcgtgtgtgaagaaggccttcgggttgtaaagcacttttgtccggaaagaaatccttggttctaatacagccgggggatgacggtaccggaagaataagcaccggctaactacgtgccagcagccgcggtaatacgtagggtgcgagcgttaatcggaattactgggcgtaaagcgtgcgcaggcggtttgctaagaccgatgtgaaatccccgggctcaacctgggaactgcattggtgactggcaggctagagtatggcagaggggggtagaattccacgtgtagcagtgaaatgcgtagagatgtggaggaataccgatggcgaaggcagccccctgggccaatactgacgctcatgcacgaaagcgtggggagcaaacaggattagataccctggtagtccacgccctaaacgatgtcaactagttgttggggattcatttccttagtaacgtagctaacgcgtgaagttgaccgcctggggagtacggtcgcaagattaaaactcaaaggaattgacggggacccgcacaagcggtggatgatgtggattaattcgatgcaacgcgaaaaaccttacctacccttgacatggtcggaatcctgctgagaggcgggagtgctcgaaagagaaccggcgcacaggtgctgcatggctgtcgtcagctcgtgtcgtgagatgttgggttaagtcccgcaacgagcgcaacccttgtccttagttgctacgcaagagcactctaaggagactgccggtgacaaaccggaggaaggtggggatgacgtcaagtcctcatggcccttatgggtagggcttcacacgtcatacaatggtcggaacagagggttgccaacccgcgagggggagctaatcccagaaaaccgatcgtagtccggattgcactctgcaactcgagtgcatgaagctggaatcgctagtaatcgcggatcagcatgccgcggtgaatacgttcccgggtcttgtacacaccgcccgtcacaccatgggagtgggttttaccagaagtggctagtctaaccgcaaggaggacggtcaccacggtaggattcatgactggggtgaagtcgtaacaaggtagccgtatcggaaggtgcggctggatcacctcctttcc

SEQ ID NO: 443 - DNA, 1537 bp, Burkholderia cenocepacia
ttgaactgaagagtttgatcctggctcagattgaacgctggcggcatgccttacacatgcaagtcgaacggcagcacgggtgcttgcacctggtggcgagtggcgaacgggtgagtaatacatcggaacatgtcctgtagtgggggatagcccggcgaaagccggattaataccgcatacgatccatggatgaaagcgggggaccttcgggcctcgcgctatagggttggccgatggctgattagctagttggtggggtaaaggcctaccaaggcgacgatcagtagctggtctgagaggacgaccagccacactgggactgagacacggcccagactcctacgggaggcagcagtggggaattttggacaatgggcgaaagcctgatccagcaatgccgcgtgtgtgaagaaggccttcgggttgtaaagcacttttgtccggaaagaaatccttggctctaatacagccgggggatgacggtaccggaagaataagcaccggctaactacgtgccagcagccgcggtaatacgtagggtgcgagcgttaatcggaattactgggcgtaaagcgtgcgcaggcggtttgctaagaccgatgtgaaatccccgggctcaacctgggaactgcattggtgactggcaggctagagtatggcagaggggggtagaattccacgtgtagcagtgaaatgcgtagagatgtggaggaataccgatggcgaaggcagccccctgggccaatactgacgctcatgcacgaaagcgtggggagcaaacaggattagataccctggtagtccacgccctaaacgatgtcaactagttgttggggattcatttccttagtaacgtagctaacgcgtgaagttgaccgcctggggagtacggtcgcaagattaaaactcaaaggaattgacggggacccgcacaagcggtggatgatgtggattaattcgatgcaacgcgaaaaaccttacctacccttgacatggtcggaatcctgctgagaggtgggagtgctcgaaagagaaccggcgcacaggtgctgcatggctgtcgtcagctcgtgtcgtgagatgttgggttaagtcccgcaacgagcgcaacccttgtccttagttgctacgcaagagcactctaaggagactgccggtgacaaaccggaggaaggtggggatgacgtcaagtcctcatggcccttatgggtagggcttcacacgtcatacaatggtcggaacagagggttgccaacccgcgagggggagctaatcccagaaaaccgatcgtagtccggattgcactctgcaactcgagtgcatgaagctggaatcgctagtaatcgcggatcagcatgccgcggtgaatacgttcccgggtcttgtacacaccgcccgtcacaccatgggagtgggttttaccagaagtggctagtctaaccgcaaggaggacggtcaccacggtaggattcatgactggggtgaagtcgtaacaaggtagccgtatcggaaggtgcggctggatcacctcctttcc

SEQ ID NO: 444 - DNA, 1494 bp, Burkholderia cepacia
agtttgatcctggctcagattgaacgctagcggcatgccttacacatgcaagtcgaacggcagcacgggtgcttgcacctggtggcgagtggcgaacgggtgagtaatacatcggaacatgtcctgtagtgggggatagcccggcgaaagccggattaataccgcatacgatctatggatgaaagcgggggaccttcgggcctcgcgctatagggttggccgatggctgattagctagttggtggggtaaaggcctaccaaggcgacgatcagtagctggtctgagaggacgaccagccacactgggactgagacacggcccagactcctacgggaggcagcagtggggaattttggacaatgggcgaaagcctgttccagcaatgccgcgtgtgtgaagaaggccttcgggttgtaaagcacttttgtccggaaagaaatccttggttctaatacagccgggggatgacggtaccggaagaataagcaccggctaactacgtgccagcagccgcggtaatacgtagggtgcgagcgttaatcggaattactgggcgtaaagcgtgcgcaggcggtttgctaagaccgatgtgaaatccccgggctcaacctgggaactgcattggtgactggcaggctagagtatggcagaggggggtagaattccacgtgtagcagtgaaatgcgtagagatgtggaggaataccgatggcgaaggcagccccctgggccaatactgacgctcatgcacgaaagcgtggggagcaaacaggattagataccctggtagtccacgccctaaacgatgtcaactagttgttggggattcatttccttagtaacgtagctaacgcgtgaagttgaccgcctggggagtacggtcgcaagattaaaactcaaaggaattgacggggacccgcacaagcggtggatgatgtggattaattcgatgcaacgcgaaaaaccttacctacccttgacatggtcggaatcctgctgagaggtgggagtgctcgaaagagaaccgatacacaggtgctgcatggctgtcgtcagctcgtgtcgtgagatgttgggttaagtcccgcaacgagcgcaacccttgtccttagttgctacgcaagagcactctaaggagactgccggtgacaaaccggaggaaggtggggatgacgtcaagtcctcatggcccttatgggtagggcttcacacgtcatacaatggtcggaacagagggttgccaacccgcgagggggagctaatcccagaaaaccgatcgtagtccggattgcactctgcaactcgagtgcatgaagctggaatcgctagtaatcgcggatcagcatgccgcggtgaatacgttcccgggtcttgtacacaccgcccgtcacaccatgggagtgggttttaccagaagtggctagtctaaccgcaaggaggacggtcaccacggtaggattcatgactggggtgaagtcgtaacaaggtaaccaa

SEQ ID NO: 445 - DNA, 1538 bp, Burkholderia mallei
tgaactgaagagtttgatcctggctcagattgaacgctggcggcatgccttacacatgcaagtcgaacggcagcacgggcttcggcctggtggcgagtggtgaacgggtgagtaatacatcggaacatgtcctgtagtgggggatagcccggcgaaagccggattaataccgcatacgatctgaggatgaaagcgggggaccttcgggcctcgcgctatagggttggccgatggctgattagctagttggtggggtaaaggcctaccaaggcgacgatcagtagctggtctgagaggacgaccagccacactgggactgagacacggcccagactcctacgggaggcagcagtggggaattttggacaatgggcgcaagcctgatccagcaatgccgcgtgtgtgaagaaggccttcgggttgtaaagcacttttgtccggaaagaaatcattctggctaatacccggagtggatgacggtaccggaagaataagcaccggctaactacgtgccagcagccgcggtaatacgtagggtgcgagcgttaatcggaattactgggcgtaaagcgtgcgcaggcggtttgctaagaccgatgtgaaatccccgggctcaacctgggaactgcattggtgactggcaggctagagtatggcagaggggggtagaattccacgtgtagcagtgaaatgcgtagagatgtggaggaataccgatggcgaaggcagccccctgggccaatactgacgctcatgcacgaaagcgtggggagcaaacaggattagataccctggtagtccacgccctaaacgatgtcaactagttgttggggattcatttccttagtaacgtagctaacgcgtgaagttgaccgcctggggagtacggtcgcaagattaaaactcaaaggaattgacggggacccgcacaagcggtggatgatgtggattaattcgatgcaacgcgaaaaaccttacctacccttgacatggtcggaagcccgatgagagttgggcgtgctcgaaagagaaccggcgcacaggtgctgcatggctgtcgtcagctcgtgtcgtgagatgttgggttaagtcccgcaacgagcgcaacccttgtccttagttgctacgcaagagcactctaaggagactgccggtgacaaaccggaggaaggtggggatgacgtcaagtcctcatggcccttatgggtagggcttcacacgtcatacaatggtcggaacagagggtcgccaacccgcgagggggagccaatcccagaaaaccgatcgtagtccggattgcactctgcaactcgagtgcatgaagctggaatcgctagtaatcgcggatcagcatgccgcggtgaatacgttcccgggtcttgtacacaccgcccgtcacaccatgggagtgggttttaccagaagtggctagtctaaccgcaaggaggacggtcaccacggtaggattcatgactggggtgaagtcgtaacaaggtagccgtatcggaaggtgcggctggatcacctcctttctcgag

SEQ ID NO: 446 - DNA, 1537 bp, Burkholderia multivorans
ttgaactgaagagtttgatcctggctcagattgaacgctggcggcatgccttacacatgcaagtcgaacggcagcacgggtgcttgcacctggtggcgagtggcgaacgggtgagtaatacatcggaacatgtcctgtagtgggggatagcccggcgaaagccggattaataccgcatacgatctacggatgaaagcgggggaccttcgggcctcgcgctatagggttggccgatggctgattagctagttggtggggtaaaggcctaccaaggcgacgatcagtagctggtctgagaggacgaccagccacactgggactgagacacggcccagactcctacgggaggcagcagtggggaattttggacaatgggcgaaagcctgatccagcaatgccgcgtgtgtgaagaaggccttcgggttgtaaagcacttttgtccggaaagaaatccttggtcctaatacgatcgggggatgacggtaccggaagaataagcaccggctaactacgtgccagcagccgcggtaatacgtagggtgcgagcgttaatcggaattactgggcgtaaagcgtgcgcaggcggtctgttaagacagatgtgaaatccccgggctcaacctgggaactgcatttgtgactggcaggctagagtatggcagaggggggtagaattccacgtgtagcagtgaaatgcgtagagatgtggaggaataccgatggcgaaggcagccccctgggccaatactgacgctcatgcacgaaagcgtggggagcaaacaggattagataccctggtagtccacgccctaaacgatgtcaactagttgttggggattcatttccttagtaacgtagctaacgcgtgaagttgaccgcctggggagtacggtcgcaagattaaaactcaaaggaattgacggggacccgcacaagcggtggatgatgtggattaattcgatgcaacgcgaaaaaccttacctacccttgacatggtcggaatcctgaagagattcgggagtgctcgaaagagaaccggcgcacaggtgctgcatggctgtcgtcagctcgtgtcgtgagatgttgggttaagtcccgcaacgagcgcaacccttgtccttagttgctacgcaagagcactctaaggagactgccggtgacaaaccggaggaaggtggggatgacgtcaagtcctcatggcccttatgggtagggcttcacacgtcatacaatggtcggaacagagggttgccaacccgcgagggggagctaatcccagaaaaccgatcgtagtccggattgcactctgcaactcgagtgcatgaagctggaatcgctagtaatcgcggatcagcatgccgcggtgaatacgttcccgggtcttgtacacaccgcccgtcacaccatgggagtgggttttaccagaagtggctagtctaaccgcaaggaggacggtcaccacggtaggattcatgactggggtgaagtcgtaacaaggtagccgtatcggaaggtgcggctggatcacctcctttcc

SEQ ID NO: 447 - DNA, 1499 bp, Burkholderia oklahomensis
agattgaacgctggcggcatgccttacacatgcaagtcgaacggcagcacgggtgcttgcacctggtggcgagtggcgaacgggtgagtaatacatcggaacatgtcctgtagtgggggatagcccggcgaaagccggattaataccgcatacgatctgaggatgaaagcgggggaccttcgggcctcgcgctatagggttggccgatggctgattagctagttggtggggtaaaggcctaccaaggcgacgatcagtagctggtctgagaggacgaccagccacactgggactgagacacggcccagactcctacgggaggcagcagtggggaattttggacaatgggcgcaagcctgatccagcaatgccgcgtgtgtgaagaaggccttcgggttgtaaagcacttttgtccggaaagaaatcctaccgactaatactgggtggggatgacggtaccggaagaataagcaccggctaactacgtgccagcagccgcggtaatacgtagggtgcgagcgttaatcggaattactgggcgtaaagcgtgcgcaggcggtttgttaagaccgatgtgaaatccccgggctcaacctgggaactgcattggtgactggcaagctagagtatggcagaggggggtagaattccacgtgtagcagtgaaatgcgtagagatgtggaggaataccgatggcgaaggcagccccctgggccaatactgacgctcatgcacgaaagcgtggggagcaaacaggattagataccctggtagtccacgccctaaacgatgtcaactagttgttggggattcatttccttagtaacgtagctaacgcgtgaagttgaccgcctggggagtacggtcgcaagattaaaactcaaaggaattgacggggacccgcacaagcggtggatgatgtggattaattcgatgcaacgcgaaaaaccttacctacccttgacatggtcggaatcctgctgagaggtgggagtgctcgaaagagaaccgatacacaggtgctgcatggctgtcgtcagctcgtgtcgtgagatgttgggttaagtcccgcaacgagcgcaacccttgtccttagttgctacgcaagagcactctaaggagactgccggtgacaaaccggaggaaggtggggatgacgtcaagtcctcatggcccttatgggtagggcttcacacgtcatacaatggtcggaacagagggtcgccaacccgcgagggggagccaatcccagaaaaccgatcgtagtccggattgcactctgcaactcgagtgcatgaagctggaatcgctagtaatcgcggatcagcatgccgcggtgaatacgttcccgggtcttgtacacaccgcccgtcacaccatgggagtgggttttaccagaagtggctagtctaaccgcaaggaggacggtcaccacggtaggattcatgactggggtgaagtcgtaacaaggtagccgtatcggaaggtgcggctggatc

SEQ ID NO: 448 - DNA, 1538 bp, Burkholderia pseudomallei
tgaactgaagagtttgatcctggctcagattgaacgctggcggcatgccttacacatgcaagtcgaacggcagcacgggcttcggcctggtggcgagtggcgaacgggtgagtaatacatcggaacatgtcctgtagtgggggatagcccggcgaaagccggattaataccgcatacgatctgaggatgaaagcgggggaccttcgggcctcgcgctatagggttggccgatggctgattagctagttggtggggtaaaggcctaccaaggcgacgatcagtagctggtctgagaggacgaccagccacactgggactgagacacggcccagactcctacgggaggcagcagtggggaattttggacaatgggcgcaagcctgatccagcaatgccgcgtgtgtgaagaaggccttcgggttgtaaagcacttttgtccggaaagaaatcattctggctaatacccggagtggatgacggtaccggaagaataagcaccggctaactacgtgccagcagccgcggtaatacgtagggtgcgagcgttaatcggaattactgggcgtaaagcgtgcgcaggcggtttgctaagaccgatgtgaaatccccgggctcaacctgggaactgcattggtgactggcaggctagagtatggcagaggggggtagaattccacgtgtagcagtgaaatgcgtagagatgtggaggaataccgatggcgaaggcagccccctgggccaatactgacgctcatgcacgaaagcgtggggagcaaacaggattagataccctggtagtccacgccctaaacgatgtcaactagttgttggggattcatttccttagtaacgtagctaacgcgtgaagttgaccgcctggggagtacggtcgcaagattaaaactcaaaggaattgacggggacccgcacaagcggtggatgatgtggattaattcgatgcaacgcgaaaaaccttacctacccttgacatggtcggaagcccgatgagagttgggcgtgctcgaaagagaaccggcgcacaggtgctgcatggctgtcgtcagctcgtgtcgtgagatgttgggttaagtcccgcaacgagcgcaacccttgtccttagttgctacgcaagagcactctaaggagactgccggtgacaaaccggaggaaggtggggatgacgtcaagtcctcatggcccttatgggtagggcttcacacgtcatacaatggtcggaacagagggtcgccaacccgcgagggggagccaatcccagaaaaccgatcgtagtccggattgcactctgcaactcgagtgcatgaagctggaatcgctagtaatcgcggatcagcatgccgcggtgaatacgttcccgggtcttgtacacaccgcccgtcacaccatgggagtgggttttaccagaagtggctagtctaaccgcaaggaggacggtcaccacggtaggattcatgactggggtgaagtcgtaacaaggtagccgtatcggaaggtgcggctggatcacctcctttctcgag

SEQ ID NO: 449 - DNA, 1474 bp, Burkholderia rhizoxinica
gttgatcctggctcagattgaacgctggcggcatgccttacacatgcaagtcggacggcagcgcgggtttcggcctggcggcgagtggcgaacgggtgagtaagacatcggaacgtgtcctggagtgggggatagcccggcgaaagccggattaataccgcatacgctctgaggaggaaagcgggggaccttagggcctcgcgctcaaggggcggccgatggcagattagctagttggtagggtaaaggcctaccaaggcgacgatctgtagctggtctgagaggacgaccagccacactgggactgagacacggcccagactcctacgggaggcagcagtggggaattttggacaatgggggcaaccctgatccagcaatgccgcgtgtgtgaagaaggccttcgggttgtaaagcacttttgtccggaaagaaaacggcctggctaatacctgggctggatgacggtaccggaagaataagcaccggctaactacgtgccagcagccgcggtaatacgtagggtgcgagcgttaatcggaattactgggcgtaaagcgtgcgcaggcggtttgctaagaccgatgtgaaatccccgggcttaacctgggaactgcattggtgactggcaggctagagtatggcagagggaggtagaattccacgtgtagcagtgaaatgcgtagagatgtggaggaataccgatggcgaaggcagcctcctgggccaatactgacgctcatgcacgaaagcgtggggagcaaacaggattagataccctggtagtccacgccctaaacgatgtcaactagttgttggggattcatttccttagtaacgtagctaacgcgtgaagttgaccgcctggggagtacggtcgcaagattaaaactcaaaggaattgacggggacccgcacaagcggtggatgatgtggattaattcgatgcaacgcgaaaaaccttacctacccttgacatggtcggaaccctgctgagaggtgggggtgctcgaaagagaaccggcgcacaggtgctgcatggctgtcgtcagctcgtgtcgtgagatgttgggttaagtcccgcaacgagcgcaacccttgtccttagttgctacgcaagagcactctagggagactgccggtgacaaaccggaggaaggtggggatgacgtcaagtcctcatggcccttatgggtagggcttcacacgtcatacaatggtcggaacagagggttgccaacccgcgagggggagctaatcccagaaaaccgatcgtagtccggattgcagtctgcaactcgactgcatgaagctggaatcgctagtaatcgcggatcagcatgtcgcggtgaatacgttcccgggtcttgtacacaccgcccgtcacaccatgggagtgggttttaccagaagtggctagtctaaccgcaaggaggacggtcaccacggtaggattcatgactggggtgaagtc

SEQ ID NO: 450 - DNA, 1537 bp, Burkholderia sp.
  383
ttaaactgaagagtttgatcctggctcagattgaacgctggcggcatgccttacacatgcaagtcgaacggcagcacgggtgcttgcacctggtggcgagtggcgaacgggtgagtaatacatcggaacatgtcctgtagtgggggatagcccggcgaaagccggattaataccgcatacgatctacggatgaaagcgggggaccttcgggcctcgcgctatagggttggccgatggctgattagctagttggtggggtaaaggcctaccaaggcgacgatcagtagctggtctgagaggacgaccagccacactgggactgagacacggcccagactcctacgggaggcagcagtggggaattttggacaatgggcgaaagcctgatccagcaatgccgcgtgtgtgaagaaggccttcgggttgtaaagcacttttgtccggaaagaaatccttggccctaatacggtcgggggatgacggtaccggaagaataagcaccggctaactacgtgccagcagccgcggtaatacgtagggtgcgagcgttaatcggaattactgggcgtaaagcgtgcgcaggcggtttgctaagaccgatgtgaaatccccgggctcaacctgggaactgcattggtgactggcaggctagagtatggcagaggggggtagaattccacgtgtagcagtgaaatgcgtagagatgtggaggaataccgatggcgaaggcagccccctgggccaatactgacgctcatgcacgaaagcgtggggagcaaacaggattagataccctggtagtccacgccctaaacgatgtcaactagttgttggggattcatttccttagtaacgtagctaacgcgtgaagttgaccgcctggggagtacggtcgcaagattaaaactcaaaggaattgacggggacccgcacaagcggtggatgatgtggattaattcgatgcaacgcgaaaaaccttacctacccttgacatggtcggaattccgctgagaggtggaagtgctcgaaagagaaccggcgcacaggtgctgcatggctgtcgtcagctcgtgtcgtgagatgttgggttaagtcccgcaacgagcgcaacccttgtccttagttgctacgcaagagcactctaaggagactgccggtgacaaaccggaggaaggtggggatgacgtcaagtcctcatggcccttatgggtagggcttcacacgtcatacaatggtcggaacagagggtcgccaacccgcgagggggagctaatcccagaaaaccgatcgtagtccggattgcactctgcaactcgagtgcatgaagctggaatcgctagtaatcgcggatcagcatgccgcggtgaatacgttcccgggtcttgtacacaccgcccgtcacaccatgggagtgggttttaccagaagtggctagtctaaccgcaaggaggacggtcaccacggtaggattcatgactggggtgaagtcgtaacaaggtagccgtatcggaaggtgcggctggatcacctcctttct

SEQ ID NO: 451 - DNA, 1462 bp, Burkholderia xenovorans
gaacgctggcggcatgccttacacatgcaagtcgaacggcagcacgggggcaaccctggtggcgagtggcgaacgggtgagtaatacatcggaacgtgtcctgtagtgggggatagcccggcgaaagccggattaataccgcatacgctctgcggaggaaagcgggggatcttcggacctcgcgctacaggggcggccgatggcagattagctggttggtggggtaaaggcctaccaaggcgacgatctgtagctggtctgagaggacgaccagccacactgggactgagacacggcccagactcctacgggaggcagcagtggggaattttggacaatgggcgcaagcctgatccagcaatgccgcgtgtgtgaagaaggccttcgggttgtaaagcacttttgtccggaaagaaaacctctgccctaatacggtggggggatgacggtaccggaagaataagcaccggctaactacgtgccagcagccgcggtaatacgtagggtgcaagcgttaatcggaattactgggcgtaaagcgtgcgcaggcggttcgctaagacagatgtgaaatccccgggcttaacctgggaactgcatttgtgactggcgggctagagtatggcagaggggggtagaattccacgtgtagcagtgaaatgcgtagagatgtggaggaataccgatggcgaaggcagccccctgggccaatactgacgctcatgcacgaaagcgtggggagcaaacaggattagataccctggtagtccacgccctaaacgatgtcaactagttgtcgggtcttcattgacttggtaacgtagctaacgcgtgaagttgaccgcctggggagtacggtcgcaagattaaaactcaaaggaattgacggggacccgcacaagcggtggatgatgtggattaattcgatgcaacgcgaaaaaccttacctacccttgacatgtatggaagtctgctgagaggtggatgtgcccgaaagggagccataacacaggtgctgcatggctgtcgacagctcgtgtcgtgagatgttgggttaagtcccgcaacgagcgcaccccttgtccctagttgctacgcaagagcactccagggagactgccggtgacaacccggaggaaggtggggatgacgtcaagtcctcatggcccttatgggtagggcttcacacgtcatacaatggtcggaacagagggtcgccaacccgcgagggggagccaatcccagaaaaccgatcgtagtccggatcgcactctgcaactcgggtgcgtgaagctggaatcgctagtaatcgcggatcagcatgccgcggtgaatacgttcccgggtcttgtacacaccgcccgtcacaccatgggagtgggttttaccagaagtggctagtctaaccgcaaggaggacggtcaccacggtaggattcatgactgggtgaagtcgtaacaag

SEQ ID NO: 452 - DNA, 1543 bp, Burkholderiales bacterium 1_1_47
ttaaacaatagagtttgatcctggctcagattgaacgctggcggaacgctttacacatgcaagtcgaacggtaacgcgggagaagcttgcttctcccggcgacgagtggcgaacgggtgagtaatacatcggaacgtgtccgctcgtgggggacaaccagccgaaaggttggctaataccgcatgagttctacggaagaaagagggggacccgcaagggcctctcgcgagcggagcggccgatgactgattagccggttggtgaggtaacggctcaccaaagcaacgatcagtagctggtctgagaggacgaccagccacactgggactgagacacggcccagactcctacgggaggcagcagtggggaattttggacaatgggcgcaagcctgatccagctattccgcgtgtgggatgaaggccctcgggttgtaaaccacttttgtagagaacgaaaagacaccttcgaataaagggtgttgctgacggtactctaagaataagcaccggctaactacgtgccagcagccgcggtaatacgtagggtgcgagcgttaatcggaattactgggcgtaaagggtgcgcaggcggttgagtaagacagatgtgaaatccccgagcttaactcgggaatggcatatgtgactgctcgactagagtgtgtcagagggaggtggaattccacgtgtagcagtgaaatgcgtagatatgtggaagaacaccgatggcgaaggcagcctcctgggacataactgacgctcaggcacgaaagcgtggggagcaaacaggattagataccctggtagtccacgccctaaacgatgttaactagttgttgggaagtaaaattctcagtaacgcagccaacgcgagaagttaaccgcctgggaagtacggtcgcaagactaaaactcaaaggaattgacggggacccgcacaagcggtggatgatgtggattaattcgatgcaacgcgaaaaaccttacctacccttgacatgtcaggaagctcttgtaatgagagtgtgcccgcaagggagcctgaacacaggtgctgcatggctgtcgtcagctcgtgtcgtgagatgttgggttaagtcccgcaacgagcgcaacccttgtcactagttgctacgaaagggcactctagtgagactgccggtgacaaaccggaggaaggtggggatgacgtcaagtcctcatggcccttatgggtagggcttcacacgtcatacaatggtcggaacagagggcagcgaagtcgtgagacggagccaatcccagaaaaccgatcgtagtccggattgcagtctgcaactcgactgcatgaagtcggaatcgctagtaatcgcggatcagcatgccgcggtgaatacgttcccgggtcttgtacacaccgcccgtcaaacaatgggagtggtgtttaccagaagtcgttagcctaaccgcaaggagggcggcgaccacggtgagcaccgtgactaatgttaagtcgtaacaaggtagccgtaccggaaggtgcggctggatcacctcctttc

SEQ ID NO: 453 - DNA, 1481 bp, Butyricicoccus pullicaecorum
agtttgatcctggctcaggatgaacgctggcggcgtgcctaacacatgcaagtcgaacggagttgtttgaggaaatccttcgggatggaatcttccaacttagtggcggacgggtgagtaacgcgtgagcaatctgcctttcagagggggataacagccggaaacggctgctaataccgcataatgcattgaattcgcatgtttttgatgccaaagattttatcgctgaaagatgagctcgcgtctgattagctagttggcggggtaacggcccaccaaggcgacgatcagtagccggactgagaggttgaacggccacattgggactgaggacacggcccagactcctaccgggaggcagcagtggggaatattgcgcaatgggggcaaccctgacgcagcaacgccgcgtgattgatgaaggtcttcggattgtaaaaatctttaatcagggacgaaacaaatgacggtacctgaagaataagctccggctaactacgtgccagcagccgcggtaatacgtagggagcaagcgttatccggatttactgggtgtaaagggcgtgtaggcgggcttgtaagttggaagtgaaatctcggggcttaaccccgaaactgctttcaaaactgcgagtcttgagtgatggagaggcaggcggaattcccagtgtagcggtgaaatgcgtagatattgggaggaacaccagtggcgaaggcggcctgctggacattaactgacgctgaggcgcgaaagcgtggggagcaaacaggattagataccctggtagtccacgccgtaaacgatggatactaggtgtgggaggtattgaccccttccgtgccggagttaacacaataagtatcccacctggggagtacggccgcaaggttgaaactcaaaggaattgacgggggcccgcacaagcagtggagtatgtggtttaattcgaagcaacgcgcaagaaccttaccaagtcttgacatcccgatgaccgctcyagagatagggcttttcttcggaacatcggtgacaggtggtgcatggttgtcgtcagctcgtgtcgtgagatgttgggttaagtcccgcaacgagcgcaacccttacgggttagttgctacgcaagagcactctagccggactgccgttgacaaaacggaggaaggtggggacgacgtcaaatcatcatgccccttatgacttgggctacacacgtactacaatggcagtcatacagagggaagcaaaaccgcgaggtggagcaaatccctaaaagctgtcccagttcagattgcaggctgcaactcgcctgcatgaagtcggaattgctagtaatcgcggatcagcatgccgcggtgaatacgttcccgggccttgtacacaccgcccgtcacaccatgagagccggtaatacccgaagtccgtagtctaaccgcaaggaggacgcggccgaaggtaggactggtaattgggacgaagtcgt

SEQ ID NO: 454 - DNA, 1379 bp, Butyricimonas virosa
  modified_base (14)..(14): a, c, t, g, unknown or other
ggggcagcgcgggnagtagcaatactctcgccggcgaccggcgcacgggtgagtaacacgtgtgcaaccaaccccgtaccgggagataacccgcggaaacgtggactaacatcccataagactctagagccgcatggctctggatttaaaattccggtggtacgggacgggcacgcgcgacattaggtagttggcggggtaacggcccaccaagccgacgatgtctaggggttctgagaggaaggtcccccacactggaactgagacacggtccagactcctacgggaggcagcagtgaggaatattggtcaatgggcgagagcctgaaccagccaagtcgcgtgagggaagaatggtctatggcctgtaaacctcttttgtcaaggaagaataaaaggtacgtgtaccttcttgccagtacttgacgaataagcatcggctaactccgtgccagcagccgcggtaatacgggggatgcgagcgttatccggatttattgggtttaaagggcgcgtaggcgggacccaagtcagcggtaaaagactgcagctaaactgtagcacgccgttgaaactggcgacctcgagacgagacgagggaggcggaacaagtgaagtagcggtgaaatgcttagatatcacttggaaccccgatagcgaaggcagcttcccaggctcgatctgacgtgatgcgcgagagcgtgggtagcgaacaggattagataccctggtagtccacgccgtaaacgatgctcactggatcttggcgatacactgccagggttcaagcgaaagtattaagtgagccacctggggagtacgtcggcaacgatgaaactcaaaggaattgacgggggcccgcacaagcggaggaacatgtggtttaattcgatgatacgcgaggaaccttacccgggtttaaatgtattttgcatttcttggaaacaggaattcccttcggggctagatacaaggtgctgcatggttgtcgtcagctcgtgccgtgaggtgtcgggttaagtcccataacgagcgcaacccctatcgccagttgccagcggctgaggccgggcactctgtcgagactgccaccgtaaggtgcgaggaaggcggggatgacgtcaaatcagcacggcccttacacccggggcgacacacgtgttacaatggccggtacagagggcagccacggggtgacccggagcgaatctctaaagccggtcgtagttcggactggagtctgcaacccgactccacgaagttggattcgctagtaatcgcgcatcagccatggcgcggtgaatacgttcccgggccttgtacacaccgcccgtcaagccatggaagccgggagtacctgaagatcgtgaccgcgagga

SEQ ID NO: 455 - DNA, 1526 bp, Butyrivibrio crossotus
tttatatgagagtttgatcctggctcaggatgaacgctggcggcgtgcttaacacatgcaagtcgaacgaagcacttcataaagcttgctttaagaagtgacttagtggcggacgggtgagtaacgcgtgggtaacctgccttacacagggggataacagttagaaatgactgctaataccgcataaaacagcagagtcgcatgactcaactgtcaaagatttatcggtgtaagatggacccgcgtctgattagcttgttggtggggtaacggcctaccaaggcgacgatcagtagccggcctgagagggtgaacggccacattgggactgagacacggcccaaactcctacgggaggcagcagtggggaatattggacaatgggcgaaagcctgatccagcgacgccgcgtgagcgatgaagtatttcggtatgtaaagctctatcagcagggaagaaaacgacggtacctgactaagaagccccggctaactacgtgccagcagccgcggtaatacgtagggggcaagcgttatccggatttactgggtgtaaagggagcgtagacggcatcacaagtcagaagtgaaaatccggggctcaaccccggaactgcttttgaaactgtggagctggagtgcaggagaggtaagcggaattcctagtgtagcggtgaaatgcgtagatattaggaggaacaccagtggcgaaggcggcttactggactgtaactgacgttgaggctcgaaagcgtggggagcaaacaggattagataccctggtagtccacgccgtaaacgatgaatactaggtgttgggtttcataagaagctcggtgccggcgcaaacgcattaagtattccacctggggagtacgttcgcaagaatgaaactcaaaggaattgacggggacccgcacaagcggtggagcatgtggtttaattcgaagcaacgcgaagaaccttaccaagtcttgacatcccgttgacctgttatgtaatgtaacatctcttcggagcaacggagacaggtggtgcatggttgtcgtcagctcgtgtcgtgagatgttgggttaagtcccgcaacgagcgcaacccttgtccttagtagccagcagtaagatgggcactctagggagactgccggggataactcggaggaaggtggggacgacgtcaaatcatcatgccccttatgacttgggctacacacgtgctacaatggcgtaaacaaagggaagcgaacctgtgaaggcaagcaaatcccaaaaataacgtctcagttcggattgtagtctgcaactcgactacatgaagctggaatcgctagtaatcgcagatcagaatgctgcggtgaatacgttcccgggtcttgtacacaccgcccgtcacaccatgggagtcgtaaatgcccgaagtcggtgacctaaccgtaaggaaggagccgccgaaggcaggtatgataactggggtgaagtcgtaacaaggtagccgtatcggaaggtgcggctggatcacctcctttct

SEQ ID NO: 456 - DNA, 1477 bp, Butyrivibrio fibrisolvens
tggcggcgtgcctaacacatgcaagtcgaacggagttattcgctgatgaagcttcggcagaatcttgaataacttagtggcggacgggtgagtaacgcgtgggtaacctgcctcatacagggggatagcagttggaaacgactgataacaccgcataagcgcacagtgtcgcatgacacagtgtgaaaatatttataggtatgagatggacccgcgtctgattagctagttggtgaggtaacggcccaccaaggcgacgatcagtagccggcctgagagggcggacggccacattgggactgagacacggcccaaactcctacgggaggcagcagtgggggatattgcacaatgggcgaaagcctgatgcagcgacgccgcgtgagtgaagaagtatttcggtatgtaaagctctatcagcagggaagaaagacctcgtaagaggggatgacggtacctgagtaagaagccccggctaactacgtgccagcagccgcggtaatacgtagggggcaagcgttatccggatttactgggtgtaaagggagcgtagacggtgtatcaagtctgaagtgaaaccccacggctcaaccgtgggcttgctttggaaactggtagactagagtactggagaggtaagcggaattcctggtgtagtagtgaaatgcgtagatatcaggaagaacatcagtggcgaaggcggcttactggacagcaactgacgttgaggctcgaaagcgtggggagcaaacaggattagataccctggtagtccacgccgtaaacgatgaatactaggtgttgggagacatagtctttcagtgccggcgctaacgcaataagtattccacctggggagtacgttcgcaagaatgaaactcaaaggaattgacggggacccgcacaagcggtggagcatgtggtttaattcgaagcaacgcgaagaaccttaccaaatcttgagatccagatgaatgatgggtaatgccatcagtccttcgggacatctgagacaggtggtgcatggttgtcgtcagctcgtgtcgtgagatgttgggtcaagtcccgcaacgagcgcaacccttgtccatagtagccagcagtaagatgggcactctatggagactgccagggataacctggaggaaggtggggatgacgtcaaatcatcatgccccttatgatttgggccacacacgtgctacaatgtcgtaacaaagggaagcaaccctgcgaaggtgagcaaatcccaaaaataacgacccagttcggactgtaggctgcaacccgcctgcacgaagctggaatcgctagtaatcgcagatcagaatgctgcggtgaatacgttcccgggtcttgtacacaccgcccgtcacaccatgggagtcggaaatgcccaaagtcagtggcctaaccgtaaggagggagcttgctaaggcaggtcggataactggggtgaagtcgtaacaaggtagcc

SEQ ID NO: 457 - DNA, 1466 bp, Caldimonas manganoxidans
attgaacgctggcggcatgctttacacatgcaagtcgaacggcagcgggtccttcgggatgccggcgagtggcgaacgggtgagtaatgcatcggaacgtacccagtcgtgggggataactactcgaaagagtagctaataccgcatacgacctgagggtgaaagcgggggaccgcaaggcctcgcgcgattggagcggccgatgtcggattagctagttggtggggtaaaggcttaccaaggcgacgatccgtagctggtctgagaggacggccagccacactgggactgagacacggcccagactcctacgggaggcagcagtggggaattttggacaatgggcgcaagcctgatccagccatgccgcgtgcgggaagaaggccttcgggttgtaaaccgcttttgtcagggaagaaaagctctgggctaatacctcggagtgatgacggtacctgaagaataagcaccggctaactacgtgccagcagccgcggtaatacgtagggtgcgagcgttaatcggaattactgggcgtaaagcgtgcgcaggcggttgtgcaagacagatgtgaaatccccgggcttaacctgggaactgcatttgtgactgcacggctagagtgcggcagagggggatggaattccgcgtgtagcagtgaaatgcgtagatatgcggaggaacaccgatggcgaaggcagtcccctgggcctgcactgacgctcatgcacgaaagcgtggggagcaaacaggattagataccctggtagtccacgccctaaacgatgtcaactggttgttggggattcatttcctcagtaacgaagctaacgcgtgaagttgaccgcctggggagtacggccgcaaggttgaaactcaaaggaattgacggggacccgcacaagcggtggatgatgtggtttaattcgatgcaacgcgaaaaaccttacctacccttgacatgccaggaaccctgcagagatgtgggggtgctcgaaagagagcctggacacaggtgctgcatggccgtcgtcagctcgtgtcgtgagatgttgggttaagtcccgcaacgagcgcaacccttgccattagttgctacgaaagggcactctaatgggactgccggtgacaaaccggaggaaggtggggatgacgtcaggtcctcatggcccttatgggtagggctacacacgtcatacaatggccggtacagagggctgccaacccgcgagggggagccaatcccagaaaaccggtcgtagtccggatcgcagtctgcaactcgactgcgtgaagtcggaatcgctagtaatcgcggatcagcatgtcgcggtgaatacgttcccgggtcttgtacacaccgcccgtcacaccatgggagcgggttctgccagaagtgggtagcctaaccgcaaggagggcgcttaccacggcagggttcgtgactggggtgaagtcgtaacaag

SEQ ID NO: 458 - DNA, 1456 bp, Caminicella sporogenes
tgatcatggctcaggatgaacgctggcggcgtgcctaacacatgcaagtcgagcggagctttaatcttttcagcttagctgaaaagattaaagcttagcggcggacgggtgagtaacgcgtgggcaacctgccctgtgcagggggataacacatcgaaaggtgtgctaataccccataagactacgatgtcgcatggcatagtagtaaaagctgaggcggcacaggatgggcccgcgtctgattagctagttggtagggtaacggcctaccaaggcaacgatcagtagccgacctgagagggtgaacggccacactggaactgagacacggtccagactcctacgggaggcagcagtggggaatattgcacaatgggggaaaccctgatgcagcaacgccgcgtgagcgaagaaggccttcgggtcgtaaagctctgtcctaagggaagaaagatgacggtaccttaggaggaagccccggctaactacgtgccagcagccgcggtaaaacgtagggggcgagcgttatccggaatgactgggcgtaaagggtgtgtaggcggccggtaaagtctggggtgaaaggctacggcttaaccgtagtaagccttggaaacttatcggcttgagtgcaggagaggagagcggaattcctagtgtagcggtgaaatgcgtagatattaggaggaacaccagtggcgaaggcggctctctggactgcaactgacgctgaggcacgaaagcgtggggagcgaacaggattagataccctggtagtccacgccgtaaacgatgagtgctaggtgttggaggttcatactttcagtgccgcagttaacgcattaagcactccgcctggggagtacggtcgcaagactgaaactcaaaggaattgacggggacccgcacaagcagcggagcatgtggtttaattcgaagcaacgcgaagaaccttaccaggacttgacatccctgtgacagcttcttaatcgaagccttcccttcggggacacaggagacaggtggtgcatggttgtcgtcagctcgtgtcgtgagatgttgggttaagtcccgcaacgagcgcaacccttgtctttagttgccagcacttagggtgggcactctaaagagactgccggtgataaaccggaggaaggtgggggatgacgtcaaatcatcatgccccttatgttctgggctacacacgtgctacaatggctggtacaaagggaagcgaaggagtaatccggagcgaatcccaaaaagccagtcccagttcggattgtgggctgcaactcgcccacatgaagccggagttgctagtaatcgcgaatcagaatgtcgcggtgaatacgttcccgggtcttgtacacaccgcccgtcacaccatgggagcccatggcacccgaagtcagtgagtcaaccgtaaaggagacagctgccgaaggtgaaatgg

SEQ ID NO: 459 - DNA, 1517 bp, Campylobacter coli
tttttatggagagtttgatcctggctcagagtgaacgctggcggcgtgcctaatacatgcaagtcgaacgatgaagcttctagcttgctagaagtggattagtggcgcacgggtgagtaaggtatagttaatctgccctacacaagaggacaacagttggaaacgactgctaatactctatactcctgcttaacacaagttgagtagggaaagtttttcggtgtaggatgagactatatagtatcagctagttggtaaggtaatggcttaccaaggctatgacgcttaactggtctgagaggatgatcagtcacactggaactgagacacggtccagactcctacgggaggcagcagtagggaatattgcgcaatgggggaaaccctgacgcagcaacgccgcgtggaggatgacacttttcggagcgtaaactccttttcttagggaagaattctgacggtacctaaggaataagcaccggctaactccgtgccagcagccgcggtaatacggagggtgcaagcgttactcggaatcactgggcgtaaagggcgcgtaggcggattatcaagtctcttgtgaaatctaatggcttaaccattaaactgcttgggaaactgatagtctagagtgagggagaggcagatggaattggtggtgtaggggtaaaatccgtagatatcaccaagaatacccattgcgaaggcgatctgctggaactcaactgacgctaaggcgcgaaagcgtggggagcaaacaggattagataccctggtagtccacgccctaaacgatgtacactagttgttggggtgctagtcatctcagtaatgcagctaacgcattaagtgtaccgcctggggagtacggtcgcaagattaaaactcaaaggaatagacggggacccgcacaagcggtggagcatgtggtttaattcgaggatacgcgaagaaccttacctgggcttgatatcctaagaaccttttagagataagagggtgctagcttgctagaacttagagacaggtgctgcacggctgtcgtcagctcgtgtcgtgagatgttgggttaagtcccgcaacgagcgcaacccacgtatttagttgctaacggttcggccgagcactctaaatagactgccttcgtaaggaggaggaaggtgtggacgacgtcaagtcatcatggcccttatgcccagggcgacacacgtgctacaatggcatatacaatgagacgcaataccgcgaggtggagcaaatctataaaatatgtcccagttcggattgttctctgcaactcgagagcatgaagccggaatcgctagtaatcgtagatcagccatgctacggtgaatacgttcccgggtcttgtactcaccgcccgtcacaccatgggagttgatttcactcgaagccggaatactaaactagttaccgtccacagtggaatcagcgactggggtgaagtcgtaacaaggtaaccgtaggagaacctgcggttggatcacctcctttct

SEQ ID NO: 460 - DNA, 1458 bp, Campylobacter concisus
aatatggagagtttgatcctggctcagagtgaacgctggcggcgtgcctaatacatgcaagtcgaacggacaagtaagagcttgctcttatgagttagtggcgcacgggtgagtaatgtatagctaatctgccctacactagaggacaacagttggaaacgactgctaatactctatactcctgtcttacataagttagatagggaaagtttttcggtgtaggatgaggctatattgtatcagctagttggtgaggtaatggctcaccaaggctatgacgcataactggtctgagaggatgatcagtcacactggaactgagacacggtccagactcctacgggaggcagcagtagggaatattgctcaatgggggaaaccctgaagcagcaacgccgcgtggaggatgacacttttcggagcgtaaactccttttgttagggaagaacaatgacggtacctaacgaataagcaccggctaactccgtgccagcagccgcggtaatacggagggtgcaagcgttactcggaatcactgggcgtaaaggacgcgtaggcggattatcaagtctcttgtgaaatcctatggcttaaccatagaactgcttgggaaactgataatctagagtgagggagaggcagatggaattggtggtgtaggggtaaaatccgtagagatcaccaggaatacccattgcgaaggcgatctgctggaactcaactgacgctaatgcgtgaaagcgtggggagcaaacaggattagataccctggtagtccacgccctaaacgatgtatactagttgttgctaagctagtcttggcagtaatgcacctaacggattaagtataccgcctggggagtacggtcgcaagattaaaactcaaaggaatagacggggacccgcacaagcggtggagcatgtggtttaattcgaagatacgcgaagaaccttacccggacttgatatctaacaaatcatctagagatagaagagtgtctgcttgcagaaatgttaagacaggtgctgcacggctgtcgtcagctcgtgtcgtgagatgttgggttaagtcccgcaacgagcgcaacccacgtcattagttgctaacagttcggctgagcactctaatgagactgccttcgtaaggaggaggaaggtgtggacgacgtcaagtcatcatggcccttatgtccggggcgacacacgtgctacaatggcatatacaatgagaagcaatatcgcgagatggagcaaatctataaaatatgtcccagttcggattggagtctgcaactcgactccatgaagccggaatcgctagtaatcgtagatcagccatgctacggtgaatacgttcccgggtcttgtactcaccgcccgtcacaccatgggagttgatttcactcgaagccggaatactaaattagttaccgtccacagtggaatcagcgactgggg

SEQ ID NO: 461 - DNA, 1355 bp, Campylobacter curvus
gtctgcgaagtcgtaatatttaattgcgaagcaagtaaatattacatagggtttctcgctatgggatgaggctatatcgtatcagctagttggtagggtaatggcttaccaaggctatgacgcgtaactggtctgagaggatgatcagtcacactggaactgagacacggtccagactcctacgggaggcagcagtagggaatattgctcaatgggggaaaccctgaagcagcaacgccgcgtggaggatgacacttttcggagcgtaaactccttttcttggggaagaaatttgacggtacccaaggaataagcaccggctaactccgtgccagcagccgcggtaatacggagggtgcaagcgttactcggaatcactgggcgtaaaggacgcgtaggcggattatcaagtctcttgtgaaatccaatggcttaaccattgaactgcttgagaaactgataatctagagtgagggagaggcagatggaattggtggtgtaggggtaaaatccgtagagatcaccaggaatacccattgcgaaggcgatctgctggaactcaactgacgctaatgcgtgaaagcgtggggagcaaacaggattagataccctggtagtccacgccctaaacgatgtatactagttgttgctaagctagtcttggcagtaatgcacctaacggattaagtataccgcctggggagtacggtcgcaagattaaaactcaaaggaatagacggggacccgcacaagcggtggagcatgtggtttaattcgaagatacgcgaagaaccttacccggacttgatatctaacaaatcatctagagatagaagagtgtctgcttgcagaaatgttaagacaggtgctgcacggctgtcgtcagctcgtgtcgtgagatgttgggttaagtcccgcaacgagcgcaacccacgtcattagttgctaacggttcggccgagcactctaatgagactgccttcgcaaggaggaggaaggtgtggacgacgtcaagtcatcatggcccttatgtccggggcgacacacgtgctacaatggcatatacaatgagacgcaatatcgcgagatggagcaaatctataaaatatgtcccagttcggattggagtctgcaactcgactccatgaagccggaatcgctagtaatcgtagatcagccatgctacggtgaatacgttcccgggtcttgtactcaccgcccgtcacaccatgggagttgatttcactcgaagcccaaataccaaaccggttatggtccacagtggaatcagcgactggggtgaagtcgtaacaaggtaaccgtaggagaacctgcggttggatcacctcctttct

SEQ ID NO: 462 - DNA, 1521 bp, Campylobacter fetus
tttttatggagagtttgatcctggctcagagtgaacgctggcggcgtgcctaatacatgcaagtcgaacggagtattaagagagcttgctcttttaatacttagtggcgcacgggtgagtaatgtatagttaatctgccctacactggaggacaacagttagaaatgactgctaatactccatactccttcttaacataagttaagtcgggaaagtttttcggtgtaggatgagactatattgtatcagctagttggtaaggtaatggcttaccaaggctttgacgcataactggtctgagaggatgatcagtcacactggaactgagacacggtccagactcctacgggaggcagcagtagggaatattgctcaatgggggaaaccctgaagcagcaacgccgcgtggaggatgacacttttcggagcgtaaactccttttgttagggaagaaccatgacggtacctaacgaataagcaccggctaactccgtgccagcagccgcggtaatacggagggtgcaagcgttactcggaatcactgggcgtaaaggacgcgtaggcggattatcaagtcttttgtgaaatctaacagcttaactgttaaactgcttgagaaactgataatctagagtgagggagaggcagatggaattggtggtgtaggggtaaaatccgtagagatcaccaggaatacccattgcgaaggcgatctgctggaactcaactgacgctaatgcgtgaaagcgtggggagcaaacaggattagataccctggtagtccacgccctaaacgatgtatactagttgttgctgtgctagtcacggcagtaatgcacctaacggattaagtataccgcctggggagtacggtcgcaagattaaaactcaaaggaatagacggggacccgcacaagcggtggagcatgtggtttaattcgaagatacgcgaagaaccttacctgggcttgatatccaactaatctcttagagataagagagtgctagcttgctagaaagttgagacaggtgctgcacggctgtcgtcagctcgtgtcgtgagatgttgggttaagtcccgcaacgagcgcaacccacgtatttagttgctaacagttcggctgagcactctaaatagactgccttcgcaaggaggaggaaggtgtggacgacgtcaagtcatcatggcccttatgcccagggcgacacacgtgctacaatggcatatacaatgagatgcaatatcgcgagatggagcaaatctataaaatatgtcccagttcggattggagtctgcaactcgactccatgaagccggaatcgctagtaatcgtagatcagccatgctacggtgaatacgttcccgggtcttgtactcaccgcccgtcacaccatgggagttgatttcactcgaagtcggaatgctaaactagctaccgcccacagtggaatcagcgactggggtgaagtcgtaacaaggtaaccgtaggagaacctgcggttggatcacctcctttctag

SEQ ID NO: 463 - DNA, 1515 bp, Campylobacter gracilis
aatatggagagtttgatcctggctcagagtgaacgctggcggcgtgcctaatacatgcaagtcgaacggaatttaagagagcttgctcttttaaatttagtggcgcacgggtgagtaatatatagctaatctgccccttgctggaggacaacagttagaaatgactgctaatactccatactcctttttaccataagataaatcgggaaagaatttcggcaagggatgagactatatcgtatcagctagtcggtggggtaacggcctaccgaggctatgacgcgtaactggtctgagaggatgatcagtcacattggaactgagacacggtccaaactcctacgggaggcagcagtagggaatattgcgcaatgggggaaaccctgacgcagcaacgccgcgtggaggatgacacttttcggagcgtaaactccttttgttagggaagaataatgacggtacctaacgaataagcaccggctaactccgtgccagcagccgcggtaatacggagggtgcaagcgttactcggaatcactgggcgtaaaggacgcgtaggcggattatcaagtctcttgtgaaatctaacggcttaaccgttaaactgcttgggaaactgataatctagagtaagggagaggcagatggaattcttggtgtaggggtaaaatccgtagatatcaagaagaatacctattgcgaaggcgatctgctggaacttaactgacgctaatgcgtgaaagcgtggggagcaaacaggattagataccctggtagtccacgccctaaacgatgtataccggttgttgctgtgctagtcacggcagtaatccacctaacggattaagtataccgcctggggagtacggtcgcaagattaaaactcaaaggaatagacggggacccgcacaagcggtggagcatgtggtttaattcgaagatacgcgaagaaccttacccggacttgatatctaacaaatcatccagagatggaagagtgtctgcttgcagaaatgttaagacaggtgctgcacggctgtcgtcagctcgtgtcgtgagatgttgggttaagtcccgcaacgagcgcaacccacgtcattagttgctaacggttcggccgagcactctaatgagactgccttcgtaaggaggaggaaggtgtggacgacgtcaagtcatcatggcccttatgtccggggcgacacacgtgctacaatggcatatacaataagacgcaatatcgtaagatggagcaaatctaaaaaatatgtcccagttcggattggagtctgcaactcgactccatgaagccggaatcgctagtaatcgtagatcagccatgctacggtgaatacgttcccgggtcttgtactcaccgcccgtcacaccatgggagttgatttcactcgaagcgggaatgcgaaattcgctaccctccacagtggaatcagcgactggggtgaagtcgtaacaaggtaaccgtaggagaacctgcggttggatcacctcctttct

SEQ ID NO: 464 - DNA, 1515 bp, Campylobacter hominis
tttatatggagagtttgatcctggctcagagtgaacgctggcggcgtgcctaatacatgcaagtcgaacgaacgaataagagcttgctcttataagttagtggcgcacgggtgagtaatatatagctaatctgcctcttagtagaggataacagtcggaaacgattgctaatactctatacttctgctttacataagtaaagtagagaaagtttttcgctaagagatgaggctatactgtatcagctagttggtaaggtaacggcttaccaaggctatgacgcataactggtctgagaggatgatcagtcacattggaactgagacacggtccaaactcctacgggaggcagcagtagggaatattgcgcaatgggggaaaccctgacgcagcaacgccgcgtggaggatgacacttttcggagcgtaaactccttttatcgggaaagaataatgacggtacccgatgaataagcaccggctaactccgtgccagcagccgcggtaatacggagggtgcaagcgttactcggaatcactgggcgtaaagggtgcgtaggtggattatcaagtctcttgtgaaatctaatagcttaactattaaattgcttgggaaactgatagtctagagtaggggagaggcagatggaactcttggtgtaggagtaaaatccgtagatatcaagaagaatacctattgcgaaagcgatctgctagaacctaactgacactgatgcacgaaagcgtggggagcaaacaggattagataccctggtagtccacgccctaaacgatgtataccggttgttgctttgctagtcaaggcagtaatccagctaacgcattaagtataccgcctggggagtacggtcgcaagattaaaactcaaaggaatagacggggacccgcacaagcggtggagcatgtggtttaattcgaagatacgcgaagaaccttacccggacttgatatctaacaaatcatccagagatggaagagtgtctgcttgcagaaatgttaagacaggtgctgcacggctgtcgtcagctcgtgtcgtgagatgttgggttaagtcccgcaacgagcgcaacccacgtatttagttgctaacagttaggctgagttctctaaatagactgccttcgtaaggaggaggaaggtgtggacgacgtcaagtcatcatggcccttatgtccggggcgacacacgtgctacaatgacatatacaatgagatgcaatatcgcaagatggagcaaatctataaaatatgtcccagttcggattggagtctgcaactcgactccatgaagccggaatcgctagtaatcgtagatcagccatgctacggtgaatacgttcccgggtcttgtactcaccgcccgtcacaccatgggagttgatttcactcgaagcggggatgcaaaatttgctaccctccacagtggaatcagcgactggggtgaagtcgtaacaaggtaaccgtaggagaacctgcggttggatcacctcctttct

SEQ ID NO: 465 - DNA, 1519 bp, Campylobacter jejuni
tttttatggagagtttgatcctggctcagagtgaacgctggcggcgtgcctaatacatgcaagtcgaacgatgaagcttttagcttgctagaagtggattagtggcgcacgggtgagtaaggtatagttaatctgccctacacaagaggacaacagttggaaacgactgctaatactctatactcctgcttaacacaagttgagtagggaaagtttttcggtgtaggatgagactatatagtatcagctagttggtaaggtaatggcttaccaaggctatgacgcttaactggtctgagaggatgatcagtcacactggaactgagacacggtccagactcctacgggaggcagcagtagggaatattgcgcaatgggggaaaccctgacgcagcaacgccgcgtggaggatgacacttttcggagcgtaaactccttttcttagggaagaattctgacggtacctaaggaataagcaccggctaactccgtgccagcagccgcggtaatacggagggtgcaagcgttactcggaatcactgggcgtaaagggcgcgtaggcggattatcaagtctcttgtgaaatctaatggcttaaccattaaactgcttgggaaactgatagtctagagtgagggagaggcagatggaattggtggtgtaggggtaaaatccgtagatatcaccaagaatacccattgcgaaggcgatctgctggaactcaactgacgctaaggcgcgaaagcgtggggagcaaacaggattagataccctggtagtccacgccctaaacgatgtacactagttgttggggtgctagtcatctcagtaatgcagctaacgcattaagtgtaccgcctggggagtacggtcgcaagattaaaactcaaaggaatagacggggacccgcacaagcggtggagcatgtggtttaattcgaagatacgcgaagaaccttacctgggcttgatatcctaagaaccttatagagatatgagggtgctagcttgctagaacttagagacaggtgctgcacggctgtcgtcagctcgtgtcgtgagatgttgggttaagtcccgcaacgagcgcaacccacgtatttagttgctaacggttcggccgagcactctaaatagactgccttcgtaaggaggaggaaggtgtggacgacgtcaagtcatcatggcccttatgcccagggcgacacacgtgctacaatggcatatacaatgagacgcaataccgcgaggtggagcaaatctataaaatatgtcccagttcggattgttctctgcaactcgagagcatgaagccggaatcgctagtaatcgtagatcagccatgctacggtgaatacgttcccgggtcttgtactcaccgcccgtcacaccatgggagttgatttcactcgaagccggaatactaaactagttaccgtccacagtggaatcagcgactggggtgaagtcgtaacaaggtaaccgtaggagaacctgcggttggatcacctcctttctag

SEQ ID NO: 466 - DNA, 1519 bp, Campylobacter lari
tttttatggagagtttgatcctggctcagagtgaacgctggcggcgtgcctaatacatgcaagtcgaacgatgaagcgactagcttgctagttgtggattagtggcgcacgggtgagtaaggtatagttaatctgccctacacaagaggacaacagttggaaacggctgctaatactctatactcctgcttaacacaagttgagtagggaaagtttttcggtgtaggatgagactatatagtatcagctagttggtgaggtaatggctcaccaaggctatgacgcttaactggtctgagaggatgatcagtcacactggaactgagacacggtccagactcctacgggaggcagcagtagggaatattgcgcaatgggggaaaccctgacgcagcaacgccgcgtggaggatgacacttttcggagcgtaaactccttttcttagggaagaattctgacggtacctaaggaataagcaccggctaactccgtgccagcagccgcggtaatacggagggtgcaagcgttactcggaatcactgggcgtaaagggcgcgtaggcggattatcaagtctcttgtgaaatccaacggcttaaccgttgaactgcttgggaaactggtaatctagagtgggggagaggcagatggaattggtggtgtaggggtaaaatccgtagatatcaccaagaatacccattgcgaaggcgatctgctggaacttaactgacgctaaggcgcgaaagcgtggggagcaaacaggattagataccctggtagtccacgccctaaacgatgtatgctagttgttggggtgctagtcatctcagtaatgcagctaacgcattaagcataccgcctggggagtacggtcgcaagattaaaactcaaaggaatagacggggacccgcacaagcggtggagcatgtggtttaattcgaagatacgcgaagaaccttacctgggcttgatatcctaagaaccttatagagatatgagggtgctagcttgctagaacttagagacaggtgctgcacggctgtcgtcagctcgtgtcgtgagatgttgggttaagtcccgcaacgagcgcaacccacgtatttagttgctaacacttcgggtgagcactctaaatagactgccttcgtaaggaggaggaaggtgtggacgacgtcaagtcatcatggcccttatgcccagggcgacacacgtgctacaatggcatatacaatgagacgcaataccgcgaggtggagcaaatctataaaatatgtcccagttcggattgttctctgcaactcgagagcatgaagccggaatcgctagtaatcgtagatcagccatgctacggtgaatacgttcccgggtcttgtactcaccgcccgtcacaccatgggagttgatttcactcgaagccggaatactaaactagttaccgtccacagtggaatcagcgactggggtgaagtcgtaacaaggtaaccgtaggagaacctgcggttggatcacctcctttctag

SEQ ID NO: 467 - DNA, 1515 bp, Campylobacter rectus
ttaatatggagagtttgatcctggctcagagtgaacgctggcggcgtgcctaatacatgcaagtcgaacggagattaagtagcttgctatttaatcttagtggcgcacgggtgagtaatatatagctaatctgccctacactagaggacaacagttggaaacgactgctaatactctatactccttctttacataagttaagtcgggaaagtttttcggtgtaggatgaggctatatcgtatcagctagttggtagggtaacggcctaccaaggctatgacgcgtaactggtctgagaggatgatcagtcacactggaactgagacacggtccagactcctacgggaggcagcagtagggaatattgctcaatgggggaaaccctgaagcagcaacgccgcgtggaggatgacacttttcggagcgtaaactccttttcttgggaaagaattatgacggtacccaaggaataagcaccggctaactccgtgccagcagccgcggtaatacggagggtgcaagcgttactcggaatcactgggcgtaaaggacgcgtaggcggattatcaagtctcttgtgaaatctaacggcttaaccgttaaactgcttgggaaactgataatctagagtaagggagaggcagatggaattcttggtgtaggggtaaaatccgtagagatcaagaagaatacccattgcgaaagcgatctgctggaacttaactgacgctaatgcgtgaaagcgtggggagcaaacaggattagataccctggtagtccacgccctaaacgatgtatactagttgttgcttcgctagtcgaggcagtaatgcacctaacggattaagtataccgcctggggagtacggtcgcaagattaaaactcaaaggaatagacggggacccgcacaagcggtggagcatgtggtttaattcgaagatacgcgaagaaccttacccggacttgatatctaacaaatcatccagagatggaagagtgtctgcttgcagaaatgttaagacaggtgctgcacggctgtcgtcagctcgtgtcgtgagatgttgggttaagtcccgcaacgagcgcaacccacgtcattagttgctaacggttcggccgagcactctaatgagactgccttcgtaaggaggaggaaggtgtggacgacgtcaagtcatcatggcccttatgtccggggcgacacacgtgctacaatggcgtatacaataagacgcaatatcgcgagatggagcaaatctataaaatacgtcccagttcggattggagtctgcaactcgactccatgaagccggaatcgctagtaatcgtagatcagccatgctacggtgaatacgttcccgggtcttgtactcaccgcccgtcacaccatgggagttgatttcactcgaagcccaaataccaaaccggttatggtccacagtggaatcagcgactggggtgaagtcgtaacaaggtaaccgtaggagaacctgcggttggatcacctcctttct

SEQ ID NO: 468 - DNA, 1515 bp, Campylobacter showae
ttaatatggagagtttgatcctggctcagagtgaacgctggcggcgtgcctaatacatgcaagtcgaacggagattaagtagcttgctatttaatcttagtggcgcacgggtgagtaatatatagctaacttgcccattactaagggacaacagttggaaacgactgctaataccttatactccgtatctatataagtagatacgggaaagtttttcggtaatggatagggctatatcgtatcagctagttggtaaggtaatggcttaccaaggctatgacgcgtaactggtctgagaggatgatcagtcacactggaactgagacacggtccagactcctacgggaggcagcagtagggaatattgctcaatgggggaaaccctgaagcagcaacgccgcgtggaggatgacacttttcggagcgtaaactccttttcttgggaaagaattatgacggtacccaaggaataagcaccggctaactccgtgccagcagccgcggtaatacggagggtgcaagcgttactcggaatcactgggcgtaaaggacgcgtaggcggattatcaagtctcttgtgaaatctaacggcttaaccgttaaactgcttgggaaactgataatctagagtaagggagaggcagatggaattcttggtgtaggggtaaaatccgtagagatcaagaagaatacccattgcgaaagcgatctgctggaacttaactgacgctaatgcgtgaaagcgtggggagcaaacaggattagataccctggtagtccacgccctaaacgatgtatactagttgttgcttcgctagtcgaggcagtaatgcacctaacggattaagtataccgcctggggagtacggtcgcaagattaaaactcaaaggaatagacggggacccgcacaagcggtggagcatgtggtttaattcgaagatacgcgaagaaccttacccggacttgatatctaacaaatcatccagagatggaagagtgtctgcttgcagaaatgttaagacaggtgctgcacggctgtcgtcagctcgtgtcgtgagatgttgggttaagtcccgcaacgagcgcaacccacgtcattagttgctaacggttcggccgagcactctaatgagactgccttcgcaaggaggaggaaggtgtggacgacgtcaagtcatcatggcccttatgtccggggcgacacacgtgctacaatggcatatacaatgagacgcaatatcgcgagatggagcaaatctataaaatatgtcccagttcggattggagtctgcaactcgactccatgaagccggaatcgctagtaatcgtagatcagccatgctacggtgaatacgttcccgggtcttgtactcaccgcccgtcacaccatgggagttgatttcactcgaagcccaaataccaaaccggttatggtccacagtggaatcagcgactggggtgaagtcgtaacaaggtaaccgtaggagaacctgcggttggatcacctcctttct

SEQ ID NO: 469 - DNA, 1420 bp, Campylobacter sp.
  FOBRC14
agagtgaacgctggcggcgtgcctaatacatgcaagtcgaacggagattaagtagcttgctatttaatcttagtggcgcacgggtgagtaatatatagctaacttgcccattactaagggacaacagttggaaacgactgctaataccttatactccgtatctatataagtagatacgggaaagtttttcggtaatggatagggctatatcgtatcagctagttggtagggtaatggcttaccaaggctatgacgcgtaactggtctgagaggatgatcagtcacactggaactgagacacggtccagactcctacgggaggcagcagtagggaatattgctcaatgggggaaaccctgaagcagcaacgccgcgtggaggatgacacttttcggagcgtaaactccttttcttggggaagaaatttgacggtacccaaggaataagcaccggctaactccgtgccagcagccgcggtaatacggagggtgcaagcgttactcggaatcactgggcgtaaaggacgcgtaggcggattatcaagtctcttgtgaaatccaatggcttaaccattgaactgcttgagaaactgataatctagagtgagggagaggcagatggaattggtggtgtaggggtaaaatccgtagagatcaccaggaatacccattgcgaaggcgatctgctggaactcaactgacgctaatgcgtgaaagcgtggggagcaaacaggattagataccctggtagtccacgccctaaacgatgtatactagttgttgctaagctagtcttggcagtaatgcacctaacggattaagtataccgcctggggagtacggtcgcaagattaaaactcaaaggaatagacggggacccgcacaagcggtggagcatgtggtttaattcgaagatacgcgaagaaccttacccggacttgatatctaacaaatcatctagagatagaagagtgtctgcttgcagaaatgttaagacaggtgctgcacggctgtcgtcagctcgtgtcgtgagatgttgggttaagtcccgcaacgagcgcaacccacgtcattagttgctaacggttcggccgagcactctaatgagactgccttcgcaaggaggaggaaggtgtggacgacgtcaagtcatcatggcccttatgtccggggcgacacacgtgctacaatggcatatacaatgagacgcaatatcgcgagatggagcaaatctataaaatatgtcccagttcggattggagtctgcaactcgactccatgaagccggaatcgctagtaatcgtagatcagccatgctacggtgaatacgttcccgggtcttgtactcaccgcccgtcacaccatgggagttgatttcactcgaagcccaaataccaaaccggttatggtccacagtggaa

SEQ ID NO: 470 - DNA, 1428 bp, Campylobacter sp.
  FOBRC15
agtgaacgctggcggcgtgcctaatacatgcaagtcgaacggagattaagtagcttgctatttaatcttagtggcgcacgggtgagtaatatatagctaacttgcccattactaagggacaacagttggaaacgactgctaataccttatactccgtgtctatataagtagatacgggaaagtttttcggtaatggatagggctatatcgtatcagctagttggtaaggtaatggcttaccaaggctatgacgcgtaactggtctgagaggatgatcagtcacactggaactgagacacggtccagactcctacgggaggcagcagtagggaatattgctcaatggggggaaccctgaagcagcaacgccgcgtggaggatgacacttttcggagcgtaaactccttttcttgggaaagaattatgacggtacccaaggaataagcaccggctaactccgtgccagcagccgcggtaatacggagggtgcaagcgttactcggaatcactgggcgtaaaggacgcgtaggcggattatcaagtctcttgtgaaatctaacggcttaaccgttaaactgcttgggaaactgataatctagagtaagggagaggcagatggaattcttggtgtaggggtaaaatccgtagagatcaagaagaatacccattgcgaaagcgatctgctggaacttaactgacgctaatgcgtgaaagcgtggggagcaaacaggattagataccctggtagtccacgccctaaacgatgtatactagttgttgcttcgctagtcgaggcagtaatgcacctaacggattaagtataccgcctggggagtacggtcgcaagattaaaactcaaaggaatagacggggacccgcacaagcggtggagcatgtggtttaattcgaagatacgcgaagaaccttacccggacttgatatctaacaaatcatccagagatggaagagtgtctgcttgcagaaatgttaagacaggtgctgcacggctgtcgtcagctcgtgtcgtgagatgttgggttaagtcccgcaacgagcgcaacccacgtcattagttgctaacggttcggccgagcactctaatgagactgccttcgcaaggaggaggaaggtgtggacgacgtcaagtcatcatggcccttatgtccggggcgacacacgtgctacaatggcgtatacaatgagacgcaatatcgcgagatggagcaaatctataaaatacgtcccagttcggattggagtctgcaactcgactccatgaagccggaatcgctagtaatcgtagatcagccatgctacggtgaatacgttcccgggtcttgtactcaccgcccgtcacaccatgggagttgatttcactcgaagcccaaataccaaactggttatggtccacagtggaatcagcgactg

SEQ ID NO: 471 - DNA, 1505 bp, Campylobacter sp.
  oral clone BB120
gagagtttgattctggctcagagtgaacgctggcggcgtgcctaatacatgcaagtcgaacggagattaaatagcttgctatttaatcttagtggcgcacgggtgagtaatgtatagttaatctgccccatagtggaggacaacagttagaaatgactgctaatactccatactccttcttatcataagttaagtcgggaaagtttttcgctatgggatgagactatatcgtatcagttagttggtaaggtaatggcttaccaaggctatgacgcgtaactggtctgagaggatgatcagtcacattggaactgagacacggtccaaactcctacgggaggcagcagtagggaatattgcgcaatgggggaaaccctgacgcagcaacgccgcgtggaggatgacacttttcggagcgtaaactccttttgttagggaagaataatgacggtacctaacgaataagcaccggctaactccgtgccagcagccgcggtaatacggagggtgcaagcgttactcggaatcactgggcgtaaaggacgcgtaggcggattatcaagtctcttgtgaaatctagtggcttaaccactaaactgcttgggaaactgataatctagagtaagggagaggcagatggaattcttggtgtaggggtaaaatccgtagagatcaagaagaatacttattgcgaaggcgatctgctagaacttaactgacgctaatgcgtgaaagcgtggggagcaaacaggattagataccctggtagtccacgccctaaacgatgtatactggttgttgctatgctagtcatggcagtaatccacctaacggattaagtataccgcctggggagtacggtcgcaagattaaaactcaaaggaatagacggggacccgcacaagcggtggagcatgtggtttaattcgaagatacgcgaagaaccttacccggacttgatatctaacaaatcatctagagatagaagagtgtctgcttgcagaaatgttaagacaggtgctgcacggctgtcgtcagctcgtgtcgtgagatgttgggttaagtcccgcaacgagcgcaacccacgtcattagttgctaacagtttagctgagcactctaatgagactgccttcgtaaggaggaggaaggtgtggacgacgtcaagtcatcatggcccttatgtccagggcgacacacgtgctacaatggcatatacaatgagatgcaatatcgcgagatggagcgaatctataaaatatgtcccagttcggattggagtctgcaactcgactccatgaagtcggaatcgctagtaatcgtagatcagccatgctacggtgaatacgttcccgggtcttgtactcaccgcccgtcacaccatgggagttgatttcactcgaagtcggaatgctaaactagctaccgcccacagtggaatcagcgactggggtgaagtcgtaacaaggtaaccgtaggagaacctgcggytkgawcacctccttc

SEQ ID NO: 472 - DNA, 1695 bp, Campylobacter sputorum
  modified_base (8)..(8): a, c, t, g, unknown or other
agtgaacnctggcggcgtgcctaatacatgcaagtcgaacgatgaagtcctagcttgctaggatggattagtggcgcacgggtgagtaatgtatagctaatctgccccatagagaggaacaacacttagaaatgagtgctaatacctcatactccaattatacataagtttaattgggaaatgtagctcttaataatatatatcaaagataatttataaataaaaagttataaatataacaataagcttttttgaagctttatattaataaagcgaaaaaaaagcaaagcagttagatttaataaatttttatagcatttaaaaatacaaaagacttaatttttaaatctaaatataaattattactaatatttttaatagtcatttagaaatatcttaatatatattattaagagctttcgctatgggatgaggctatattgtatcagctagttggtaaggtaatggcttaccaaggctatgacgcataactggtctgagaggatgatcagtcacactggaactgagacacggtccagactcctacgggaggcagcagtagggaatattgctcaatgggggaaaccctgaagcagcaacgccgcgtggaggatgacacttttcggagcgtaaactccttttctttgggaagaataatgacggtaccaaaggaataagcaccggctaactccgtgccagcagccgcggtaatacggagggtgcaagcgttactcggaatcactgggcgtaaaggacgcgtaggtggatagataagtctcttgtgaaatctagtagcttaactactaaactgcttgggaaactatctatctagagtaagggagaggcagatggaattcttggtgtaggggtaaaatccgtagatatcaagaggaatacttattgcgaaggcgatctgctagaacttaactgacactaatgcgtgaaagcgtggggagcaaacaggattagataccctggtagtccacgccctaaacgatgtatactggttgttgctgtgctagtcatggcagtaatccacctaacggattaagtataccgcctggggagtacggtcgcaagattaaaactcaaaggaatagacggggacccgcacaagcggtggagcatgtggtttaattcgaagatacgcgaagaaccttacccggacttgatatctaacaaatcatctagagatagaagagtgtctgcttgcagaaatgttaagacaggtgctgcacggctgtcgtcagctcgtgtcgtgagatgttgggttaagtcccgcaacgagcgcaacccacgtgtttagttgctaacagttaggctgagcactctaaacagactgccttcgtaaggaggaggaaggtgtggacgacgtcaagtcatcatggcccttatgtccggggcgacacacgtgctacaatggcatatacaataagacgcaatatcgcgagatggagcaaatctataaaatatgtcccagttcggattggagtctgcaactcgactccatgaagccggaatcgctagtaatcgtagatcagccatgctacggtgaatacgttcccgggtcttgtactcaccgcccgtcacaccatgggagttgatttcactcgaagcccaaataccaaattggttatggtccacagtggaatcagcgactggggtgaagtcgtaacaaggtaaccgtaggagaac

SEQ ID NO: 473 - DNA, 1513 bp, Campylobacter upsaliensis
tatggagagtttgatcctggctcagagtgaacgctggcggcgtgcctaatacatgcaagtcgaacgatgaagcttttagcttgctagaagtggattagtggcgcacgggtgagtaaggtatagttaatctgccctacactgggggacaacacttagaaatgagtgctaataccccatactcctatttaacataagttaggtagggaaagtttttcggtgtaggatgagactatatagtatcagctagttggtaaggtaaaggcttaccaaggctatgacgcttaactggtctgagaggatgatcagtcacactggaactgagacacggtccagactcctacgggaggcagcagtagggaatattgcgcaatgggcgaaagcctgacgcagcaacgccgcgtggaggatgacacttttcggagcgtaaactccttttctttgggaagaattttgacggtaccaaaggaataagcaccggctaactccgtgccagcagccgcggtaatacggagggtgcaagcgttactcggaatcactgggcgtaaagggcgcgtaggcggattatcaagtctcttgtgaaatctaatggcttaaccattaaactgcttgggaaactgatagtctagagtgagggagaggcagatggaattggtggtgtaggggtaaaatccgtagatatcaccaagaatacccattgcgaaggcgatctgctggaactcaactgacgctaaggcgcgaaagcgtggggagcaaacaggattagataccctggtagtccacgccctaaacgatgtatgctagttgttggggtgctagtcatctcagtaatgcagctaacgcattaagcataccgcctggggagtacggtcgcaagattaaaactcaaaggaatagacggggacccgcacaagcggtggagcatgtggtttaattcgaagatacgcgaagaaccttacctaggcttgatatccaacaaattctgtagagatacggaagtgctagcttgctagaatgttgagacaggtgctgcacggctgtcgtcagctcgtgtcgtgagatgttgggttaagtcccgcaacgagcgcaaccctcgtccttagttgctaacgattcggtcgagcactctaaggagactgccttcgtaaggaggaggaaggtggggacgacgtcaagtcatcatggcccttacgcctagggcgacacacgtgctacaatggcatatacaatgagacgcaataccgcgaggtggagcaaatctataaaatatgtcccagttcggattgttctctgcaactcgagagcatgaagccggaatcgctagtaatcgcaaatcagccatgttgcggtgaatacgttcccgggtcttgtactcaccgcccgtcacaccatgggagttgatttcactcgaagtggaaatactaaactagttatcccccacagtggaatcagcgactggggtgaagtcgtaacaaggtaaccgtaggagaacctgcggttggatcacctcctttct

SEQ ID NO: 474 - DNA, 1508 bp, Candidatus Arthromitus sp.
  SFB-mouse-Yit
agagtttgatcctggctcaggacgaacgctggcggcgtgcctaacacatgcaagttgagcggagatatatggagcttgctttatataacttagcagcgaacgggtgagtaacacgtagataatctatcctatactgggggatagcccgatgaaagttggattaataccgcatatagctatatagttgcatgattatgtagtgaaagatttattggtataggaggagtctgcggcacattagctagtaggtgaggtaaaggcttacctaggcgacgatgtgtagccggtctgagaggatgaacggccacaatggaactgagacacggtccatactcctacgggaggcagcagtggggaatattgcacaatgggggaaaccctgatgcagcaacgccgcgtgagtgaagaaggttttcggattgtaaagctctgttagcagggaagaggaaggacggtacctgcagaggaagccacggctaactacgtgccagcagccgcggtaatacgtaggtggcaagcgttgttcggaataactgggcgtaaaggatgcgtaggcggttaaacaagttatatgttaaatatataggcttaacctgtagaaagcatataaaactgtttaactagagtgcaggagaggtaagtggaattcctagtgtagcggtgaaatgcgtagagattaggaagaacaccagtggcgaaggcgacttactggactgtaactgacgctgaggcatgagagcatggggagcaaacaggattagataccctggtagtccatgctgtaaacgatgggtactaggtgtgggttgtgaataacaattcgtgccgtcgcaaacgcaataagtaccccgcctgaggagtacgatcgcaagattaaaactcaaaggaattgacggggacccgcacaagcagcggagcatgtggtttaattcgaagcaacgcgaagaaccttacctaaacttgacataccttgaattaccttgtaatgagggaagctcgcaagagcaaggatacaggtggtgcatggttgtcgtcagctcgtgtcgtgagatgttgggttaagtcccgcaacgagcgcaacccttgttgttaattgctaacaggttaagctgagcactttagcgagacagcctaggttaactaggaggaaggtggggatgacgtcaaatcatcatgccccttacgtttagggctacacacgtgctacaatggtgagaacagagagaagcaagctagtgatagtgagcaaaacttataaaactcatctcagttcggattgcaggctgaaactcgcctgtatgaagatggagttgctagtaatcgcgaatcagaatgtcgcggtgaatacgttcccgggtcttgtacacaccgcccgtcacaccatgagagttggcaacacccgaaacctgtgggctaaccatataggaggcagcagtctaaggtggggtcagtgattggggtgaagtcgtaacaaggtagccgtaggagaacctgcggctggatcacct

SEQ ID NO: 475 - DNA, 1541 bp, Candidatus Sulcia muelleri
acaatgaagagtttgatccttgctcaggataaacgctagcggagggcctaacacatgcaagtcgaggggcagcaaaaaaaatataagtttacttatattttttgttggcgaccggcaaacgggtgagtaatacatacgtaacttaccttatgctgagggatagcctgaggaaacttggattaataccttataaaacaatcttttataaagaaatattgttaaaattttagatggcataaaataggcgtatgtccgattagttagttggtaaggtaatggcttaccaagacaatgatcggtagggggcctgagagggcgtacccccacattggtactgagacacggaccaaactcctacgggaggcagcagtgaggaatattggtcaatggaggaaactctgaaccagccactccgcgtgcaggatgaaagccttatgggttgtaaactgcttttgtatatgaataaaaaattctatttttagaaaaaattgaaggtaatatacgaataagtatcggcaaactccgtgccagcagccgcggtaaaacggaggatacaagcgttatccggatttattgggtttaaagggtgcgtaggcggttttttaagtcagtagtgaaatcttaaagcttaactttaaaattgctattgatactgagagacttgagttaggttggagtagctggaatgtgtggtgtagcggtgaaatgcatagatatcacacagaacaccgatcgcgaaagcaagttactaagcctatactgacgctgaggcacgaaagcgtggggagcaaacaggattagataccctggtagtccatgccgtaaacgatgatcactaactattggttttttataattcagtggtcaagcgaaagtgataagtgatccacctgagaagtacgaccgcaaggttgaaactcaaaggaattgacgggggcccgcacaatcggtggagcatgtggtttaattcgatgatacgcgaggaaccttaccaagacttaaatgtactacgaataaattggaaacaatttagtcaaacgacggagtacaaggtgctgcatggttgtcgtcagctcgtgccgtgaggtgttaggttaagtcctttaacgagcgcaacccttatgattagttgccatcgagtaatgttggggactctaataagactgccggcgtaagccgagaggaaggtggggacgacgtcaaatcatcacggcccttacgtcttgggccacacacgtgctacaatggtcggtacaaaaggcagcgactgggtgaccagaagcaaatctctaaagccgatctcagttcggattggagtctgaaactcgactctatgaagctggaatcgctagtaatcgcgcatcagccatggcgcggtgaatacgttcccgggccttgtacacaccgcccgtcaagccatggaagttggaagtacctaaagtcggtgaccataaaaggagctgcctaaggtaagtctaataactagggctaagtcgtaacaaggtagccgtaccggaaggtgcggctggaatatctctgtt

SEQ ID NO: 476 - DNA, 1504 bp, Capnocytophaga canimorsus
agagtttgatcctggctcaggatgaacgctagcggcaggcctaacacatgcaagtcgaggggtagggtgcttcggcacttgagaccggcgcacgggtgcgtaacacgtgtacaatctaccttttgctaagggatagcccgaagaaatttggattaataccttatagtattgtttggtggcatcactaaataattaaagctctggtggcaaaagatgagtacgcgtcccattagctagttggtgtggtaacggcataccaaggctacgatgggtaggggtcctgagagggaggtcccccacactggtactgagacacggaccagactcctacgggaggcagcagtgaggaatattggacaatggtcggaagactgatccagccatgccgcgtgcaggatgacggccttatgggttgtaaactgcttttatacaggaagaataaggtctacgcgtagattgatgacggtactgtatgaataagcatcggctaactccgtgccagcagccgcggtaatacggaggatgcgagcgttatccggaatcattgggtttaaagggtccgtaggcgggcttataagtcagaggtgaaagcactgagctcaactgagtaactgcctttgaaactgtaggtcttgaatgtttgtgaagtagctggaatgtgtagtgtagcggtgaaatgcatagatattacacagaacaccgattgcgaaggcatgttactaacaaattattgacgctgatggacgaaagcgtggggagcgaacaggattagataccctggtagtccacgctgtaaacgatggatactagctgtttgggagtaattttgagtggctaagcgaaagtgataagtatcccacctggggagtacgcacgcaagtgtgaaactcaaaggaattgacgggggcccgcacaagcggtggagcatgtggtttaattcgatgatacgcgaggaaccttaccaaggtttaaatgggaaacgacgtacctagagataggtatttcttcggacgtttttcaaggtgctgcatggttgtcgtcagctcgtgccgtgaggtgtcaggttaagtcctataacgagcgcaacccctgctgttagttgctagcgagttaagtcgagcactctaacgggactgccggtgcaaaccgtgaggaaggtggggatgacgtcaaatcatcacggcccttacatcttgggctacacacgtgctacaatggccggtacagcgagcagccactgcgtgagcaggagcgaatctataaagccggtcacagttcggatcggagtctgcaactcgactccgtgaagctggaatcgctagtaatcggatatcagccatgatccggtgaatacgttcccgggccttgtacacaccgcccgtcaagccatggaagctgggggtacctgaagtcggttgccgcaaggagctgcctagggtaaaactagtgactggggctaagtcgtaacaaggtagccgtaccggaaggtgcggctggaacacct

SEQ ID NO: 477 - DNA, 1287 bp, Capnocytophaga sp.
  C1
gatgaacgctagcggcaggcctaacacatgcaagtcgagggaccggcgtacgggtgcgtaacgcgtatacaatctgcctttcactgggggatagcccgaagaaatttggattaataccccatagttaaaggtggtgaaagatgagtatgcgttctattagctagttggagaggtaacggctccccaaggcgatgatagataggggttctgagagggatgtcccccacactggtactgagatacggaccagactcctacgggaggcagcagtgaggaatattggacaatggtcggaagactgatccagccatgccgcgtgcaggatgacggcctatgggttgtaaactgcttttgtaagggaagatgacggtaccttacgaataagcatcggctaactccgtgccagcagccgcggtaatacggaggatgcgagcgttatccggaatcattgggtttaaagggtctgtaggcgggctggtaagtcagaggtgaaagcgcttagctcaactaagcaactgcctttgaaactgttggtcttgaatggttgtgaagtagttggaatgtgtagtgtagcggtgaaatgcttagatattacacagaacaccgatagcgaaggcatattactaacaatattgacgctgatggacgaaagcgtggggagcgaacaggattagataccctggtagtccacgctgtaaacgatggatactagctgtttggtattgagtggctaagcgaaagtgataagtatcccacctggggagtacgttcgcaagaatgaaactcaaaggaattgacgggggcccgcacaagcggtggagcatgtggtttaattcgatgatacgcgaggaaccttaccaaggtttaaatggtcaaggtgctgcatggttgtcgtcagctcgtgccgtgaggtgtcaggttaagccctataacgagcgcaacccctgccattagttgctaacgatcgagccctctaatgggactgccggtgcaaaccggaggaaggtggggatgacgtcaaatcatcacggcccttacatcttgggctacacacgtgctacaatggccgtcagagagcagccactgcgtgagcaggcgcgaatctatacggtcacagttcggacggagtctgcaactcgactccggaagctggaatcgctagtaatcggatatcagccatgatccggtgaatacgttcccgggccttgtacacaccgcccgtcaagccatggaagctgggagtacctgaagacggttgctgtttagggtaaaactagtgactggggc

SEQ ID NO: 478 - DNA, 1509 bp, Capnocytophaga gingivalis
tgaagagtttgatcctggctcaggatgaacgctagcggcaggcctaacacatgcaagtcgagggagaagccctttcgggggcagaaaccggcgcacgggtgcgtaacgcgtatgcaacctacctttcacagggggatagcccgaagaaatttggattaataccccataatattattggatggcatcatttgataattaaaactgcggtggtgaaagatgggcatgcgtcctattagctagttggagtggtaacggcaccccaaggctacgataggtaggggtcctgagagggagatcccccacactggtactgagacagggaccagactcctacgggaggcagcagtgaggaatattggtcaatggtcggaagactgaaccagccatgccgcgtgcaggaagaatgccttatgggttgtaaactgcttttatatgggaagaataaggtgtacgtgtacattgatgacggtaccatatgaataagcatcggctaactccgtgccagcagccgcggtaatacggagggtgcgagcgttattcggaatcattgggtttaaagggtctgtaggcgggctattaagtcagaggtgaaaggtttcagcttaactgagaaattgcctttgatactggtagtcttgaatatctgtgaagttcttggaatgtgtagtgtagcggtgaaatgcttagatattacacagaacaccgattgcgaaggcaggggactaacagacaattgacgctgagagacgaaagcgtggggagcgaacaggattagataccctggtagtccacgctgtaaacgatggatactagctgtttggcgcaagctgagtggctaagcgaaagtgataagtatcccacctggggagtacgcacgcaagtgtgaaactcaaaggaattgacgggggcccgcacaagcggtggagcatgtggtttaattcgatgatacgcgaggaaccttaccaaggtttaaatggggactgacaggtgtagagatacgcccttcttcggacagttttcaaggtgctgcatggttgtcgtcagctcgtgccgtgaggtgtcaggttaagccctataacgagcgcaacccctattgttagttaccagcacgtaaaggtggggactctagcaagactgccggtgtaaaccgtgaggaaggtggggatgacgtcaaatcatcacggcccttacatcttgggctacacacgtgctacaatggtcgttacagagagcagccactgcgcgagcaggagcgaatctataaagacgatcacagttcggatcggagtctgcaactcgactccgtgaagctggaatcgctagtaatcggatatcagccatgatccggtgaatacgttcccgggccttgtacacaccgcccgtcaagccatggaagctgggagtacctgaagtcggtcaccgcaaggagctgcctagggtaaaaccagtgactggggctaagtcgtaacaaggtagccgtaccggaaggtgtggctggaacacctcctt

SEQ ID NO: 479 - DNA, 1417 bp, Capnocytophaga granulosa
  modified_base (28)..(28): a, c, t, g, unknown or other
aggcctaacacatgcaagtcgagggagnaagcccttcggggtagaaaccggcgcacgggtgcgtaacgcgtatgcaacctacctttcacagggggatagcccgaagaaatttggattaataccccataatattattggatggcatcatttgataattaaaattacgatggtgaaagatgggcatgcgtcctattagctagttggagtggtaacggcaccccaaggctacgataggtaggggtcctgagagggagatcccccacactggtactgagacagggaccagactcctacgggaggcagcagtgaggaatattggtcaatggtcggaagactgaaccagccatgccgcgtgcaggaagaatgccttatgggttgtaaactgcttttatatgggaagaataaggagtacgtgtactttgatgacggtaccatatgaataagcatcggctaactccgtgccagcagccgcggtaatacggaggatgcgagcgttattcggaatcattgggtttaaagggtctgtaggcgggctattaagtcaggggtgaaaggtttcagcttaactgagaaattgcctttgatactggtagtcttgaaaatctgtgaagttcttggaatgtgtagtgtagcggtgaaatgcttagatattacacagaacaccgattgcgaaggcaggggactaacagacgattgacgctgagagacgaaagcgtggggagcgaacaggattagataccctggtagtccaccctgtaaacgatggatactagctgtttggagtaatttgagtggctaagcgaaagtgataagtatcccacctggggagtacgcacgcaagtgtgaaactcaaaggaattgacgggggcccgcacaagcggtggagcatgtggtttaattcgatgatacgcgaggaaccttaccaaggtttaaatggagactgacaggggcagagatgcctttttcttcggacagttttcaaggtgctgcatggttgtcgtcagctcgtgccgtgaggtgtcaggttaagtcctataacgagcgcaacccctattgttagttaccagcacgtagtggtggggactctagcaagactgccggtgtaaaccgtgaggaaggtggggatgacgtcaaatcatcacggcccttacatcttgggctacacacgtgctacaatggtcgttacagagagcagccactgcgcgagcaggagcgaatctataaagacggtcacagttcggatcggagtctgcaactcgactccgtgaagctggaatcgctagtaatcggatatcagccatgatccggtgaatacgttcccgggccttgtacacaccgcccgtcaagccatggaagctgggagtacctgaagtcggttgccgcaaggagctgcctagggtaaaaccagtgactgggg

SEQ ID NO: 480 - DNA, 1518 bp, Capnocytophaga ochracea
acgatgaagagtttgatcctggctcaggatgaacgctagcggcaggcctaacacatgcaagtcgagggggaagttactttcgggtaacagagaccggcgtacgggtgcgtaacgcgtatacaatctgcctttcactgggggatagcccgaagaaatttggattaataccccatagtatatagggacggcatcgtttttatattaaagctctggtggtgaaagatgagtatgcgttctattagctagttggagaggtaacggctccccaaggctatgatagataggggttctgagagggatgtcccccacactggtactgagatacggaccagactcctacgggaggcagcagtgaggaatattggacaatggtcggaagactgatccagccatgccgcgtgcaggatgactgccttatgggttgtaaactgcttttgtaagggaagaataagggctacgcgtagtttgatgacggtaccttacgaataagcatcggctaactccgtgccagcagccgcggtaatacggaggatgcgagcgttatccggaatcattgggtttaaagggtccgtaggcgggctaataagtcaggggtgaaatcgttcagctcaactgagcaactgcctttgaaactgttggtcttgaatggttgtgaagtagttggaatgtgtagtgtagcggtgaaatgcttagatattacacagaacaccgatagcgaaggcatattactaacaattaattgacgctgatggacgaaagcgtggggagcgaacaggattagataccctggtagtccacgctgtaaacgatggatactagctgtttggagtaatctgagtggctaagcgaaagtgataagtatcccacctggggagtacgttcgcaagaatgaaactcaaaggaattgacgggggcccgcacaagcggtggagcatgtggtttaattcgatgatacgcgaggaaccttaccaaggtttaaatggggactgacagaggtagagatacctttttcttcggacagttttcaaggtgctgcatggttgtcgtcagctcgtgccgtgaggtgtcaggttaagtcctataacgagcgcaacccctgccattagttgctaacgagtaaggtcgagccctctaatgggactgccggtgcaaaccgtgaggaaggtggggatgacgtcaaatcatcacggcccttacatcttgggctacacacgtgctacaatggccgttacagagagcagccactgcgtgagcaggcgcgaatctataaagacggtcacagttcggatcggagtctgcaactcgactccgtgaagctggaatcgctagtaatcggatatcagccatgatccggtgaatacgttcccgggccttgtacacaccgcccgtcaagccatggaagctgggggtacctgaagacggttaccgcgaggagctgtttagggtaaaactagtgactggggctaagtcgtaacaaggtagccgtaccggaaggtgcggctggaacacctcctttct

SEQ ID NO: 481 - DNA, 1405 bp, Capnocytophaga sp.
  GEJ8
gcctacacatgcaagtcgagggggaagttactttcgggtaacagagaccggcgtacgggtgcgtaacgcgtatacaatctgcctttcactgggggatagcccgaagaaatttggattaataccccatagtatagtaatacggcatcgtgatactattaaagcttaggtggtgaaagatgagtatgcgttctattagttagttggagaggtaacggctccccaaggcgatgatagataggggttctgagagggatgtcccccacactggtactgagatacggaccagactcctacgggaggcagcagtgaggaatattggacaatggtcggaagactgatccagccatgccgcgtgcaggatgaaggtcttatggattgtaaactgcttttgtaagggaagaataagggctacgtgtagtttgatgacggtaccttacgaataagcatcggctaactccgtgccagcagccgcggtaatacggaggatgcgagcgttatccggaatcattgggtttaaagggtctgtaggcgggctggtaagtcagaggtgaaagcgctcagctcaactgaggcaactgcctttgaaactgttggtcttgaatggttgtgaaagtagttggaatgtgtagtgtagcggtgaaatgcttagatattacacagaacaccgatagcgaaggcatattactaacaattgattgacgctgatggacgaaagcgtggggagcgaacaggattagataccctggtagtccacgctgtaaacgatggatactagctgtttggtcgcgagtttgagtggctaagcgaaagtgataagtatcccacctggggagtacgttcgcaagaatgaaactcaaaggaattgacgggggcccgcacaagcggtggagcatgtggtttaattcgatgatacgcgaggaaccttaccaaggtttaaatggggactgacaggggtagagatacccttttcttcggacagttttcaaggtgctgcatggttgtcgtcagctcgtgccgtgaggtgtcaggttaagtcctataacgagcgcaacccctgccattagttgctaacgagtaaggtcgagccctctaatgggactgccggtgcaaaccgagaggaaggtggggatgacgtcaaatcatcacggcccttacatcttgggctacacacgtgctacaatggccgttacagagagcagccactgcgtgagcaggcgcgaatctataaagacggtcacagttcggatcggagtctgcaactcgactccgtgaagctggaatcgctagtaatcggatatcagccatgatccggtgaatacgttcccgggccttgtacacaccgcccgtcaagccatggaagctgggagtacctgaagacggttaccgcaaggagctgttaggtaaa

SEQ ID NO: 482 - DNA, 1450 bp, Capnocytophaga sp.
  S1b
  modified_base (31)..(31): a, c, t, g, unknown or other
  modified_base (83)..(83): a, c, t, g, unknown or other
  modified_base (376)..(376): a, c, t, g, unknown or other
  modified_base (409)..(409): a, c, t, g, unknown or other
  modified_base (449)..(449): a, c, t, g, unknown or other
  modified_base (455)..(455): a, c, t, g, unknown or other
  modified_base (513)..(514): a, c, t, g, unknown or other
  modified_base (523)..(523): a, c, t, g, unknown or other
  modified_base (772)..(772): a, c, t, g, unknown or other
  modified_base (1001)..(1003): a, c, t, g, unknown or other
  modified_base (1062)..(1062): a, c, t, g, unknown or other
  modified_base (1077)..(1077): a, c, t, g, unknown or other
  modified_base (1113)..(1113): a, c, t, g, unknown or other
  modified_base (1215)..(1215): a, c, t, g, unknown or other
  modified_base (1419)..(1419): a, c, t, g, unknown or other
  modified_base (1441)..(1441): a, c, t, g, unknown or other
acgatgaagagtttgatcctggctcaggatnaacgctagcggcaggcctaacacatgcaagtcgaggagaagccttcgggctnaraccggcgyacgggtgcgtaacgcgtatacaatctgcctttcactgggggatagcccgaagaaatttggattaataccccatagtatagtaatacggcatcgtgatactattaaagcttaggtggtgaaagatgagtatgcgttctattagctagttggagaggtaacggctccccaaggctatgatagataggggttctgagagggatgtcccccacactggtactgagatacggaccagactcctacgggaggcagcagtgaggaatattggacaatggtcggaagactnatccagccatgccgcgtgcaggatgaaggtctnatggattgtaaactgcttttgtaagggaagaataaggctncgcgtngtttgatgacggtaccttacgaataagcatcggctaactccgtgccagcagccgcggnnatacggagnatgcgagcgttatccggaatcattgggtttaaagggtctgtaggcgggcttgtaagtcagaggtgaaagcgctcagctcaactgagcaactgcctttgaaactgttggtcttgaatggttgtgaagtagttggaatgtgtagtgtagcggtgaaatgcttagatattacacagaacaccgatagcgaaggcatattactaacaattaattgacgctgatggacgaaagcgtggggagcgaacaggattngataccctggtagtccacgctgtaaacgatggatactagctgtttggtttaaggattgagtggctaagcgaaagtgataagtatcccacctggggagtacgttcgcaagaatgaaactcaaaggaattgacgggggcccgcacaagcggtggagcatgtggtttaattcgatgatacgcgaggaaccttaccaaggtttaaatggrgactgacaggggtagagatacgnnnttcttcggacagttttcaaggtgctgcatggttgtcgtcagctcgtgccgtgaggtgtnaggttaagtcctatnacgagcgcaacccctgccattagttgctaacgagtnaagtcgagccctctaatgggactgccggtgcaaaccgtgaggaaggtggggatgacgtcaaatcatcacggcccttacatcttgggctacacacgtgctacnatggccgttacagagagcagccactgcgtgagcaggcgcgaatctataaagacggtcacagttcggatcggagtctgcaactcgactccgtgaagctggaatcgctagtaatcggatatcagccatgatccggtgaatacgttcccgggccttgtacacaccgcccgtcaagccatggaagctgggagtacctgaagacggttnccgcaaggagctgtttagggtnaaactagtg

SEQ ID NO: 483 - DNA, 1442 bp, Capnocytophaga sp.
  oral clone AH015
  modified_base (537)..(537): a, c, t, g, unknown or other
ggctcaggatgaacgctagcggcaggcctaacacatgcaagtcgagggagaagcctttcggggcagaaaccggcgcacgggtgcgtaacgcgtatgcaacctacctttcacagggggatagcccgaagaaatttggattaataccccataatattgttggatggcatcatctgataattaaaactgtggtggtgaaagatgggcatgcgtcctattagctagttggagtggtaacggcaccccaaggctatgataggtaggggtcctgagagggagatcccccacactggtactgagacagggaccagactcctacgggaggcagcagtgaggaatattggtcaatggtcggaagactgaaccagccatgccgcgtgcaggaagaatgccttatgggttgtaaactgcttttatatgggaagaataaggtgtaacgtgtacattgatgacggtaccatatgaataagcatcggctaactccgtgccagcagccgcggtaatacggaggatgcgagcgttattcggaatcattgggtntaaagggtctgtaggcgggctattaagtcaggggtgaaaggtttcagcttaactgagaaattgcctttgatactggtagtcttgaatatctgtgaagttcttggaatgtgtagtgtagcggtgaaatgcttagatattacacagaacaccgattgcggaggcaggggactaacagacgattgacgctgagagacgaaagcgtggggagcgaacaggattmgataccctggtagtccacgctgtaaacgatggatactagctgtttggagaaatttgagtggctaagcgaaagtgataagtatcccacctggggagtacgcacgcaagtgtgaaactcaaaggaattgacgggggcccgcacaagcggtggagcatgtggtttaattcgatgatacgcgaggaaccttaccaaggtytaaatggagactgacaggggcagagatgcctttttcttcggacagttttcaaggtgctgcatggttgtcgtcagctcgtgccgtkaggtgtcaggttaagtcctataacgagcgcaacccctattgttagttaccagcacgtaatggtggggactcwagcaagactgccggtgtaaaccgtgaggaaggtggggatgacgtcaaatcatcacggcccttacatcttgggctacacacgtgctacaatggtcgttacagagagcagscactgcgcgagcaggagcgaatctataaagacggtcacagttcggatcggagtctgcaactcgactccgtgaagctggaatcgctagtaatcggatatcagccatgatccggtgaatacgttcccgggccttgtacacaccgcccgtcaagccatggwagctgggggtacctgaagtcggttgccgcaaggagctgcctagggtaaaaccagtgactggggct

SEQ ID NO: 484 - DNA, 1529 bp, Capnocytophaga sp.
  oral clone ASCH05
  modified_base (974)..(974): a, c, t, g, unknown or other
  modified_base (1016)..(1016): a, c, t, g, unknown or other
gagagtttgatcatggctcaggatgaacgctagctacaggcttaacacatgcaagtcgaggggagaggttaccttcgggtaactgaaaccggcgcacgggtgcgtaacgcgtatacaatctgcctttcacatagggatagcccgaagaaatttggattaatacctaatggtatataagagcggcatcgtttttatattaaagctacggtggtgaaagatgagtatgcgttctattagctagttggagaggtaacggctccccaaggcgacgatagataggggttctgagagggatgtcccccacactggtactgagatacggaccagactcctacgggaggcagcagtgaggaatattggacaatggtcggaagactgatccagccatgccgcgtgcaggatgaaggtcctatggattgtaaactgcttttgtaagggaagaataaggagtacgtgtactttgatgacggtaccttacgaataagcatcggctaactccgtgcccgcagccgcggtaatacggaggatgcgagcgttatccggaatcattgggtttaaagggtccgtaggcgggctgataagtcagaggtgaaagcgcttagctcaactaagcaactgcctttgaaactgtcagtcttgaatgattgtgaagtagttggaatgtgtagtgtagcggtgaaatgcttagatatgacgaagaactccgattgcgaaggcagcttacgggagcacaactgacgctgaagctcgaaggtgcgggtatcaaacaggattagataccctggtagtccgcacagtaaacgctggatgcccgctgttggttcattagagtcagcggccaagcgaaagtgataagtatcccacctgggggagtacgcacgcaagtgtgaaactcaaaggaattgacgggggcccgcacaagccggaggaacatgtggtttaattcgatgatacgcgaggaaccttaccaaggngttgaatgggaactgacagaggtagagatgaagaggcccttncggacagttttcaaggtgctgcatggttgtcgtcagctcttgccgtgaggtgtcggcttaagtgccataacgagcgcaaccccttttcttagttgccatcaggtcatgctgggcactctgggaatactgccaccgtaaggtgtgaggaaggtggggatgacgtcaaatcatcacggcccttacatcttgggctacacacgtgctacaatgggctttaatagaggggagcgaagccgcgaggtggagcaaaccccagaaacaagctctcagttcggatcggagtctgcaactcgactccgtgaagctggaatcgctagtaatcggatatcagccatgatccggtgaatacgttcccgggccttgtacacaccgcccgtcacacaacgaaagtcggaagtacccaaagccggtggggtaaccttcgggagccagccgtctaaggtaaagtcgatgattggggtgaagtcgtaacaaggtagccgtatcggaaggtgcggctggaacacctccttc

SEQ ID NO: 485 - DNA, 1357 bp, Capnocytophaga sp.
  oral clone ID062
gagtttgattctggctcaggatgaacgctagcggcaggcctaacacatgcaagtcgagggaccggcgcacgggtgcgtaacgcgtatataatctaccttatacagagggatagcccgaagaaatttggattaatacttcatagttaaaggcggtataagatgagtatgcgtcctattagctagttggtatggtaacggcataccaaggctacgataggtaggggtcctgagagggagatcccccacactggtactgagacacggaccagactcctacgggaggcagcagtgaggaatattggtcaatgggcgagagcctgaaccagccaagtcgcgtgaaggatgactgtctatggattgtaaacttcttttatacgggaatatgcatgtaccgtatgaataagcatcggctaactccgtgccagcagccgcggtaatacggaggatgcgagcgttatccggaatcattgggtttaaagggtccgtaggcgggctgataagtcagaggtgaaagcgcttagctcaactaagcaactgcctttgaaactgtcagtcttgaatgattgtgaagtagttggaatgtgtagtgtagcggtgaaatgcttagatattacacagaacaccgatagcgaaggcatattactaacaatatcgacgctgatggacgaaagcgtggggagcgaacaggattagataccctggtagtccacgctgtaaacgatggatactagctgtttggatatgagtggctaagcgaaagtgataagtatcccacctggggagtacgcacgcaagtgtgaaactcaaaggaattgacgggggcccgctcaagcggtggagcatgtggtttaattcgatgatacgcgaggaaccttaccaaggtttaaatggtcaaggtgctgcatggttgtcgtcagctcgtgccgtgaggtgtcaggttaagtcctataacgagcgcaacccctgccattagttgctaacgatcgagccctctagtgggactgccggtgcaaaccggaggaaggtggggatgacgtcaaatcatcacggcccttacatcttgggctacacacgtgctacaatggccgtcagagagcagccactgcgcgagcaggagcgaatctatacggtcacagttcggacggagtctgcaactcgactccggaagctggaatcgctagtaatcggatatcaaccatgatccggtgaatacgttcccgggccttgtacacaccgcccgtcaagccatggaagctgggggtacctgaaggcggtcgctgattagggtaaaactagtgactggggctaagtcgtaacaaggtagccgtaccggaaggtgcgggtggatcacctcctt

SEQ ID NO: 486 - DNA, 1509 bp, Capnocytophaga sp.
  oral strain A47ROY
  modified_base (888)..(888): a, c, t, g, unknown or other
  modified_base (895)..(896): a, c, t, g, unknown or other
  modified_base (955)..(955): a, c, t, g, unknown or other
  modified_base (979)..(979): a, c, t, g, unknown or other
  modified_base (999)..(999): a, c, t, g, unknown or other
  modified_base (1016)..(1016): a, c, t, g, unknown or other
  modified_base (1019)..(1019): a, c, t, g, unknown or other
agagtttgatcctggctcaggatgaacgctagcggcaggcctaacacatgcaagtcgagggggaagttactttcgggtaactgagaccggcgtacgggtgcgtaacgcgtatacaatctgcctttcactgggggatagcccgaagaaatttggattaataccccatagtatagtagtgtggcatcacacaactattaaagccttggtggtgaaagatgagtatgcgttctattagctagttggagaggtaacggctccccaaggctacgatagataggggttctgagagggatgtcccccacactggtactgagatacggaccagactcctacgggaggcagcagtgaggaatattggacaatggtcggaagactgatccagccatgccgcgtgcaggatgacggccttatgggttgtaaactgcttttgtaagggaagaataaggagtacgtgtactttgatgacggtaccttacgaataagcatcggctaactccgtgccagcagccgcggtaatacggaggatgcgagcgttatccggaatcattgggtttaaagggtccgtaggcgggctaataagtcagaggtgaaagcgcttagctcaactaagcaactgcctttgaaactgttggtcttgaatggttgtgaagtagttggaatgtgtagtgtagcggtgaaatgcttagatattacacagaacaccgatagcgaaggcatattactaacaattaattgacgctgatggacgaaagcgtggggagcgaacaggattagataccctggtagtccacgctgtaaacgatggatactagctgtttggtctaaggattgagtggctaagcgaaagtgataagtatcccacctggggagtacgttcgcaagaatganactcaanngaattgacgggggcccgcacaagcggtggagcatgtggtttaattcgatgatacgcgangaaccttcccagggtttaaatggngactgacagatgtagagatncctccttcttcggacanttntcaaggtgctgcatggttgtcgtcagctcgtgccgtgaggtgtcaggttaagtcctataacgagcgcaacccctgccattagttgctaacgagtaaggtcgagccctctaatgggactgccggtgcaaaccgtgaggaaggtggggatgacgtcaaatcatcacggcctttacatcttgggctacacacgtgctacaatggccgttacagagagcagccactgcgtgagcaggcgcgaatctataaagacggtcacagttcggatcggagtctgcaactcgactccgtgaagctggaatcgctagtaatcggatatcagccatgatccggtgaatacgttcccgggccttgtacacaccgcccgtcaagccatggaagctgggagtacctgaagacggtcaccgcaaggagctgtttagggtaaaactagtgactggggctaagtcgtaacaaggtagccgtaccggaaggtgcggctggatcacctccc

SEQ ID NO: 487 - DNA, 1463 bp, Capnocytophaga sp.
  oral strain S3
  modified_base (33)..(33): a, c, t, g, unknown or other
  modified_base (520)..(520): a, c, t, g, unknown or other
  modified_base (1008)..(1008): a, c, t, g, unknown or other
taacgatgaagagtttgatcctggctcaggatnaacgctagcggcaggcctaacacatgcaagtcgagggagaagcccttcggggcagaaaccggcgcacgggtgcgtaacgcgtatgcaacctacctttcacagggggatagcccgaagaaatttggattaataccccataatattgttggatggcatcattttgcaattaaaactgcggtggtgagagatgggcatgcgtcctattagctagttggagtggtaacggcaccccaaggctacgataggtaggggtcctgagagggagatcccccacactggtactgagacagggaccagactcctacgggaggcagcagtgaggaatattggtcaatggtcggaagactgaaccagccatgccgcgtgcaggaagaatgccttatgggttgtaaactgcttttatatgggaagaataaggtgtacgagtacattgatgacggtaccatatgaataagcatcggctaactccgtgccagcagccgcggtnatacggaggatgcgagcgttattcggaatcattgggtttaaagggtctgtaggcgggctattaagtcaggggtgaaaggtttcagcttaactgagaaattgcctttgatactggtagtcttgaatatctgtgaagttcttggaatgtgtagtgtagcggtgaaatgcttagatattacacagaacaccgattgcgaaggcaggggactaacagacaattgacgctgagagacgaaagcgtggggagcgaacaggattagataccctggtagtccacgctgtaaacgatggatactagctgtttgatgataagttgagtggctaagcgaaagtgataagtatcccacctggggagtacgcacgcaagtgtgaaactcaaaggaattgacgggggcccgcacaagcggtggagcatgtggtttaattcgatgatacgcgaggaaccttaccaaggtttaaatggggactgacaggtgtagagatacgccnttcttcggacagttttcaaggtgctgcatggttgtcgtcagctcgtgccgtgaggtgtcaggttaagtcctataacgagcgcaacccctattgttagttaccagcacgtagtggtggggactctagcaagactgccggtgtaaaccgtgaggaaggtggggatgacgtcaaatcatcacggcccttacatcttgggctacacacgtgctacaatggtcgttacagagagcagccactgcgtgagcaggagcgaatctataaagacgatcacagttcggatcggagtctgcaactcgactccgtgaagctggaatcgctagtaatcggatatcagccatgatccggtgaatacgttcccgggccttgtacacaccgcccgtcaagccatggaagctgggagtacctgaagtcggtgaccgcaaggagctgcctagggtaaaaccagtgactggggc

SEQ ID NO: 488 - DNA, 1516 bp, Capnocytophaga sp.
  oral taxon 338
acgatgaagagtttgatcctggctcaggatgaacgctagcggcaggcctaacacatgcaagtcgagggagaagcccttcggggcagaaaccggcgcacgggtgcgtaacgcgtatgcaacctacctttcacagggggatagcccggagaaatttggattaatatcccataatattgttggatggcatcatttggcaattaaagttacgatggtggaagatgggcatgcgtcctattagctagttggcgaggtaacggctcgccaaggcgacgataggtaggggtcctgagagggagatcccccacactggtactgagacagggaccagactcctacgggaggcagcagtgaggaatattggtcaatggtcggaagactgaaccagccatgccgcgtgcaggaaggcggccttatgggttgtaaactgcttttatatgggaagaataaggagtacgtgtactttgatgacggtaccatatgaataagcatcggctaactccgtgccagcagccgcggtaatacggaggatgcgagcgttattcggaatcattgggtttaaagggtctgtaggcgggctattaagtcaggggtgaaatatttcagcttaactgggaaattgcctttgatactggtagtcttgaatatttgtgaagtttttggaatgtgtagtgtagcggtgaaatgcatagatattacacagaacaccgattgcggaggcaggggactaacaaataattgacgctgagagacgagagcgtggggagcgaacaggattagataccctggtagtccacgctgtaaacgatggatactagctgtttggtaggaatattgagtggctaagcgaaagtgataagtatcccacctggggagtacgcacgcaagtgtgaaactcaaaggaattgacgggggcccgcacaagcggtggagcatgtggtttaattcgatgatacgcgaggaaccttaccaaggtttaaatggtgactgacgtacctagagatgggtatttcttcggacagttatcaaggtgctgcatggttgtcgtcagctcgtgccgtgaggtgtcaggttaagtcctataacgagcgcaacccctattgatagttaccagcacgtaaaggtggggactctattgagactgccggtgtaaaccgtgaggaaggtggggatgacgtcaaatcatcacggcccttacatcttgggctacacacgtgctacaatggtcgttacagagagcagctactgcgtgagcaggtgcgaatcttaaaagacggtcacagttcggatcggagtctgcaactcgactccgtgaagctggaatcgctagtaatcgcatatcagccatgatgcggtgaatacgttcccgggccttgtacacaccgcccgtcaagccatggaagctgggagtacctgaagttggttaccgcaaggagctacctagggtaaaaccagtgactggggctaagtcgtaacaaggtagccgtaccggaaggtgtggctggaacacctcctttct

SEQ ID NO: 489 - DNA, 1518 bp, Capnocytophaga sputigena
acgatgaagagtttgatcctggctcaggatgaacgctagcggcaggcctaacacatgcaagtcgagggagaggttaccttcgggtaaccaaaaccggcgcacgggtgcgtaacgcgtatacaatctgcctttcacatagggatagcccgaagaaatttggattaatacctaatggtatataggagcggcatcgtttttatattaaagctacggtggtgaaagatgagtatgcgttctattagctagttggagaggtaacggctccccaaggcgacgatagataggggttctgagagggatgtcccccacactggtactgagatacggaccagactcctacgggaggcagcagtgaggaatattggacaatggtcggaagactgatccagccatgccgcgtgcaggatgaaggtcctatggattgtaaactgcttttgtaagggaagaataaggagtacgtgtactttgatgacggtaccttacgaataagcatcggctaactccgtgccagcagccgcggtaatacggaggatgcgagcgttatccggaatcattgggtttaaagggtccgtaggcgggctgataagtcagaggtgaaagcgcttagctcaactaagcaactgcctttgaaactgtcagtcttgaatgattgtgaagtagttggaatgtgtagtgtagcggtgaaatgcttagatattacacagaacaccgatagcgaaggcatattactaacaatttattgacgctgatggacgaaagcgtggggagcgaacaggattagataccctggtagtccacgctgtaaacgatggatactagctgtttggagcaatctgagtggctaagcgaaagtgataagtatcccacctggggagtacgcacgcaagtgtgaaactcaaaggaattgacgggggcccgcacaagcggtggagcatgtggtttaattcgatgatacgcgaggaaccttaccaaggtttaaatgggaactgacagaggtagagatacctccttcttcggacagttttcaaggtgctgcatggttgtcgtcagctcgtgccgtgaggtgtcaggttaagtcctataacgagcgcaacccctgccattagttgctaacgagtcaagtcgagccctctagtgggactgccggtgcaaaccgtgaggaaggtggggatgacgtcaaatcatcacggcccttacatcttgggctacacacgtgctacaatggccgttacagagagcagccactgcgcgagcaggagcgaatctataaagacggtcacagttcggatcggagtctgcaactcgactccgtgaagctggaatcgctagtaatcggatatcagccatgatccggtgaatacgttcccgggccttgtacacaccgcccgtcaagccatggaagctgggggtacctgaagacggtcaccgcgaggagctgtttagggtaaaactagtgactggggctaagtcgtaacaaggtagccgtaccggaaggtgcggctggaacacctcctttct

SEQ ID NO: 490 - DNA, 1534 bp, Cardiobacterium hominis
gaactgaagagtttgattctggctcagattgaacgctggcggcatgcttaacacatgcaagtcgaacggaaacgatggagcttgctccaggcgtcgagtggcggacgggtgagtaacgcatgggaatctgccttttgctgggggataacgtagggaaacttacgctaataccgcataagacctaagggtgaaagcgggggaccgaaaggcctcgcggcaagagatgagcccatgttggattagctagttggtggggtaaaggcctaccaaggcgacgatccatagctggtctgagaggatgatcagccacactgggactgagacacggcccagactcctacgggaggcagcagtggggaatattggacaatggggggaaccctgatccagcaatgccgcgtgtgtgaagaaggccttcgggttgtaaagcactttcagtagggaggaaaggtgcgtagttaatacctgcgcaattgacgttacctacagaagaagcaccggctaactccgtgccagcagccgcggtaatacggagggtgcgagcgttattcggaattactgggcgtaaagcgcacgcaggcggttgcccaagtcagatgtgaaagccccgggcttaacctgggaactgcatttgaaactgggcgactagagtatgaaagaggaaagcggaatttccagtgtagcagtgaaatgcgtagatattggaaggaacaccgatggcgaaggcagctttctgggtcgatactgacgctcatgtgcgaaagcgtggggagcaaacaggattagataccctggtagtccacgccctaaacgatgtcaactaggcgtcgggttgttaaagactcggtgccggagctaacgcattaagttgaccgcctggggagtacggccgcaaggttgaaactcaaagaaattgacggggacccgcacaagcggtggagcatgtggtttaattcgatgcaacgcgaagaaccttaccaggccttgacatcctaggaacttggcagagatgccttggtgccttcgggaacctagagacaggtgttgcatggctgtcgtcagctcgtgtcgtgagatgttgggttaagtcccgcaacgagcgcaacccttatccttacttgccagcactttgggtgggaactgtaaggagactgccggtgacaaaccggaggaaggtggggatgacgtcaagtcatcatggcccttacggcctgggctacacacgtgctacaatggtcggtacagacggtagcgaagccgcgaggtggagccaatctgagaaagccgatcgtagtccggattgcagtctgcaactcgactgcatgaagtcggaatcgctagtaatcgcgaatcagcatgtcgcggtgaatacgttcccgggtcttgtacacactgcccgtcacaccatgggagtttgttgcaccagaagcaggtagcttaacttaggagggcgcttgccacggtgtggccgatgactggggtgaagtcgtaacaaggtaaccgtaggggaacctgcggttggatcacctccttt

SEQ ID NO: 491 - DNA, 1493 bp, Cardiobacterium valvarum
gcgtgcttaacacatgcaagtcgaacggaaacgacggagcttgctccgggcgtcgagtggcggacgggtgagtaatgcatgggaatctgccttttgctgggggataacgtagggaaacttacgctaataccgcataagacctgagggtgaaagtgggggaccgttaaggcctcacggcagaagatgagcccatgtcggattagctagttggtggggtaaaggcctaccaaggcgacgatccgtagctggtctgagaggatgatcagccacactgggactgagacacggcccagactcctacgggaggcagcagtggggaatattggacaatgggggcaaccctgatccagcaatgccgcgtgtgtgaagaaggccttcgggttgtaaagcactttcagcagggaggaaagcatcatggttaacacccatggtagtgacgttacctgcagaagaagcaccggctaactccgtgccagcagccgcggtaatacggagggtgcaagcgttattcggaattactgggcgtaaagcgcacgcaggcggctacctaagtcagatgtgaaagccccgggcttaacctgggaactgcatttgaaactgggcagctagagtatgaaagaggaaagcggaatttccagtgtagcagtgaaatgcgtagatattggaaggaacaccgatggcgaaggcagctttctgggtcgatactgacgctcatgtgcgaaagcgtggggagcaaacaggattagataccctggtagtccacgccctaaacgatgtcaactaggcgtcgggttgtatagactcggtgccgcagctaacgcattaagttgaccgcctggggagtacggccgcaaggttgaaactcaaagaaattgacggggacccgcacaagcggtggagcatgtggtttaattcgatgcaacgcgaagaaccttaccaggccttgacatccagagaacttagcagagatgctttggtgccttcgggaactctgagacaggtgttgcatggctgtcgtcagctcgtgtcgtgagatgttgggttaagtcccgcaacgagcgcaacccttatccttacttgccagcacttagggtgggaactgtaaggagactgccggtgacaagccggaggaaggtggggatgacgtcaagtcatcatggcccttacggcctgggctacacacgtgctacaatggtcggtacagacggtagcgaagccgcgaggtggagccaatctgagaaagccgatcgtagtccggattgcagtctgcaactcgactgcatgaagtcggaatcgctagtaatcgcgaatcagcatgtcgcggtgaatacgttcccgggtcttgtacacactgcccgtcacaccatgggagtttgttgcaccagaagcaggtagcttaacgaaagagggcgcttgccacggtgtggccgatgactggggtgaagtcgtaacaaggtaaccgtaggggaacctgcggttggatcacctcctac

SEQ ID NO: 492 - DNA, 1503 bp, Carnobacterium divergens
  modified_base (1)..(1): a, c, t, g, unknown or other
  modified_base (98)..(99): a, c, t, g, unknown or other
  modified_base (234)..(234): a, c, t, g, unknown or other
  modified_base (250)..(250): a, c, t, g, unknown or other
  modified_base (349)..(350): a, c, t, g, unknown or other
  modified_base (541)..(541): a, c, t, g, unknown or other
  modified_base (560)..(560): a, c, t, g, unknown or other
  modified_base (642)..(643): a, c, t, g, unknown or other
  modified_base (777)..(780): a, c, t, g, unknown or other
  modified_base (947)..(947): a, c, t, g, unknown or other
  modified_base (981)..(982): a, c, t, g, unknown or other
  modified_base (1037)..(1038): a, c, t, g, unknown or other
  modified_base (1043)..(1043): a, c, t, g, unknown or other
  modified_base (1067)..(1067): a, c, t, g, unknown or other
  modified_base (1114)..(1114): a, c, t, g, unknown or other
  modified_base (1401)..(1401): a, c, t, g, unknown or other
  modified_base (1424)..(1424): a, c, t, g, unknown or other
  modified_base (1500)..(1500): a, c, t, g, unknown or other
nttatatgagagtttgatcctggctcaggacgaacgctggcggcatgcctaatacatgcaagtcgaacgcacgaagttgaaaagcttgcttttcgatnnaagtaagtggcggacgggtgagtaacacgtgggtaacctgcccataagagggggataacattcggaaacggatgctaataccgcatatttcaagtgaccgcatggtcgcttgatgaaaggtggcttcggctaccncttatggatggacccncggtgcattagttagttggtgaggtaatggctcaccaagaccatgatgcatagccgacctgagagggtgatcggccacactgggactgagacacggccnngactcctacgggaggcagcagtagggaatcttccgcaatggacgaaagtctgacggagcaatgccgcgtgagtgaagaaggttttcggatcgtaaaactctgttgttagagaagaacaaggatgagagtaactgctcatcccctgacggtatctaaccagaaagccacggctaactacgtgccagcagccncggtaatacgtaggtggcnagcgttgtccggatttattgggcgtaaagcgagcgcaggcggttctttaagtctgatgtgaaagcccccggctcaaccgggnngggtcattggaaactggagaacttgagtgcagaagaggagagtggaattccatgtgtagcggtgaaatgcgtagatatatggaggaacaccagtggcgaaggcgactctctggtctgtaactgacgctgaggcnnnnaagcgtggggagcaaacaggattagataccctggtagtccacgctgtaaacgatgagtgctaagtgttggagggtttccgcccttcagtgctgcagctaacgcattaagcactccgcctggggagtacgaccgcaaggttgaaactcaaaggaattgacggggaccngcacaagcggtggagcatgtggtttaattcgaannaacgcgaagaaccttaccaggtcttgacatcctttgaccactcgagagatcgagnnttccnttcggggacaaagtgacaggtggngcatggttgtcgtcagctcgtgtcgtgagatgttgggttaagtcccncaacgagcgcaacccttattactagttgccagcattcagttgggcactctagtgagactgccggtgacaaaccggaggaaggtggggatgacgtcaaatcatcatgccccttatgacctgggctacacacgtgctacaatggatggtacaacgagtcgcgaagtcgtgaggccaagctaatctcttaaagccattctcagttcggattgtaggctgcaactcgcctacatgaagccggaatcgctagtaatcgcggatcagaacgccgcggtgaatacgttcccggntcttgtacacaccgcccgtcacnccacgagagtttgtaacacccgaagccggtgaggtaaccttttaggagccagccgtctaaggtgggatagataatnggg

SEQ ID NO: 493 - DNA, 1547 bp, Carnobacterium maltaromaticum
agagtttgatcctggctcaggacgaacgctggcggcgtgcctaatacatgcaagtcgaacgcacgaagttgaagagcttgctctttaaccaagtgagtggcggacgggtgagtaacacgtgggtaacctgcccattagagggggataacattcggaaacggatgctaataccgcatagtttcaggaatcgcatgattcttgaaggaaaggtggcttcggctaccactaatggatggacccgcggcgtattatctagttggtgaggtaatggctcaccaaggcaatgatacgtagccgacctgagagggtgatcggccacactgggactgagacacggcccagactcctacgggaggcagcagtagggaatcttccgcaatggacgaaagtctgacggagcaacgccgcgtgagtgaagaaggttttcggatcgtaaaactctgttgttaaagaagaacaaggatgagagtaactgctcatcccctgacggtatttaaccagaaagccacggctaactacgtgccagcagccgcggtaatacgtaggtggcaagcgttgtccggatttattgggcgtaaagcgagcgcaggcggttctttaagtctgatgtgaaagcccccggctcaaccggggagggtcattggaaactggagaacttgagtgcagaagaggagagtggaattccacgtgtagcggtgaaatgcgtagatatgtggaggaacaccagtggcgaaggcgactctctggtctgtaactgacgctgaggctcgaaagcgtggggagcaaacaggattagataccctggtagtccacgccgtaaacgatgagtgctaagtgttggagggtttccgcccttcagtgctgcagctaacgcattaagcactccgcctggggagtacggccgcaaggctgaaactcaaaggaattgacggggacccgcacaagcggtggagcatgtggtttaatttggaagcaacgcgaagaaccttaccaggtcttgacatccttttgaccacttctagagatagagcttttcccttcggggacaaagtgacaggtggtgcatggttgtcgtcagctcgtgtcgtgagatgttgggttaagtcccgcaacgagcgcaacccttattactagttgccagcatttagttgggcactctagtgagactgccggtgacaaaccggaggaaggtggggatgacgtcaaatcatcatgccccttatgacctgggctacacacgtgctacaatggatggtacaacgagtcgcaaggtcgcgaggccaagctaatctcttaaagccattctcagttcggattgtaggctgcaactcgcctacatgaagccggaatcgctagtaatcgcggatcagaacgccgcggtgaatacgttcccgggtcttgtacacaccgcccgtcacaccacgagagtttgtaacacccgaagccggtgaggtaaccttttaggagccagccgtctaaggtgggatagataattggggtgaagtcgtaacaaggtagccgtatcggaaggtgcggctggatcacct

SEQ ID NO: 494 - DNA, 1497 bp, Catabacter hongkongensis
agagtttgatcctggctcaggacgaacgctggcggcgtgcttaacacatgcaagtcgaacgaagttgctctttgggaagccctcgggtggaactgtgagtatacttagtggcggacgggtgagtaacgcgtgagcaatctgccctgcaatgggggacaacagttggaaacgactgctaataccgcataagaccacgaaaccgcatggtttagaggtaaaaggattcattcgatgcaggatgagctcgcgtcccattagatagttggtgaggtaacggcccaccaagtcaacgatgggtagccgacctgagagggtgatcggccacattggaactgagaaacggtccaaactcctacgggaggcagcagtggggaatattgggcaatgggggaaaccctgacccagcaacgccgcgtgaaggaagaaggccttcgggttgtaaacttttgtcctatgggacgaaaaaaatgacggtaccataggaggaagctccggctaactacgtgccagcagccgcggtaatacgtagggagcaagcgttgtccggaattactgggcgtaaagggtgcgtaggtggccatgtaagtcaggtgtgaaagaccggggctcaaccccggggttgcacttgaaactgtgtggcttgagtacaggagagggaagtggaattcctagtgtagcggtgaaatgcgtagatattaggaggaacaccagtggcgaaggcgactttctggactgtaactgacactgaggcacgaaagcgtggggagcaaacaggattagataccctggtagtccacgccgtaaacgatggatactaggtgtggggggcgatagtcctccgtgccgaagctaacgcattaagtatcccgcctggggagtacgatcgcaaggttgaaactcaaaggaattgacgggggcccgcacaagcagcggagcatgtggtttaattcgaagcaacgcgaagaaccttaccaaggcttgacatcctctgacgcatatagagatatatgttcccttcggggcagagagacaggtggtgcatggttgtcgtcagctcgtgtcgtgagatgttgggttaagtcccgcaacgagcgcaacccttgttgctagttgccagcacgtaaaggtgggaactctagtgagactgccggggacaactcggaggaaggtggggacgacgtcaaatcatcatgccccttatgtcttgggctacacacgtgctacaatggccggtacaaagggcagcgacctcgtaagagtaagcgaatctcaaaaagccggccccagttcggattgtgggctgcaacccgcccacatgaagtcggagttgctagtaatcgcgaatcagcatgtcgcggtgaatgcgttcccgggccttgtacacaccgcccgtcacaccacggaagttgggagcacccgaagccagtggcttaaccgtaaggagagagctgtcgaaggtgagatcaatgactggggtgaagtcgtaacaaggtaacc

SEQ ID NO: 495 - DNA, 1485 bp, Catenibacterium mitsuokai
agagtttgatcctggctcaggatgaacgctggcgccgtgcctaatacatgcaagtcgaacgaatctccttcggaagataagtgcgaacgggtgagtaatacataggtaacctgcccctgtgcgggggataacaggaggaaactcctgctaataccgcatagccatgagcaccgcatggagctcatgccaaatatccttcacgggatagcgcagggatggacctatggcgcattagctagttggcggggcaacggcccaccaaggcaacgatgcgtagccggcctgagagggcggacggccacattgggactgagacacggcccagactctacgggaggcagcagtagggaattttcggcaatgggggaaaccctgaccgagcaacgccgcgtgagcgaagaaggcttcgggtcgtaaagctctgttgtaaaggaagaacgtcggacacaggaaatggtgtgcgagtgacggtactttaccagaaagccacggctaactacgtgccagcagccgcggtaatccgtaggtgccgaccgttatccggaatcattggccgtaaagagggagcaggcggccgcaagggtctgtggtgaaagaccgaagctaaacttcggtaagccatggaaaccgggcggctagagtgcggaagaggatcgtggaattccatgtgtagcggtgaaatgcgtagatatatggaggaacaccagtggcgaagcgacggtctgggccgcaactgacgctcattcccgaaaccgtggggagccaatggcattagataccctagtagtccacgccgtaaacgatggtcactaagtgtcgggggtcaaaccccggtgctgcagtcaacgcaataagtgacccgcctgagtagtacgttcgcaagaatgaaactcaaaggaattgacgggggcccgcacaagcggtggagcatgtggtttaattcgaagcaacgcgaagaaccttaccaggtcttgacatcgatctaaaagggatggagacatcctcatagctatagagaagacaggtggtgcatggttgtcgtcagctcgtgtcgtgagatgttgggttaagtcccgcaacgagcgcaacccctgtcgccagttaccatcattgagttggggactctggcgagactgcctctgcaaggaggaggaaggcggggatgacgtcaaatcatcatgccccttatgacctgggccacacacgtgctacaatggacgggacagagggaagcgaaggcgcgagcgcaagcggaccccagaaacccgttcccagttcggactgcagtctgcaactcgactgcacgaagccggaatcgctagtaatcgcggatcagcatgccgcggtgaatacgttctcgggccttgtacacaccgccgtcacaccatgagagttggcaacacccgaaggcggcggcccaacccgcaaggagggagctgtctaaggtggggctgatgattggggtgaagtcgtaacaaggtaacc

SEQ ID NO: 496 - DNA, 1292 bp, Catonella sp.
  P1 oral clone MB5_P12
gatgaacgctggcggcgtgcctaacacatgcaagtcgaacgagtggcggacgggtgagtaacgcgtgggcaacctgccctatacagggggatagcagctggaaacggctggtaagaccgcataaggaaatcaggtataggatggacccgcgtccgattagccagttggcagggtaaaagcctaccaaagcgacgatcggtagccggactgagaggtcgggcggccacattgggactgagacacggcccaaactcctacgggaggcagcagtgggggatattgcacaatggaggaaactctgatgcagcgacgccgcgtgagtgaagaagtatttcggtatgtaaagctctatcagcagggaagatgacggtacctgactaagaagccccggctaactacgtgccagcagccgcggtaatacgtagggggcaagcgttatccggatttactgggtgtaaagggagcgcaggcggttttgcaagttgagagtggaagcagggggctcaaccccctgactgctcccaaaactgtaaaacttgagtatgggagaggcaggcggaattcctagtgtagcggtgaaatgcttagatattaggaagaacaccggtggcgaaggcggcctgctggaccaactgacgctgaggctcgaaagcgtgggtagcaaacaggattagataccctggtagtccacgctgtaaacgatgaatactaggtgctgggatttcggtgccgtcgcaaacgcattaagtattccacctggggagtacgttcgcgagaatgaagctcaagggaattgacggggacccgcacaagcggtggagcatgtggtttaattcgacgcaacgcgaagaaccttacccggtcttgagatcgacaggtggtgcatggttgtcgtcagctcgtgtcgtgagatgttgggttaagtcccgcaacgagcgcaacccctatttttagtagccagcggccgggcactctaaagagactgccgaggataactcggaggaaggcggggatgacgtcaaatcatcatgccccttatgaccggggctacacacgtgctacaatgtcagtcagagggaagcgaaggcgtgagtcggagcaaatctcaggctgcctcagttcggatgtagtctgcaactcgactacagaagctggaatcgctagtaatcgcaaatcagaatgttgcggtgaatacgttcccgggtcttgtacacaccgcccgtcacaccatgggagtcggaaatgcccgaagtcagtgcctaaggagctgccgaaggcaggtctggtgactg

SEQ ID NO: 497 - DNA, 1553 bp, Catonella morbi
atgagagtttgatcctggctcaggacgaacgctggcggcgtgcctaatacatgcaagtcgaacgaaccgcgactgagtgcttgcacttggtcaaggtgagtggcgaacgggtgagtaacacgtgggtaacctacctcatagtgggggataacagtcggaaacgactgctaataccgcataggacatgggatcacatgattctgtgaggaaaggtggcgcaagctatcgctaagagatggacccgcggtgcattagctagttggtagggtaagggcctaccaaggcgatgatgcatagccgacctgagagggtgatcggccacattgggactgagacacggcccaaactcctacgggaggcagcagtagggaatcttccgcaatggacgcaagtctgacggagcaacgccgcgtgagtgaagaaggtcttcggatcgtaaagctctgttgttagagaagaacagcgcatagagtaactgctatgcgtgtgacggtatctaaccagaaagccacggctaactacgtgccagcagccgcggtaatacgtaggtggcgagcgttgtccggatttattgggcgtaaagggagtgtaggcggtcttttaagtctgatgtgaaagcccacggctcaaccgtggagggtcattggaaactgggagacttgagtgcagaagaggagagcggaattccatgtgtagcggtgaaatgcgtagatatatggaggaacaccagtggcgaaggcggctctctggtctgtaactgacgctgaggctcgaaagcgtggggagcaaacaggattagataccctggtagtccacgccgtaaacgatgagtgctaagtgttggaggggttccacccttcagtgctggagttaacgcaataagcactccgcctggggagtacggccgcaaggctgaaactcaaaggaattgacggggacccgcacaagcggtggagcatgtggtttaattcgaagcaacgcgaagaaccttaccaggtcttgacatcccgacgaccgctctagagatagagtttttcttcggaacgtcggtgacaggtggtgcatggttgtcgtcagctcgtgtcgtgagatgttgggttaagtcccgcaacgagcgcaacccctataactagttgccagcattgagatggggactctagttagactgccggtgacaaaccggaggaaggtggggatgacgtcaaatcatcatgccccttatgacctgggctacacacgtgctacaatggatggtacaacgagcagcgaactcgcgagggtaagcgaatctctaaaagccattctcagttcggattgtagtctgcaactcgactacatgaagccggaatcgctagtaatcgcggatcagcacgccgcggtgaatacgttcccgggtcttgtacacaccgcccgtcacaccacgagagtttgtaacacccgaagccggtggcctaaccttttaggagggagccgtcgaaggtgggatagatgattggggtgaagtcgtaacaaggtagccgtatcggaaggtgcggctggatcacctcctttct

SEQ ID NO: 498 - DNA, 1366 bp, Catonella sp.
  oral clone FL037
gagtttgatcctggctcaggatgaacgctggcggcgtgcctaacacatgcaagtcgaacgagtggcggacgggtgagtaacgcgtgggtaacctgccccgtacagggggatagcgtcgggaaactgacggtaagaccgcatagggaaaactggtatgggatggacccgcgtccgattagccagttggcagggtaaaggcctaccaaagcttcgatcggtagccggactgagaggtcggacggccacattgggactgagacacggcccagactcctacgggaggcagcagtgggggatattgcacaatggaggaaactctgatgcagcgacgccgcgtgagtgaagaagtgctccggcatgtaaagctctttcagcagggaagatgacggtacctgaataagaagccccggctaactacgtgccagcagccgcggtaatacgtagggggcaagcgttatccggatttactgggtgtaaagggagcgcaggcggtctggcaagttgagagtggaagcagggggctcaaccccctgactgctcccaaaactgttggactggagtatgggagaggcaggcggaattcctagtgtagcggtgaaatgctcagatattaggaagaacaccggtggcgaaggcggcctgctggaccaactgacgctgaggctcgagagcgtggggagcgaacaggattagataccctggtagtccacgccgtaaacgatgaatactaggtgccgggatttcggtgccgtcgcaaacgcattgagtattccacctggggagtacgttcgcaagaatgaaactcaaaggaattgacggggacccgcgcaagcggtggagcatgtggtttaattcgaagcaacgcgaagaaccttacccggtcttgagatcgacaggtggtgcatggttgtcgtcagctcgtgtcgtgagatgttgggttaagtcccgcaacgagcgcaacccctgttcttagtagccagcggccgggcactctaaggagactgccggggataacccggaggaaggcggggatgacgtcaaatcatcatgccccttatgacttgggcgacacacgtgctacaatggcgtacaaagggaagcgagctcgtgagagtaagcgaaactcaaaacgtctcagttcggatgtagtctgcaacccgactacagaagctggaatcgctagtaatcgcagatcagcatgctgcggtgaatacgttcccgggtcttgtacacaccgcccgtcacaccatgggagtcggtaatgcccgaagccagtaaccagggagctgtcgaaggcaggactgataactggggtgaagtcgtaacaaggtagccgtatcggaaggtgcggctggaacacctcctt

SEQ ID NO: 499 - DNA, 1403 bp, Cedecea davisae
cggacgggtgagtaatgtctggggatctgcctgatggagggggataactactggaaacggtagctaataccgcataacgtcgcaagaccaaagagggggaccttcgggcctcttgccatcggatgaacccagatgggattagctagtaggtggggtaatggctcacctaggcgacgatccctagctggtctgagaggatgaccagccacactggaactgagacacggtccagactcctacgggaggcagcagtggggaatattgcacaatgggcgcaagcctgatgcagccatgccgcgtgtgtgaagaaggccttcgggttgtaaagcactttcagcgaggaggaaggcattaaggttaataacctyrgtgattgacgttactcgcagaagaagcaccggctaactccgtgccagcagccgcggtaatacggagggtgcaagcgttaatcggaattactgggcgtaaagcgcacgcaggcggtttgttaagtcggatgtgaaatccccgggctcaacctgggaactgcattcgaaactggcaagcttgagtcttgtagaggggggtagaattccaggtgtagcggtgaaatgcgtagagatctggaggaataccggtggcgaaggcggccccctggacaaagactgacgctcaggtgcgaaagcgtggggagcaaacaggattagataccctggtagtccacgccgtaaacgatgtcgacttggaggttgtgcccttgaggcgtggcttccggagctaacgcgttaagtcgaccgcctggggagtacggccgcaaggttaaaactcaaatgaattgacgggggcccgcacaagcggtggagcatgtggtttaattcgatgcaacgcgaagaaccttacctactcttgacatccagagaactttccagagatggattggtgccttcgggaactctgagacaggtgctgcatggctgtcgtcagctcgtgttgtgaaatgttgggttaagtcccgcaacgagcgcaacccttatcctttgttgccagcggttcggccgggaactcaaaggagactgccagtgataaactggaggaaggtggggatgacgtcaagtcatcatggcccttacgagtagggctacacacgtgctacaatggcgcatacaaagagaagcgacctcgcgagagcaagcggacctcataaagtgcgtcgtagtccggattggagtctgcaactcgactccatgaagtcggaatcgctagtaatcgtagatcagaatgctacggtgaatacgttcccgggccttgtacacaccgcccgtcacaccatgggagtgggttgcaaaagaagtaggtagcttaaccttcgggagggcgcttaccactttgtgattcatgactggggtgaagtcgtaccaaggtaa

SEQ ID NO: 500 - DNA, 1444 bp, Cellulosimicrobium funkei
gacgaacgctggcggcgtgcttaacacatgcaagtcgaacgatgatgcccagcttgctgggtggattagtggcgaacgggtgagtaacacgtgagtaacctgcccttgacttcgggataactccgggaaaccggggctaataccggatatgagccgccytcgcatgggggtggttggaaagtttttcggtcagggatgggctcgcggcctatcagcttgttggtggggtgatggcctaccaaggcgacgacgggtagccggcctgagagggcgaccggccacactgggactgagacacggcccagactcctacgggaggcagcagtggggaatattgcacaatgggcgaaagcctgatgcagcgacgccgcgtgagggatgaaggccttcgggttgtaaacctctttcagcagggaagaagcgcaagtgacggtacctgcagaagaagcgccggctaactacgtgccagcagccgcggtaatacgtagggcgcaagcgttgtccggaattattgggcgtaaagagctcgtaggcggtttgtcgcgtctggtgtgaaaactcgaggctcaacctcgagcttgcatcgggtacgggcagactagagtgcggtaggggagactggaattcctggtgtagcggtggaatgcgcagatatcaggaggaacaccgatggcgaaggcaggtctctgggccgcaactgacgctgaggagcgaaagcatggggagcgaacaggattagataccctggtagtccatgccgtaaacgttgggcactaggtgtggggctcattccacgagttccgtgccgcagcaaacgcattaagtgccccgcctggggagtacggccgcaaggctaaaactcaaaggaattgacgggggcccgcacaagcggcggagcatgcggattaattcgatgcaacgcgaagaaccttaccaaggcttgacatgcacgggaagccaccagagatggtggtctctttggacactcgtgcacaggtggtgcatggttgtcgtcagctcgtgtcgtgagatgttgggttaagtcccgcaacgagcgcaaccctcgtcccatgttgccagcgggttatgccggggactcatgggagactgccggggtcaactcggaggaaggtggggatgacgtcaaatcatcatgccccttatgtcttgggcttcacgcatgctacaatggccggtacaaagggctgcgataccgtaaggtggagcgaatcccaaaaagccggtctcagttcggattggggtctgcaactcgaccccatgaagtcggagtcgctagtaatcgcagatcagcaacgctgcggtgaatacgttcccgggccttgtacacaccgcccgtcaagtcacgaaagtcggtaacacccgaagcccatggcccaaccgttcgcggggggagtggtcgaaggtgggactggcgattgggact

SEQ ID NO: 501 - DNA, 1470 bp, Cetobacterium somerae
agagtttgatcctggctcaggatgaacgctgacagaatgcttaacacatgcaagtcgattcgatttaccttcgggtattgaggatggcggacgggtgagtaacgcgtaaggaacttgcctcttggtctgggacaactgttggaaacgacagctaataccggatattatgagattctcgcatgggaaacttatgaaagctatatgcgccaagagagagccttgcgttccattagctagttggtggggtaacggcccaccaaggcgacgatggatagccggcctgagagggtgaacggccacaaggggactgagacacggcccttactcctacgggaggcagcagtggggaatattggacaatgggccacaagcctgatccagcaattctgtgtgcacgatgaaggtcttcggattgtaaagtgctttcagttgggaagaagaaagtgacggtaccaacagaagaagcgacggctaaatacgtgccagcagccgcggtaatacgtatgtcgcaagcgttatccggatttattgggcgtaaagcgcgtctaggcggaaaaataagtctgatgttaaaatgcggggctcaactccgtattgcgttggaaactgtttttctagagtactggagaggtgggcggaactacaagtgtagaggtgaaattcgtagatatttgtaggaatgccgatggagaagtcagctcactggacagatactgacgctaaagcgcgaaagcgtggggagcaaacaggattagataccctggtagtccacgccgtaaacgatgatcactaggtgttgggggtcgaacctcagcgcccaagctaacgcgataagtgatccgcctggggagtacgcacgcaagtgtgaaactcaaaggaattgacggggacccgcacaagcggtggagcatgtggtttaattcgacgcaacgcgagaaaccttaccagcgtttgacatcctaagaagtttccagagatggattcgtgccggcttgccggaacttagtgacaggtggtgcatggctgtcgtcagctcgtgtcgtgagatgttgggttaagtcccgcaacgagcgcaacccctattgtatgttgctaccattaagttgagcactcatgcgatactgcctgcgatgagcaggaggaaggtggggatgacgtcaagtcatcatgccccttatacgctgggctacacacgtgctacaatgggcagtacagagagttgccaacccgcgagggtgagctaatctcttaaagctgttcttagttcggattgtactctgcaactcgagtacatgaagttggaatcgctagtaatcgcaaatcagcatgttgcggtgaatacgttctcgggtcttgtacacaccgcccgtcacaccacgagagttggttgcacctgaagtagcaggcctaaccgtaaggagggatgttcctaaggtgtgattagcgattggggtgaagtcgtaacaaggt

SEQ ID NO: 502 - DNA, 1549 bp, Chlamydia muridarum
ctgagaatttgatcttggttcagattgaacgctggcggcgtggatgaggcatgcaagtcgaacggaacaattgcttcggtgattgtttagtggcggaagggttagtaatgcatagataatttgtccttaacttgggaataacggttggaaacggccgctaataccgaatgtggcgtagattaggcatctaaattacgttaaagaaggggatcttcggacctttcggttaagggagagtctatgtgatatcagctagttggtggggtaaaggcctaccaaggctatgacgtctaggcggattgagagattggccgccaacactgggactgagacactgcccagactcctacgggaggctgcagtcgagaatctttcgcaatggacggaagtctgacgaagcgacgccgcgtgtgtgatgaaggctctagggttgtaaagcactttcgcttgggaataagagaagacggttaatacccgttggatttgagcgtaccaggtaaagaagcaccggctaactccgtgccagcagctgcggtaatacggagggtgctagcgttaatcggatttattgggcgtaaagggcgtgtaggcggaaaggtaagttagttgtcaaatctcggggctcaaccccgaatcggcatctaaaactatttttctagagggtagatggagaaaagggaatttcacgtgtagcggtgaaatgcgtagatatgtggaagaacaccagtggcgaaggcgcttttctaatttatacctgacgctaaggcgcgaaagcaaggggagcaaacaggattagataccctggtagtccttgccgtaaacgatgcatacttgatgtggatggtctcaaccccatccgtgtcggagctaacgcgttaagtatgccgcctgaggagtacactcgcaagggtgaaactcaaaagaattgacgggggcccgcacaagcagtggagcatgtggtttaattcgatgcaacgcgaaggaccttacctgggtttgacatgcatatgaccgcggcagaaatgtcgttttccgcaaggacatatgcacaggtgctgcatggctgtcgtcagctcgtgccgtgaggtgttgggttaagtcccgcaacgagcgcaacccttatcgttagttgccagcacttagggtgggaactctaacgagactgcctgggttaaccaggaggaaggcgaggatgacgtcaagtcagcatggcccttatgcccagggcgacacacgtgctacaatggccagtacagaaggtagcaagatcgcgagatggagcaaatcctcaaagctggccccagttcggattgtagtctgcaactcgactacatgaagtcggaattgctagtaatggcgtgtcagccataacgccgtgaatacgttcccgggccttgtacacaccgcccgtcacatcatgggagttggttttaccttaagtcgttgactcaacccgcaagggggagaggcgcccaaggtgaggctgatgactgggatgaagtcgtaacaaggtagccctaccggaaggtggggctggatcacctccttt

SEQ ID NO: 503 - DNA, 1553 bp, Chlamydia psittaci
ttttctgagaatttgatcttggttcagattgaacgctggcggcgtggatgaggcatgcaagtcgaacggaataatgacttcggttgttatttagtggcggaagggttagtaatacatagataatctgtcctcaacttgggaataacggttggaaacgaccgctaataccgaatgtggtatgtttaggcatctaaaacatattaaagaaggggatcttcggacctttcggttgagggagagtctatgggatatcagcttgttggtggggtaatggcctaccaaggctttgacgtctaggcggattgagagattgaccgccaacactgggactgagacactgcccagacttctacggaaggctgcagtcgagaatctttcgcaatggacgaaagtctgacgaagcgacgccgcgtgtgtgatgaaggctctagggttgtaaagcactttcgcttgggaataagagagattggctaatatccaatcgatttgagcgtaccaggtaaagaagcaccggctaactccgtgccagcagctgcggtaatacggagggtgctagcgttaatcggatttattgggcgtaaagggcgtgtaggcggaaaggaaagttagatgttaaatcttggggctcaaccccaagccagcatctaatactatctttctagagggtagatggagaaaagggaattccacgtgtagcggtgaaatgcgtagatatgtggaagaacaccagtggcgaaggcgcttttctaatttacacctgacgctaaggcgcgaaagcaaggggagcaaacaggattagataccctggtagtccttgccgtaaacgatgcatacttgatgtggatagtctcaaccctatccgtgtcgtagctaacgcgttaagtatgccgcctgaggagtacactcgcaagggtgaaactcaaaagaattgacgggggcccgcacaagcagtggagcatgtggtttaattcgatgcaacgcgaagaaccttacctgggcttgacatgtatttgaccgcggcagaaatgtcgttttccgcaaggacagatacacaggtgctgcatggctgtcgtcagctcgtgccgtgaggtgttgggttaagtcccgcaacgagcgcaacccttatcgttagttgccaacacttagggtgggaactctaacgagactgcctgggttaaccaggaggaaggcgaggatgacgtcaagtcagcatggcccttatgcccagggctacacacgtgctacaatggccagtacagaaggtagcaatatcgtgagatggagcaaatcctcaaagctggccccagttcggattgtagtctgcaactcgactacatgaagtcggaattgctagtaatggcgtgtcagctataacgccgtgaatacgttcccgggccttgtacacaccgcccgtcacatcatgggagttggttttgccttaagtcgttgactcaacctgcaaaggagagaggcgcccaaggtgaggctgatgactgggatgaagtcgtaacaaggtagccctaccggaaggtggggctggatcacctcctttt

SEQ ID NO: 504 - DNA, 1554 bp, Chlamydia trachomatis
ttttctgagaatttgatcttggttcagattgaacgctggcggcgtggatgaggcatgcaagtcgaacggagcaattgtttcggcaattgtttagtggcggaagggttagtaatgcatagataatttgtccttaacttgggaataacggttggaaacggccgctaataccgaatgtggcgatatttgggcatccgagtaacgttaaagaaggggatcttaggacctttcggttaagggagagtctatgtgatatcagctagttggtggggtaaaggcctaccaaggctatgacgtctaggcggattgagagattggccgccaacactgggactgagacactgcccagactcctacgggaggctgcagtcgagaatctttcgcaatggacggaagtctgacgaagcgacgccgcgtgtgtgatgaaggctctagggttgtaaagcactttcgcttgggaataagagaaggcggttaatacccgctggatttgagcgtaccaggtaaagaagcaccggctaactccgtgccagcagctgcggtaatacggagggtgctagcgttaatcggatttattgggcgtaaagggcgtgtaggcggaaaggtaagttagttgtcaaagatcggggctcaaccccgagtcggcatctaatactatttttctagagggtagatggagaaaagggaatttcacgtgtagcggtgaaatgcgtagatatgtggaagaacaccagtggcgaaggcgcttttctaatttatacctgacgctaaggcgcgaaagcaaggggagcaaacaggattagataccctggtagtccttgccgtaaacgatgcatacttgatgtggatggtctcaaccccatccgtgtcggagctaacgcgttaagtatgccgcctgaggagtacactcgcaagggtgaaactcaaaagaattgacgggggcccgcacaagcagtggagcatgtggtttaattcgatgcaacgcgaaggaccttacctgggtttgacatgtatatgaccgcggcagaaatgtcgttttccgcaaggacatatacacaggtgctgcatggctgtcgtcagctcgtgccgtgaggtgttgggttaagtcccgcaacgagcgcaacccttatcgttagttgccagcacttagggtgggaactctaacgagactgcctgggttaaccaggaggaaggcgaggatgacgtcaagtcagcatggcccttatgcccagggcgacacacgtgctacaatggccagtacagaaggtagcaagatcgtgagatggagcaaatcctcaaagctggccccagttcggattgtagtctgcaactcgactacatgaagtcggaattgctagtaatggcgtgtcagccataacgccgtgaatacgttcccgggccttgtacacaccgcccgtcacatcatgggagttggttttaccttaagtcgttgactcaacccgcaagggagagaggcgcccaaggtgaggctgatgactaggatgaagtcgtaacaaggtagccctaccggaaggtggggctggatcacctcctttt

SEQ ID NO: 505 - DNA, 1407 bp, Chlamydiales bacterium NS11
ggtatgggggcaactccatatagtggcgcaagggttagtaatacatagataatctgcctctgacctgggaataacggctggaaacggccatacatagataatctacctctgacctgggaataacggctggaaacggccgctaataccgaatgaggtggcataaggcatcttgtgcttatcaatgcgggggatcgaaagacctcgtggttagagaagagtctatgggatatcagctagttggtgaggtaatggctcaccaaggctaagacgtctaggcggattgagagattgaccgccaacactgggactgagacactgcccagactcctacgggaggctgcagtcgagaatctttcgcaatgggcgcaagcctgacgaagcgacgccgtgtgagcgaagaaggccttcgggttgtaaagctctttcgctagggaacaagagatataggacaataccctatagatttgatggtacttggtaaagaagcaccggctaactccgtgccagcagctgcggtaatacggagggtgcaagcattgatcggaattactgggcgtaaagggcgcgtaggcggcagaataagtcagatgtgaaattccggggctcaaccccggagctgcatttgaaactattcaactagaggacagttagggtaaacggaattccacgtgtagcggtgaaatgcgtagatatgtggaagaacaccggtggtgaagacggtttactgggctgatactgacgctgaggcgcgaaagcatggggagcaaacaggattagataccctggtagtcctagccttaaacgatgtatactaggagtaggtgggctcaacccccactgtaccggagctaacgcattaagtatgccgcctggggagtacgctcgcaagggtgaaactcaaaagaattgacgggggcccgcacaagcagtggagcatgtggtttaattcgatgcaacgcgaagaaccttacctaggctcgaaatgtagaggacgatatcagagatgatatttcccgaaagggtctctatataggtgctgcatggctgtcgtcagctcgtgccgtgaggtgtttggttaagtccagcaacgagcgcaacccttatcgttagttgccaacacgtaaaggcgggaactctaacgagactgcctgggttaaccaggaggaaggtgaggatgacgtcaagtccgcatggcctttatgtccagggctacacacgtgctacaatggtcggtacagaaggcagcgaaaccgcaaggcgaagcaaatccggaaaaaccgatctcagttcagattgtagtctcaactcggctacatgaagttggaattgctagtaatggcgtgtcagcaacaacgccgtgaatacgttcccgggccttgtacacactgcccgtcacatcatgggagt

SEQ ID NO: 506 - DNA, 1334 bp, Chlamydiales bacterium NS13
tagtggcgcaagggttagtaatacatggataatccacctctcacgtaggaataacggctggaaacggccgctaataccgaatgaggtggcttaaggcatcttaccatagtcaaagcgggggatcgaaagacctcgcggttagagaggagttcatgagatatcagctagttggtgaggtaatggctcaccaaggctaagacgtctaggcggattgagagattgaccgccaacactgggactgagacactgcccagactcctacgggaggctgcagtcgagaatcttgcgcaatgggcgcaagcctgacgaagcgacgccgtgtgagcgaagaaggccttcaggttgtaaagctctttcgctagggaacaagagagtcgggataataatcagatgacttgatggtacttggtaaagaagcaccggctaactccgtgccagcagctgccgtactaccgagggtgcaagcattgatcggaattactgcgcgtaaagggcgcgtacgccgcaggataagtcagatgtgaaattccggggctcaaccccggagctgcatttgaaactctcttgctagaggacagttagggtaaacggaattccacgtgtagcggtgaaatgcgtagatatgtggaagaacaccagtggtgaagacggttttctgggctggaactgacgctgaggcgcgggagctaggggagcaaacaggattagataccctggtagtcctagccgtaaacgatgcatactggatgtagggaggctcaacccttattgtatcggagctaacgcgttaagtatgccgcctggggagtacgcccgcaagggtgaaactcaaaagaattgacgggggcccgcacaagcagtggagcatgtggtttaattcgatgcaacgcgaagaaccttacccaggctcgaagtgtagagaacaagcgcagagatgcggtgtctcttcgggacatctatataggtgctgcatggctgtcgtcagctcgtgccgtgaggtgttgggttaagtcccgcaacgagcgcaacccttattgtcagttgccaacgcgtaaaggcggggactctggcaagactgcctaggttaactaggaggaaggtgaggatgacgtcaagtccgcatggcccttatgtccggggctacacacgtgctacaatggtcgatacagagggctgcgaagccgcgaggcggagcaaatccgataaaaccgatctcagttcagattgcagtctcaactcgactacatgaagttggaattcctagtaaaggcgtgtcagctacagcgccgtgaatacgttcccgggccttgtagacaccgcccgtcacatcatgg

SEQ ID NO: 507 - DNA, 1337 bp, Chlamydiales bacterium NS16
tagtggcggaagggttagtaatacatgagtaacctacctctaacctggggataacggttggaaacggccgctaataccgaatgaggagacgaggggaatgctcatggcttcaaagtaggggatcttgaagggaccttgcggtaggagagaggggtatgggatatcagctagttggtgtggtaaaggcgcaccaaggctaagacgtctaggcggattgagaggttgaccgccaacactgggactgagacactgcccagactcctacgggaggctgcagtcgagaatctttcgcaatgggcgaaagcgtgacgaagcgacgccgtgtggacgatgaaggccttcgggttgtaaagtcctttcgccagggaacaagaaaaattaactaataacttatcaatttgagcgtactaggtaaagaagcaccggctaactccgtgccagcagctgcggtaatacggagggtgcaagcattaatcggatttattgggcgtaaagagcgcgtaggcgggcaagcaagtcagatgtgaaattccggagctcaactccggagctgcatttgaaactacttgtctagaggatggacggagaaaacggaattccacgtgtagcggtgaaatgcgtagatatgtggaagaacaccggtggcgaaggcggttttctagtttattcctgacgctgaggcgcgagagcaaggggagcaaacagggttagataccctggtagtccttgccgtaaacgttgcatacttgatgtatttgggctcaaccccgactgtgtcgaacctaacgcgataagtataccacctgaggagtacgctcgcaagggtgaaactcaaaagaattgacgggggcccgcacaagcagtggagcatgtggtttaattcgatgcaacgcgaagaaccttacccaggcttgacatatagaagaccacatcagaaatgttgtctcccgcaagggcttttgtacaggtgctgcatggctgtcgtcagctcgtgccgtgaggtgttgggttaagtcccgcaacgagcgcaacccttgtcattagttgccaacatttcgtgatggggactctaatgagactgcctgggttaactaggaggaaggtgaggatgacgtcaagtccgcatggcctttatgtctggggctacacacgtgctacaatggtcgatacagaaggcagcgaagccgcaaggtggagcaaatcctcaaaaccgatctcagttcggatagaagtctgcaactcgacttcttgaagttggaattgctagtaatgacgtgtcagcaataacgtcgtgaatacgttcccgggccttgtacacaccgcccgtcacatcacgg

SEQ ID NO: 508 - DNA, 1548 bp, Chlamydophila pecorum
ctgagaatttgatcttggttcagattgaacgctggcggcgtggatgaggcatgcaagtcgaacggaataatggcttcggctattatttagtggcggaagggttagtaatacatagataatttgtcttaacttgggaataacggttggaaacggccgctaataccgaatgtggtgtgtttaggcatctaaattacattaaagaaggggatcttcggacctttcggttaagagaaagtctgtgggatatcagcttgttggtggggtaatggcctaccaaggctatgacgtctaggcggattgagagattgaccgccaacactgggactgagacactgcccagactcctacgggaggctgcagtcgagaatctttcgcaatggacgaaagtctgacgaagcgacgccgcgtgtgtgatgaaggctctagggttgtaaagcactttcgcctgggaataagagagattggctaatatccaattgatttgagcgtaccaggtaaagaagcaccggctaactccgtgccagcagctgcggtaatacggagggtgctagcgttaatcggatttattgggcgtaaagggcgtgtaggcggaaaggaaagttagatgtcaaatcttgaggctcaacctcaagtcggcatctaatactatctttctagaggttggatggagaaaagggaattccacgtgtagcggtgaaatgcgtagatatgtggaagaacaccagtggcgaaggcgcttttctaatttttcctgacgctaaggcgcgaaagcaaggggagcaaacaggattagataccctggtagtccttgctgtaaacgatgcatacttgatgtggatggtctcaaccccatccgtgtcggagctaacgcgttaagtatgccgcctgaggagtacactcgcaagggtgaaactcaaaagaattgacgggggcccgcacaagcagtggagcatgtggtttaattcgatgcaacgcgaagaaccttacctgggcttgacatgtatttgaccgcggcagaaatgtcgttttccgtaaggacagatacacaggtgctgcatggctgtcgtcagctcgtgccgtgaggtgttgggttaagtcccgcaacgagcgcaacccttatcgttagttgccagcactttgggtgggaactctaacgagactgcctgggttaaccaggaggaaggcgaggatgacgtcaagtcagcatggcccttatgtccagggcgacacacgtgctacaatgggtagtacagaaggtagcaagatcgtgagatggagcaaatccttaaagctatcctcagttcggattgtagtctgcaactcggctacatgaagtcggaattgctagtaatggcgtgtcagccataacgccgtgaatacgttcccgggccttgtacacaccgcccgtcacatcatgggagttggtttcaccttaagtcgttgactcaacctatttttaggagggaggcgcccaaggtgaggctgatgactgggatgaagtcgtaacaaggtagccctaccggaaggtggggctggatcacctccttt

SEQ ID NO: 509 - DNA, 1552 bp, Chlamydophila pneumoniae
ctgagaatttgatcttagttcagattgaacgctggcggcgtggatgaggcatgcaagtcgaacggaataatgacttcggttgttatttagtggcggaagggttagtagtacatagataatctgccctcaacttggggataacggttggaaacgatcgctaataccgaatgtagtgtaattaggcatctaatatatattaaagaaggggatcttcggacctttcggttgaggaagagtttatgcgatatcagcttgttggtggggtaaaagcccaccaaggcgatgacgtctaggcggattgagagattgaccgccaacactgggactgagacactgcccagactcctacgggaggctgcagtcgagaatctttcgcaatggacgaaagtctgacgaagcgacgccgcgtgtgtgatgaaggccttagggttgtaaagcactttcgcctgggaataagagagattggctaatatccaatcgatttgagcgtaccaggtaaagaagcaccggctaactccgtgccagcagctgcggtaatacggagggtgctagcgttaatcggatttattgggcgtaaagggcgtgtaggcggaaaggaaagttagatgttaaattttggggctcaaccccaagtcagcatttaaaactatctttctagaggatagatggggaaaagggaattccacgtgtagcggtgaaatgcgtagatatgtggaagaacaccagtggcgaaggcgcttttctaatttatacctgacgctaaggcgcgaaagcaaggggagcaaacaggattagataccctggtagtccttgccgtaaacgatgcatacttgatgtggatggtctcaaccccatccgtgtcggagctaacgtgttaagtatgccgcctgaggagtacactcgcaagggtgaaactcaaaagaattgacgggggcccgcacaagcagtggagcatgtggtttaattcgatgcaacgcgaaggaccttacctggacttgacatgtatttgacaactgtagaaatacagctttccgcaaggacagatacacaggtgctgcatggctgtcgtcagctcgtgccgtgaggtgttgggttaagtcccgcaacgagcgcaacccttatcgttagttgccagcacttagggtgggaactctaacgagactgcctgggttaaccaggaggaaggcgaggatgacgtcaagtcagcatggcccttatgtccagggcgacacacgtgctacaatggttagtacagaaggtagcaagatcgtgagatggagcaaatcctaaaagctagccccagttcggattgtagtctgcaactcgactacatgaagtcggaattgctagtaatggcgtgtcagccataacgccgtgaatacgttctcgggccttgtacacaccgcccgtcacatcatgggagttggttttaccttaagtcgttgactcaacctatttataggagagaggcgcccaaggtgaggctgatgactgggatgaagtcgtaacaaggtagccctaccggaaggtggggctggatcacctccttttt

SEQ ID NO: 510 - DNA, 1548 bp, Chlamydophila psittaci
ctgagaatttgatcttggttcagattgaacgctggcggcgtggatgaggcatgcaagtcgaacggaataatgacttcggttgttatttagtggcggaagggttagtaatacatagataatctgtcctcaacttgggaataacggttggaaacgaccgctaataccgaatgtggtatgtttaggcatctaaagcatattaaagaaggggatcttcggacctttcggttgagggagagtctatgggatatcagcttgttggtggggtaatggcctaccaaggctttgacgtctaggcggattgagagattgaccgccaacactgggactgagacactgcccagacttctacggaaggctgcagtcgagaatctttcgcaatggacgaaagtctgacgaagcgacgccgcgtgtgtgatgaaggctctagggttgtaaagcactttcgcttgggaataagagagattggctaatatccaatcgatttgagcgtaccaggtaaagaagcaccggctaactccgtgccagcagctgcggtaatacggagggtgctagcgttaatcggatttattgggcgtaaagggcgtgtaggcggaaaggaaagttagatgttaaatcttggggctcaaccccaagccagcatctaatactatctttctagagggtagatggagaaaagggaattccacgtgtagcggtgaaatgcgtagatatgtggaagaacaccagtggcgaaggcgcttttctaatttacacctgacgctaaggcgcgaaagcaaggggagcaaacaggattagataccctggtagtccttgccgtaaacgatgcatacttgatgtggatagtctcaaccctatccgtgtcgtagctaacgcgttaagtatgccgcctgaggagtacactcgcaagggtgaaactcaaaagaattgacgggggcccgcacaagcagtggagcatgtggtttaattcgatgcaacgcgaagaaccttacctgggcttgacatgtatttgaccgcggcagaaatgtcgttttccgcaaggacagatacacaggtgctgcatggctgtcgtcagctcgtgccgtgaggtgttgggttaagtcccgcaacgagcgcaacccttatcgttagttgccaacacttagggtgggaactctaacgagactgcctgggttaatcaggaggaaggcgaggatgacgtcaagtcagcatggcccttatgcccagggctacacacgtgctacaatggccagtacagaaggtagcaatatcgtgagatggagcaaatcctcaaagctggccccagttcggattgtagtctgcaactcgactacatgaagtcggaattgctagtaatggcgtgtcagctataacgccgtgaatacgttcccgggccttgtacacaccgcccgtcacatcatgggagttggttttgccttaagtcgttgactcaacctgcaaaggagagaggcgcccaaggtgaggctgatgactgggatgaagtcgtaacaaggtagccctaccggaaggtggggctggatcacctccttt

SEQ ID NO: 511 - DNA, 1419 bp, Chloroflexi sp.
  P1
gatgaacgctggcggcgtgcttaatacatgcaagtcgaacgggtgcagcgatgtaccagtggcgaacgggtgagtaacacgttggtgacctgccccaaagaggggaataccgcttggaaacgagcgacaaaaccgcataagctatcgggagtcagagagccgatagtaaaagaggaatctactttgggaggggcctgcggcccatcagctagttggagaggtaacggctcaccaaggcgaagacgggtaggggacctgagagggtgatcccccacaatggaactgaaacacggtccatacacctacgggtggcagcagtagggaatattgctaaatgggcgaaagcctgaagcagcaacgccgcgtgaacgaagaaggccttcgggtcgtaaagttcttttacgtgggaagaggaaggacagtaccacgggaataagtctcggctaactacgtgccagcagccgcggtaaaacgtaggaggcgagcgttatccggatttactgggcgtaaagagcgtgtaggaggcaaaacaagacggatgtgaaagcccccggcttaaccgggggaggtcgtacgtgactgtagagctagagtgagttagaggtaagcggaactccgggagtagtggtgaaatgcgtagatatccggaagaacatcagaggcgaaagcggcttactgggacttaactgacactgagacgcgaaagccagggtagcaaacgggattagagaccccggtagtcctggctgtaaacgatgtagactggacgttttcggggtaaaagctgagagtgtcgaagcgaacgcgataagtctaccgcctggggagtacggtcgcaggattaaaactcaaaggaattgacgggggcccgcacaagcagcggagcgtgtggtttaattcgatgatacacgaagaaccttaccggggtttgacatacaggtagtaagaaggcgaaagccggatgacccttacgggggagcctgaacaggtgctgcatggctgtcgtcagctcgtgtcgtgagatgttcggttaagtccgctaacgagcgcaacccttgtcgcgtgttacaagtgtcacgcgagaccgccggtagaaagccggaggaaggtggggatgacgtcaagtcagcatggcctttatatcccgggctacacacacgctacaatggccggtacagagggtagcgaagccgcgaggcggagccaatcctgaaaagccggtcgtagttcagattgcaggctgcaactcgcctgcatgaagatggagttgctagtaaccgtaggtcagcgatactacggtgaatacgttcccgggccttgtacacaccgcccgtcacgtcatgggagttggcaacacctgaagccggtatcctgaccgagaggagggagccgtcaaaggtggggttgatgattggggtg

SEQ ID NO: 512 - DNA, 1334 bp, Christensenella minuta
ggctcaggacgaacgctggcggcgtgcttaacacatgcaagtcgaacgagtggcggacgggtgagtaacgcgtgagcaacctgccctgcaacgggggacaacagttggaaacgactgctaataccgcatgagaaaagtcgatgcaggatgggctcgcgtcccattagatagttggtgaggtaacggcccaccaagtcaacgatgggtagccgacctgagagggtgatcggccacactggaactgagacacggtccagactcctacgggaggcagcagtggggaatattgggcaatgggggaaaccctgacccagcaacgccgcgtgagggaagaaggtcttcggattgtaaacctttgtcctatgggacgatgacggtaccataggaggaagctccggctaactacgtgccagcagccgcggtaatacgtagggagcaagcgttgtccggaattactgggcgtaaagggtgcgtaggtggtcatgtaagtcagatgtgaaagaccggggcttaaccccggggttgcatttgaaactgtgtgacttgagtacaggagagggaagtggaattcctagtgtagcggtgaaatgcgtagatattaggaggaacaccagtggcgaaggcgactttctggactgactgacactgaggcacgaaagcgtggggagcaaacaggattagataccctggtagtccacgccgtaaacgatggatactaggtgtggggcgttccgtgccgaagcaaacgcattaagtatcccgcctggggagtacgatcgcaaggttgaaactcaaaggaattgacgggggcccgcacaagcagcggagcatgtggtttaattcgaagcaacgcgaagaaccttaccaaggcttgacatcgacaggtggtgcatggttgtcgtcagctcgtgtcgtgagatgttgggttaagtcccgcaacgagcgcaacccttattgctagttgccagcgcgcgggaactctagtgagactgccggggacaactcggaggaaggtggggacgacgtcaaatcatcatgccccttatgtcttgggctacacacgtgctacaatggccggcaaagggcagcgaacccgtaaggggaagcgaatctcaaccggtcccagttcggatgtgggctgcaacccgcccacagaagtcggagttgctagtaatcgcgaatcagcatgtcgcggtgaatgcgttcccgggccttgtacacaccgcccgtcacaccacggaagttgggagcacccgaagccagtgcttagagagctgtcgaaggtgagatcaatgactggggtgaagtcgtaacaaggtagccgtatcggaagg

SEQ ID NO: 513 - DNA, 1544 bp, Chromobacterium violaceum
tgaactgaagagtttgatcctggctcagattgaacgctggcggcatgctttacacatgcaagtcgaacggtaacagggtgcttgcaccgctgacgagtggcgaacgggtgagtaatgcgtcggaatgtaccgtgtaatgggggatagctcggcgaaagccggattaataccgcatacgccctgagggggaaagcgggggatcgaaagacctcgcgttatacgagcagccgacgtctgattagctagttggtgaggtaagagctcaccaaggcgacgatcagtagcgggtctgagaggatgatccgccacactgggactgagacacggcccagactcctacgggaggcagcagtggggaattttggacaatgggggcaaccctgatccagccatgccgcgtgtctgaagaaggccttcgggttgtaaaggacttttgtcagggaggaaatcccgctggttaatacccggcggggatgacagtacctgaagaataagcaccggctaactacgtgccagcagccgcggtaatacgtagggtgcgagcgttaatcggaattactgggcgtaaagcgtgcgcaggcggttgtgcaagtctgatgtgaaagccccgggcttaacctgggaacggcattggagactgcacagctagagtgcgtcagaggggggtagaattccacgtgtagcagtgaaatgcgtagagatgtggaggaataccgatggcgaaggcagccccctgggatgacactgacgctcatgcacgaaagcgtggggagcaaacaggattagataccctggtagtccacgccctaaacgatgtcaactagctgttgggggtttgaatccttggtagcgtagctaacgcgtgaagttgaccgcctggggagtacggccgcaaggttaaaactcaaaggaattgacggggacccgcacaagcggtggatgatgtggattaattcgatgcaacgcgaaaaaccttacctgctcttgacatgtacggaacttgccagagatggcttggtgcccgaaagggagccgtaacacaggtgctgcatggctgtcgtcagctcgtgtcgtgagatgttgggttaagtcccgcaacgagcgcaacccttgtcattagttgccatcattcagttgggcactctaatgagactgccggtgacaaaccggaggaaggtggggatgacgtcaagtcctcatggcccttatgagcagggcttcacacgtcatacaatggtcggtacagagggttgccaagccgcgaggtggagctaatctcagaaaaccgatcgtagtccggatcgcactctgcaactcgagtgcgtgaagtcggaatcgctagtaatcgcagatcagcatgctgcggtgaatacgttcccgggtcttgtacacaccgcccgtcacaccatgggagtgagtttcaccagaagtgggtaggctaaccgcaaggaggccgcttaccacggtgggattcatgactggggtgaagtcgtaacaaggtagccgtaggggaacctgcggctggatcacctcctttctagaga

SEQ ID NO: 514 - DNA, 1480 bp, Chryseobacterium anthropi
ctagagtttgatcctggctcaggatgaacgctagcgggaggcctaacacatgcaagccgagcggtagagtttcttcggaaacttgagagcggcgcacgggtgcgtaacacgtgtgcaacctacctttatctgggggatagcctttcgaaaggaagattaataccccataatataatgattggcatcaattattattgaaaactccggtggatagagatgggcacgcgcaagattagatagttggtgaggtaacggctcaccaagtcaatgatctttaggggtcctgagagggagatcccccacactggtactgagacacggaccagactcctacgggaggcagcagtgaggaatattggacaatgggtgagagcctgatccagccatcccgcgtgaaggawgacggtcctatggattgtaaacttcttttgtacagggataaacctactctcgtgagggtagctgaaggtactgtacgaataagcaccggctaactccgtgccagcagccgcggtaatacggagggtgcaagcgttatccggatttattgggtttaaagggtccgtaggcggacttgtaagtcagtggtgaaatctcatagcttaactatgaaactgccattgatactgcaggtcttgagtaaatttgaagtggctggaataagtagtgtagcggtgaaatgcatagatattacttagaacaccaattgcgaaggcaggtcactaagatttaactgacgctgatggacgaaagcgtggggagcgaacaggattagataccctggtagtccacgccgtaaacgatgctaactcgtttttggattttcggattcagagaccaagcgaaagtgataagttagccacctggggagtacgtccgcaaggatgaaactcaaaggaattgacgggggcccgcacaagcggtggattatgtggtttaattcgatgatacgcgaggaaccttaccaagacttaaatgggaattgacaggtctagaaatagaccctccttcgggcaatttccaaggtgctgcatggttgtcgtcagctcgtgccgtgaggtgttaggttaagtcctgcaacgagcgcaacccctgtcactagttgcyawcattyagttgrggactctagtgagactgcctacgcaagtagagaggaaggtggggatgacgtcaaatcatcacggcccttacgtcttgggccacacacgtaatacaatggccggtacagagggcagctaccaggtgactggatgcaaatctcgaaagccggtctcagttcggattggagtctgcaactcgactctatgaagctggaatcgctagtaatcgcgcatcagccatggcgcggtgaatacgttcccgggccttgtacacaccgcccgtcaagccatggaagtctggggtacctgaagtcggtgaccgtaaaaggagctgcctagggtaaaacaggtaactagggctaagtcgtaacaaggtagcc

SEQ ID NO: 515 - DNA, 1519 bp, Chryseobacterium gleum
atacaatggagagtttgatcctggctcaggatgaacgctagcgggaggcctaacacatgcaagctgagcggtagagatctttcgggatcttgagagcggcgtacgggtgcggaacacgtgtgcaacctgcctttatcagggggatagcctttcgaaaggaagattaataccccataatatattgagtggcatcacttaatattgaaaactccggtggatagagatgggcacgcgcaagattagatagttggtgaggtaacggctcaccaagtctgcgatctttagggggcctgagagggtgatcccccacactggtactgagacacggaccagactcctacgggaggcagcagtgaggaatattggacaatgggtgcgagcctgatccagccatcccgcgtgaaggacgacggccctatgggttgtaaacttcttttgtatagggataaacctactctcgtgagagtagctgaaggtactatacgaataagcaccggctaactccgtgccagcagccgcggtaatacggagggtgcaagcgttatccggatttattgggtttaaagggtccgtaggcggatctgtaagtcagtggtgaaatctcacagcttaactgtgaaactgccattgatactgcaggtcttgagtgttgttgaagtagctggaataagtagtgtagcggtgaaatgcatagatattacttagaacaccaattgcgaaggcaggttactaagcaacaactgacgctgatggacgaaagcgtggggagcgaacaggattagataccctggtagtccacgccgtaaacgatgctaactcgtttttgggctttcgggttcagagactaagcgaaagtgataagttagccacctggggagtacgaacgcaagtttgaaactcaaaggaattgacgggggcccgcacaagcggtggattatgtggtttaattcgatgatacgcgaggaaccttaccaaggcttaaatgggaaatgacaggcttagaaataggcttttcttcggacatttttcaaggtgctgcatggttgtcgtcagctcgtgccgtgaggtgttaggttaagtcctgcaacgagcgcaacccctgtcactagttgccatcattaagttggggactctagtgagactgcctacgcaagtagagaggaaggtggggatgacgtcaaatcatcacggcccttacgccttgggccacacacgtaatacaatggccggtacagagggcagctacactgcgaagtgatgcaaatctcgaaagccggtctcagttcggattggagtctgcaactcgactctatgaagctggaatcgctagtaatcgcgcatcagccatggcgcggtgaatacgttcccgggccttgtacacaccgcccgtcaagccatggaagtctggggtacctgaagtcggtgaccgtaacaggagctgcctagggtaaaacaggtaactagggctaagtcgtaacaaggtagccgtaccggaaggtgcggctggaacatctcattt

SEQ ID NO: 516 - DNA, 1483 bp, Chryseobacterium hominis
tttgatccctggctcaggatgaacgctagcgggaggcctaacacatgcaagccgagcggtatttgttcttcggaacagagagagcggcgcacgggtgcggaacacgtgtgcaacctgcctttatctgggggatagcctttcgaaaggaagattaataccccataatatattgagtggcatcatttgatattgaaaactccggtggatagagatgggcacgcgcaagattagatagttggtgaggtaacggctcaccaagtcaatgatctttagggggcctgagagggtgatcccccacactggtactgagacacggaccagactcctacgggaggcagcagtgaggaatattggacaatgggttagcgcctgatccagccatcccgcgtgaaggacgacggccctatgggttgtaaacttcttttgtatagggataaacctactctcgtgagagtagctgaaggtactatacgaataagcaccggctaactccgtgccagcagccgcggtaatacggagggtgcaagcgttatccggatttattgggtttaaagggtccgtaggcggatctgtaagtcagtggtgaaatctcacagcttaactgtgaaactgccattgatactgcaggtcttgagtaaatttgaagtggctggaataagtagtgtagcggtgaaatgcatagatattacttagaacaccaattgcgaaggcaggtcactaagatttaactgacgctgatggacgaaagcgtggggagcgaacaggattagataccctggtagtccacgccgtaaacgatgctaactcgtttttggggyttcggcttcagagactaagcgaaagtgataagttagccacctggggagtacgttcgcaagaatgaaactcaaaggaattgacgggggcccgcacaagcggtggattatgtggtttaattcgatgatacgcgaggaaccttaccaagacttaaatgggaaatgacagatttagaaatagatccttcttcggacatttttcaaggtgctgcatggttgtcgtcagctcgtgccgtgaggtgttaggttaagtcctgcaacgagcgcaacccctgtcactagttgctagcattaagttgaggactctagtgagactgcctacgcaagtagagaggaaggtggggatgacgtcaaatcatcacggcccttacgtcttgggccacacacgtaatacaatggccggtacagagggcagctacacagcgatgtgatgcaaatctcgaaagccggtctcagttcggattggagtctgcaactcgactctatgaagctggaatcgctagtaatcgcgcatcagccatggcgcggtgaatacgttcccgggccttgtacacaccgcccgtcaagccatggaagtctggggtacctgaagtcggtgaccgtaaaaggagctgcctagggtaaaacaggtaactagggctaagtcgtaacaaggtagccgtacccga

SEQ ID NO: 517 - DNA, 1399 bp, Citrobacter amalonaticus
  modified_base (915)..(915): a, c, t, g, unknown or other
tcgacggtaacaggaagcagcttgctgctttgctgacgagtggcggacgggtgagtaatgtctgggaaactgcccgatggagggggataactactggaaacggtagctaataccgcataatgtcgcaagaccaaagagggggaccttcgggcctcttgccatcggatgtgcccagatgggattagctagttggtgaggtaacggctcaccaaggcgacgatccctagctggtctgagaggatgaccagccacactggaactgagacacggtccagactcctacgggaggcagcagtggggaatattgcacaatgggcgcaagcctgatgcagccatgccgcgtgtatgaagaaggccttcgggttgtaaagtactttcagcggggaggaaggggttaaggttaataaccttagccattgacgttacccgcagaagaagcaccggctaactccgtgccagcagccgcggtaatacggagggtgcaagcgttaatggaattactgggcgtaaagcgcacgcaggcggtctgtcaagtcggatgtgaaatccccgggctcaacctgggaactgcattcgaaactggcaggcttgagtctcgtagaggggggtagaattccaggtgtagcggtgaaatgcgtagagatctggaggaataccggtggcgaaggcggccccctggacgaagactgacgctcaggtgcgaaagcgtggggagcaaacaggattagataccctggtagtccacgccgtaaacgatgtctatttggaggttgtgcccttgaggtgtggcttccggagctaacgcgttaaatagaccgcctggggagtacggccgcaaggttaaaactcaaatgaattgaagggggcccgcacaagcggtggagcatgtggtttaattcgatgcaagcgttaatnggatacctggtcttgacatccacagaacttggcagagatgccttggtgccttcgggaactgtgagacaggtgctgcatggctgtcgtcagctcgtgttgtgaaatgttgggttaagtcccgcaacgagcgcaacccttatcctttgttgccagcggtccggccgggaactcaaaggagactgccagtgataaactggaggaaggtggggatgacgtcaagtcatcatggcccttacgaccagggctacacacgtgctacaatggcatatacaaagagaagcgacctcgcgagagcaagcggacctcataaagtatgtcgtagtccggattggagtctgcaactcgactccatgaagtcggaatcgctagtaatcgtggatcagaatgccacggtgaatacgttcccgggccttgtacacaccgcccgtcacaccatgggagtgggttgcaaaagaagtaggtagcttaaccttcgggagggcgc

SEQ ID NO: 518 - DNA, 1396 bp, Citrobacter braakii
  modified_base (940)..(940): a, c, t, g, unknown or other
  modified_base (976)..(976): a, c, t, g, unknown or other
tcgaacggtagcacagaggagcttgctccttgggtgacgagtggcggacgggtgagtaatgtctgggaaactgcccgatggagggggataactactggaaacggtagctaataccgcataacgtcgcaagaccaaagagggggaccttcgggcctcttgccatcggatgtgcccagatgggattagctagtaggtggggtaacggctcacctaggcgacgatccctagctggtctgagaggatgaccagccacactggaactgagacacggtccagactcctacgggaggcagcagtggggaatattgcacaatgggcgcaagcctgatgcagccatgccgcgtgtatgaagaaggccttcgggttgtaaagtactttcagcgaggaggaaggcgttgtggttaataaccgcaacgattgacgttactcgcagaagaagcaccggctaactccgtgccagcagccgcggtaatacggagggtgcaagcgttaatcggaattactgggcgtaaagcgcacgcaggcggtctgtcaagtcggatgtgaaatccccgggctcaacctgggaactgcatccgaaactggcaggctagagtcttgtagaggggggtagaattccaggtgtagcggtgaaatgcgtagagatctggaggaataccggtggcgaaggcggccccctggacaaagactgacgctcaggtgcgaaagcgtggggagcaaacaggattagataccctggtagtccacgccgtaaacgatgtcgacttggaggttgtgcccttgaggcgtggcttccggagctaacgcgttaagtcgaccgcctggggagtacggccgcaaggttaaaactcaaatgaattgacgggggcccgcacaagcggtggagcatgtggtttaattcgatgcaacgcgaagaaccttacctactcttgacatccanggaacttaccagagatggtttggtgccttcgggaancgtgagacaggtgctgcatggctgtcgtcagctcgtgttgtgaaatgttgggttaagtcccgcaacgagcgcaacccttatcctttgttgccagcggtccggccgggaactcaaaggagactgccagtgataaactggaggaaggtggggatgacgtcaagtcatcatggcccttacgagtagggctacacacgtgctacaatggcatatacaaagagaagcgacctcgcgagagcaagcggacctcataaagtatgtcgtagtccggattggagtctgcaactcgactccatgaagtcggaatcgctagtaatcgtggatcagaatgccacggtgaatacgttcccgggccttgtacacaccgcccgtcacaccatgggagtgggttgcaaaagaagtaggtagcttaaccttcgggag

SEQ ID NO: 519 - DNA, 1393 bp, Citrobacter farmeri
  modified_base (951)..(951): a, c, t, g, unknown or other
  modified_base (1369)..(1370): a, c, t, g, unknown or other
aacaggaagcagcttgctgctttgctgacgagtggcggacgggtgagtaatgtctgggaaactgcccgatggagggggataactactggaaacggtagctaataccgcataatgtcgcaagaccaaagagggggaccttcgggcctcttgccatcggatgtgcccagatgggattagcttgttggtgaggtaacggctcaccaaggcgacgatccctagctggtctgagaggatgaccagccacactggaactgagacacggtccagactcctacgggaggcagcagtggggaatattgcacaatgggcgcaagcctgatgcagccatgccgcgtgtatgaagaaggccttcgggttgtaaagtactttcagcggggaggaaggggatgtggttaataaccgcattcattgacgttacccgcagaagaagcaccggctaactccgtgccagcagccgcggtaatacggagggtgcaagcgttaatcggaattactgggcgtaaagcgcacgcaggcggtctgtcaagtcggatgtgaaatccccgggctcaacctgggaactgcattcgaaactggcaggcttgagtctcgtagaggggggtagaattccaggtgtagcggtgaaatgcgtagagatctggaggaataccggtggcgaaggcggccccctggacgaagactgacgctcaggtgcgaaagcgtggggagcaaacaggattagataccctggtagtccacgccgtaaacgatgtctatttggaggttgtgcccttgaggcgtggcttccggagctaacgcgttaaatagaccgcctggggagtacggccgcaaggttaaaactcaaatgaattgacgggggcccgcacaagcggtggagcatgtggtttaattcgatgcaacgcgaagaaccttacctggtcttgacatccacagaacttgtcagagatgccnaggtgccttcgggaactgtgagacaggtgctgcatggctgtcgtcagctcgtgttgtgaaatgttgggttaagtcccgcaacgagcgcaacccttatcctttgttgccagcggtccggccgggaactcaaaggagactgccagtgataaactggaggaaggtggggatgacgtcaagtcatcatggcccttacgaccagggctacacacgtgctacaatggcatatacaaagagaagcgacctcgcgagagcaagcggacctcataaagtatgtcgtagtccggattggagtctgcaactcgactccatgaagtcggaatcgctagtaatcgtggatcagaatgccacggtgaatacgttcccgggccttgtacacaccgcccgtcacaccatgggagtgggttgcaaaagaagtagnntagcttaaccttcgggagggcgc

SEQ ID NO: 520 - DNA, 1398 bp, Citrobacter freundii
  modified_base (19)..(19): a, c, t, g, unknown or other
  modified_base (1376)..(1381): a, c, t, g, unknown or other
tcgaacggtagcacagagngagcttgctccttgggtgacgagtggcggacgggtgagtaatgtctgggaaactgcccgatggagggggataactactggaaacggtagctaataccgcataacgtcgcaagaccaaagagggggaccttcgggcctcttgccatcggatgtgcccagatgggattagctagtaggtggggtaacggctcacctaggcgacgatccctagctggtctgagaggatgaccagccacactggaactgagacacggtccagactcctacgggaggcagcagtggggaatattgcacaatgggcgcaagcctgatgcagccatgccgcgtgtatgaagaaggccttcgggttgtaaagtactttcagcgaggaggaaggtgttgaggttaataacctcagcgattgacgttactcgcagaagaagcaccggctaactccgtgccagcagccgcggtaatacggagggtgcaagcgttaatcggaattactgggcgtaaagcgcacgcaggcggtctgtcaagtcggatgtgaaatccccgggctcaacctgggaactgcatccgaaactggcaggctagagtcttgtagaggggggtagaattccaggtgtagcggtgaaatgcgtagagatctggaggaataccggtggcgaaggcggccccctggacaaagactgacgctcaggtgcgaaagcgtggggagcaaacaggattagataccctggtagtccacgccgtaaacgatgtcgacttggaggttgtgcccttgaggcgtggcttccggagctaacgcgttaagtcgaccgcctggggagtacggccgcaaggttaaaactcaaatgaattgacgggggcccgcacaagcggtggagcatgtggtttaattcgatgcaacgcgaagaaccttacctactcttgacatccagagaacttagcagagatgctttggtgccttcgggaactctgagacaggtgctgcatggctgtcgtcagctcgtgttgtgaaatgttgggttaagtcccgcaacgagcgcaacccttatcctttgttgccagcggttcggtcgggaactcaaaggagactgccagtgataaactggaggaaggtggggatgacgtcaagtcatcatggcccttacgagtagggctacacacgtgctacaatggcatatacaaagagaagcgacctcgcgagagcaagcggacctcataaagtatgtcgtagtccggattggagtctgcaactcgactccatgaagtcggaatcgctagtaatcgtggatcagaatgccacggtgaatacgttcccgggccttgtacacaccgcccgtcacaccatgggagtgggttgcaaaagaagnnnnnngcttaaccttcgggagg

SEQ ID NO: 521 - DNA, 1397 bp, Citrobacter gillenii
gtcgaacggtagcacagaggagcttgctccttgggtgacgagtggcggacgggtgagtaatgtctgggaaactgcccgatggagggggataactactggaaacggtagctaataccgcataacgtcgcaagaccaaagagggggaccttcgggcctcttgccatcggatgtgcccagatgggattagctagtaggtggggtaacggctcacctaggcgacgatccctagctggtctgagaggatgaccagccacactggaactgagacacggtccagactcctacgggaggcagcagtggggaatattgcacaatgggcgcaagcctgatgcagccatgccgcgtgtatgaagaaggccttcgggttgtaaagtactttcagcgaggaggaaggggatgtggttaataaccgcattcattgacgttactcgcagaagaagcaccggctaactccgtgccagcagccgcggtaatacggagggtgcaagcgttaatcggaattactgggcgtaaagcgcacgcaggcggtctgtcaagtcggatgtgaaatccccgggctcaacctgggaactgcatccgaaactggcaggctagagtcttgtagaggggggtagaattccaggtgtagcggtgaaatgcgtagagatctggaggaataccggtggcgaaggcggccccctggacaaagactgacgctcaggtgcgaaagcgtggggagcaaacaggattagataccctggtagtccacgccgtaaacgatgtcgacttggaggttgttcccttgaggagtggcttccggagctaacgcgttaagtcgaccgcctggggagtacggccgcaaggttaaaactcaaatgaattgacgggggcccgcacaagcggtggagcatgtggtttaattcgatgcaacgcgaagaaccttacctactcttgacatccacggaatttagcagatatgctttagtgccttcgggaaccgtgagacaggtgctgcatggctgtcgtcagctcgagttgcgaagagttgggtaagaacccgcaacgagcgcaacccttatcctttgttgccagcggttcggccgggaactcaaaggagactgccagtgataaactggaggaaggtggggatgacgtcaagtcatcatggcccttacgagtagggctacacacgtgctacaatggcatatacaaagagaagcgacctcgcgagagcaagcggacctcataaagtatgtcgtagtccggattggagtctgcaactcgactccatgaagtcggaatcgctagtaatcgtagatcagaatgctacggtgaatacgttcccgggccttgtacacaccgcccgtcacaccatgggagtgggttgcaaaagaagtaggtagcttaaccttcgggag

SEQ ID NO: 522 - DNA, 1387 bp, Citrobacter koseri
acaggaagcagcttgctgcttcgctgacgagtggcggacgggtgagtaatgtctgggaaactgcctgatggagggggataactactggaaacggtagctaataccgcataacgtcgcaagaccaaagagggggaccttcgggcctcttgccatcagatgtgcccagatgggattagcttgttggtggggtaacggctcaccaaggcgacgatccctagctggtctgagaggatgaccagccacactggaactgagacacggtccagactcctacgggaggcagcagtggggaatattgcacaatgggcgcaagcctgatgcagccatgccgcgtgtatgaagaaggccttcgggttgtaaagtactttcagcggggaggaaggtgttgtggttaataaccgcagcaattgacgttacccgcagaaaagcaccggctaactccgtgccagcagccgcggtaatacggagggtgcaagcgttaatcggaattactgggcgtaaagcgcacgcaggcggtctgttaagtcagatgtgaaatccccgggctcaacctgggaactgcattgatactggcaggcttgagtctcgtagaggggggtagaattccaggtgtagcggtgaaatgcgtagagatctggaggaataccggtggcgaaggcggccccctggacgaagactgacgctcaggtgcgaaagcgtggggagcaaacaggattagataccctggtagtccacgccgtaaacgatgtcgacttggaggttgtgcccttgaggcgtggcttccggagctaacgcgttaagtcgaccgcctggggagtacggccgcaaggttaaaactcaaatgaattgacgggggcccgcacaagcggtggagcatgtggtttaattcgatgcaacgcgaagaaccttacctggtcttgacatccacagaacttggcagagatgacttagatgcgtaaggcacgggctcaaccgtgctgcatggctgtcgtcagctcgtgttgtgaaatgtagaggggggtcccgcaacgagcgcaacccttatcctttgttgccagcggttaggccgggaactcaaaggagactgccagtgataaactggaggaaggtggggatgacgtcaagtcatcatggcccttacgaccagggctacacacgtgctacaatggcatatacaaagagaagcgacctcgcgagagcaagcggacctcataaagtatgtcgtagtccggattggagtctgcaactcgactccatgaagtcggaatcgctagtaatcgtggatcagaatgccacggtgaatacgttcccgggccttgtacacaccgcccgtcacaccatgggagtgggttgcaaaagaagtaggtagcttaacctccgggagggc

SEQ ID NO: 523 - DNA, 1394 bp, Citrobacter murliniae
acggtagcacagaggagcttgctccttgggtgacgagtggcggacgggtgagtaatgtctgggaaactgcccgatggagggggataactactggaaacggtagctaataccgcataacgtcgcaagaccaaagagggggaccttcgggcctcttgccatcggatgtgcccagatgggattagctagtaggtggggtaacggctcacctaggcgacgatccctagctggtctgagaggatgaccagccacactggaactgagacacggtccagactcctacgggaggcagcagtggggaatattgcacaatgggcgcaagcctgatgcagccatgccgcgtgtatgaagaaggccttcgggttgtaaagtactttcagcgaggaggaaggtgttgtggttaataaccgcagcaattgacgttactcgcagaagaagcaccggctaactccgtgccagcagccgcggtaatacggagggtgcaagcgttaatcggaattactgggcgtaaagcgcacgcaggcggtctgtcaagtcggatgtgaaatccccgggctcaacctgggaactgcatccgaaactggcaggctagagtcttgtagaggggggtagaattccaggtgtagcggtgaaatgcgtagagatctggaggaataccggtggcgaaggcggccccctggacaaagactgacgctcaggtgcgaaagcgtggggagcaaacaggattagataccctggtagtccacgccgtaaacgatgtcgacttggaggttgtgcccttgaggcgtggcttccggagctaacgcgttaagtcgaccgcctggggagtacggccgcaaggttaaaactcaaatgaattgacgggggcccgcacaagcggtggagcatgtggtttaattcgatgcaacgcgaagaaccttacctactcttgacatccagagaagtttgcagagatgcgaacgtgccttcgggagctctgagacaggtgctgcatggctgtcgtcagctcgtgttgtgaaatgttgggttaagtcccgcaacgagcgcaacccttatcctttgttgccagcggtccggccgggaactcaaaggagactgccagtgataaactggaggaaggtggggatgacgtcaagtcatcatggcccttacgagtagggctacacacgtgctacaatggcatatacaaagagaagcgacctcgcgagagcaagcggacctcataaagtatgtcgtagtccggattggagtctgcaactcgactccatgaagtcggaatcgctagtaatcgtggatcagaatgccacggtgaatacgttcccgggccttgtacacaccgcccgtcacaccatgggagtgggttgcaaaagaagtaggtagcttaaccttcgggaggg

SEQ ID NO: 524 - DNA, 1542 bp, Citrobacter rodentium
aaattgaagagtttgatcatggctcagattgaacgctggcggcaggcctaacacatgcaagtcgaacggtaacaggaagcagcttgctgctttgctgacgagtggcggacgggtgagtaatgtctgggaaactgcccggtggagggggataactactggaaacggtagctaataccgcataacgtcgcaagaccaaagagggggaccttcgggcctcttgccaccggatgtgcccagatgggattagcttgttggtgaggtaacggctcaccaaggcgacgatccctagctggtctgagaggatgaccagccacactggaactgagacacggtccagactcctacgggaggcagcagtggggaatattgcacaatgggcgcaagcctgatgcagccatgccgcgtgtatgaagaaggccttcgggttgtaaagtactttcagcggggaggaagggattgtggttaataaccgcagtcattgacgttacccgcagaagaagcaccggctaactccgtgccagcagccgcggtaatacggagggtgcaagcgttaatcggaattactgggcgtaaagcgcacgcaggcggtctgtcaagtcggatgtgaaatccccgggctcaacctgggaactgcattcgaaactggcaggcttgagtctcgtagagggggggggaattccaggtgtagcggtgaaatgcgtagagatctggaggaataccggtggcgaaggcggccccctggacgaagactgacgctcaggtgcgaaagcgtggggagcaaacaggattagataccctggtagtccacgccgtaaacgatgtctacttggaggttgtgcccctgaggcgtggcttccggagctaacgcgttaagtagaccgcctggggagtacggccgcaaggttaaaactcaaatgaattgacgggggcccgcacaagcggtggagcatgtggtttaattcgatgcaacgcgaagaaccttacctggtcttgacatccagagaactttccagagatggattggtgccttcgggaactctgagacaggtgctgcatggctgtcgtcagctcgtgttgtgaaatgttgggttaagtcccgcaacgagcgcaacccttatcctttgttgccagcggtccggccgggaactcaaaggagactgccagtgataaactggaggaaggtggggatgacgtcaagtcatcatggcccttacgaccagggctacacacgtgctacaatggcatatacaaagagaagcgacctcgcgagagcaagcggacctcataaagtatgtcgtagtccggattggagtctgcaactcgactccatgaagtcggaatcgctagtaatcgtggatcagaatgccacggtgaatacgttcccgggccttgtacacaccgcccgtcacaccatgggagtgggttgcaaaagaagtaggtagcttaacctccgggagggcgcttaccactttgtgattcatgactggggtgaagtcgtaacaaggtaaccgtaggggaacctgcggttggatcacctcctta

SEQ ID NO: 525 - DNA, 1326 bp, Citrobacter sedlakii
cttgctctcgggtgacgagtggcggacgggtgagtaatgtctgggaaactgcccgatggagggggataactactggaaacggtagctaataccgcataatgtcgcaagaccaaagagggggaccttcgggcctcttgccatcggatgtgcccagatgggattagcttgttggtgaggtaatggctcaccaaggcgacgatccctagctggtctgagaggatgaccagccacactggaactgagacacggtccagactcctacgggaggcagcagtggggaatattgcacaatgggcgcaagcctgatgcagccatgccgcgtgtgtgaagaaggccttcgggttgtaaagcactttcagcggggaggaaggcgatgcggttaataaccgtgttgattgacgttacccgcagaagaagcaccggctaactccgtgccagcagccgcggtaatacggagggtgcaagcgttaatcggaattactgggcgtaaagcgcacgcaggcggtctgtcaagtcggatgtgaaatccccgggctcaacctgggaactgcattcgaaactggcaggcttgagtcttgtagaggggggtagaattccaggtgtagcggtgaaatgcgtagagatctggaggaataccggtggcgaaggcggccccctggacaaagactgacgctcaggtgcgaaagcgtggggagcaaacaggattagataccctggtagtcacgccgtaaacgatgtcgacttggaggttgtgcccttgaggcgtggcttccggagctaacgcgttaagtcgaccgcctggggagtacggccgcaaggttaaaactcaaatgaattgacgggggcccgcacaagcggtggagcatgtggtttaattcgatgcaacgcgaagaaccttacctggtcttgacatccacggaatttggcagagatgccttagtgccttcgggaaccgtgagacaggtgctgcatggctgtcgtcagctcgtgttgtgaaatgttgggttaagtcccgcaacgagcgcaacccttatcctttgttgccagcggtccggccgggaactcaaaggagactgccagtgataaactggaggaaggtggggatgacgtcaagtcatcatggcccttacgaccagggctacacacgtgctacaatggcatatacaaagagaagcgacctcgcgagagcaagcggacctcataaagtatgtcgtagtccggattggagtctgcaactcgactccatgaagtcggaatcgctagtaatcgtggatcagaatgccacggtgaatacgttcccgggccttgtacacaccgcccgtcaca

SEQ ID NO: 526 - DNA, 967 bp, Citrobacter sp.
  30_2
  modified_base (8)..(10): a, c, t, g, unknown or other
  modified_base (762)..(762): a, c, t, g, unknown or other
  modified_base (776)..(776): a, c, t, g, unknown or other
  modified_base (926)..(926): a, c, t, g, unknown or other
  modified_base (940)..(940): a, c, t, g, unknown or other
  modified_base (945)..(945): a, c, t, g, unknown or other
gcacagannnagcttgctccttgggtgacgagtggcggacgggtgagtaatgtctgggaaactgcccgatggagggggataactactggaaacggtagctaataccgcataacgtcgcaagaccaaagagggggaccttcgggcctcttgccatcggatgtgcccagatgggattagctagtaggtggggtaacggctcacctaggcgacgatccctagctggtctgagaggatgaccagccacactggaactgagacacggtccagactcctacgggaggcagcagtggggaatattgcacaatgggcgcaagcctgatgcagccatgccgcgtgtatgaagaaggccttcgggttgtaaagtactttcagcgaggaggaaggtgttgaggttaataacctcagcaattgacgttactcgcagaagaagcaccggctaactccgtgccagcagccgcggtaatacggagggtgcaagcgttaatcggaattactgggcgtaaagcgcacgcaggcggtctgtcaagtcggatgtgaaatccccgggctcaacctgggaactgcatccgaaactggcaggctagagtcttgtagaggggggtagaattccaggtgtagcggtgaaatgcgtagagatctggaggaataccggtggcgaaggcggccccctggacaaagactgacgctcaggtgcgaaagcgtggggagcaaacaggattagataccctggtagtccacgccgtaaacgatgtcgacttggangttgtgcccttgangcgtggcttccggagctaacgcgttaagtcgaccgcctggggagtacggccgcaaggttaaaactcaaatgaattgacgggggcccgcacaagcggtggagcatgtggtttaattcgatgcaacgcgaagaaccttacctactcttgacntccagagaacttancaganatgctttggtgccttcgggaac

SEQ ID NO: 527 - DNA, 1383 bp, Citrobacter sp.
  KMSI-3
  modified_base (926)..(927): a, c, t, g, unknown or other
  modified_base (934)..(934): a, c, t, g, unknown or other
  modified_base (948)..(948): a, c, t, g, unknown or other
  modified_base (964)..(964): a, c, t, g, unknown or other
  modified_base (1059)..(1059): a, c, t, g, unknown or other
  modified_base (1364)..(1364): a, c, t, g, unknown or other
gcacagagagcttgctctcgggtgacgagtggcggacgggtgagtaatgtctgggaaactgcccgatggagggggataactactggaaacggtagctaataccgcataatgtcgcaagaccaaagagggggaccttcgggcctcttgccatcggatgtgcccagatgggattagctagtaggtggggtaacggctcacctaggcgacgatccctagctggtctgagaggatgaccagccacactggaactgagacacggtccagactcctacgggaggcagcagtggggaatattgcacaatgggcgcaagcctgatgcagccatgccgcgtgtatgaagaaggccttcgggttgtaaagtactttcagcgaggaggaaggcgttgtggttaataaccttagtgattgacgttactcgcagaagaagcaccggctaactccgtgccagcagccgcggtaatacggagggtgcaagcgttaatcggaattactgggcgtaaagcgcacgcaggcggtctgtcaagtcggatgtgaaatccccgggctcaacctgggaactgcatccgaaactggcaggctagagtcttgtagaggggggtagaattccaggtgtagcggtgaaatgcgtagagatctggaggaataccggtggcgaaggcggccccctggacaaagactgacgctcaggtgcgaaagcgtggggagcaaacaggattagataccctggtagtccacgccgtaaacgatgtcacttggaggttgtgcccttgaggcgtggcttccggagctaacgcgttaagtcgaccgcctggggagtacggcgcaaggttaaaactcaaatgaattgacgggggcccgcacaagcggtggagcatgtggtttaattcgatgcaacgcgaagaaccttacctactcttgacatccanngaayttngcagagatgctttngtgccttcgggaactntgagacaggtgctgcatggctgtcgtcagctcgtgttgtgaaatgttgggttaagtcccgcaacgagcgcaacccttatcctttgttgccagcgnttcggtcgggaactcaaaggagactgccagtgataaactggaggaaggtggggatgacgtcaagtcatcatggcccttacgagtagggctacacacgtgctacaatggcatatacaaagagaagcgacctcgcgagagcaagcggacctcataaagtatgtcgtagtccggattggagtctgcaactcgactccatgaagtcggaatcgctagtaatcgtggatcagaatgccacggtgaatacgttcccgggccttgtacacaccgcccgtcacaccatgggagtgggttgcaaaagaagtagntagcttaaccttcgggagg

SEQ ID NO: 528 - DNA, 1022 bp, Citrobacter werkmanii
  modified_base (13)..(15): a, c, t, g, unknown or other
  modified_base (17)..(17): a, c, t, g, unknown or other
  modified_base (19)..(21): a, c, t, g, unknown or other
  modified_base (30)..(30): a, c, t, g, unknown or other
  modified_base (34)..(34): a, c, t, g, unknown or other
  modified_base (78)..(78): a, c, t, g, unknown or other
gtactttcagcgnnngnannngttgtggtnaatnaccgcagcaattgacgttactcgcagaagaagcaccgggctaantccgtgccagcagccgcggtaatacggagggtgcaagcgttaatcggaattactgggcgtaaagcgcacgcaggcggtctgtcaagtcggatgtgaaatccccgggctcaacctgggaactgcatccgaaactggcaggctagagtcttgtagaggggggtagaattccaggtgtagcggtgaaatgcgtagagatctggaggaataccggtggcgaaggcggccccctggacaaagactgacgctcaggtgcgaaagcgtggggagcaaacaggattagataccctggtagtccacgccgtaaacgatgtcgacttggaggttgtgcccttgaggcgtggcttccggagctaacgcgttaagtcgaccgcctggggagtacggccgcaaggttaaaactcaaatgaattgacgggggcccgcacaagcggtggagcatgtggtttaattcgatgcaacgcgaagaaccttacctactcttgacatccagagaacttagcagagatgctttggtgccttcgggaactctgagacaggtgctgcatggctgtcgtcagctcgtgttgtgaaatgttgggttaagtcccgcaacgagcgcaacccttatcctttgttgccagcggttaggccgggaactcaaaggagactgccagtgataaactggaggaaggtggggatgacgtcaagtcatcatggcccttacgagtagggctacacacgtgctacaatggcatatacaaagagaagcgacctcgcgagagcaagcggacctcataaagtatgtcgtagtccggattggagtctgcaactcgactccatgaagtcggaatcgctagtaatcgtggatcagaatgccacggtgaatacgttcccgggccttgtacacaccgcccgtcacaccatgggagtgggttgcaaaagaagtaggtagcttaaccttcggg

SEQ ID NO: 529 - DNA, 1266 bp, Citrobacter youngae
ttaaattgaagagtttgatcatggctcagattgaacgctggcggcaggcctaacacatgcaagtcgaacggtagcacagagagcttgctctcgggtgacgagtggcggacgggtgagtaatgtctgggaaactgcccgatggagggggataactactggaaacggtagctaataccgcataacgtcgcaagaccaaagagggggaccttcgggcctcttgccatcggatgtgcccagatgggattagcttgttggtggggtaacggctcaccaaggcgacgatccctagctggtctgagaggatgaccagccacactggaactgagacacggtccagactcctacgggaggcagcagtggggaatattgcacaatgggcgcaagcctgatgcagccatgccgcgtgtatgaagaaggccttcgggttgtaaagtactttcagcgaggaggaaggcgttgtggttaataaccgcagcgattgacgttactcgcagaagaagcaccggctaactccgtgccagcagccgcggtaatacggagggtgcaagcgttaatcggaattactgggcgtaaagcgcacgcaggcggtctgttaagtcagatgtgaaatccccgggctcaacctgggaactgcatttgaaactggcaggcttgagtctcgtagaggggggtagaattccaggtgtagcggtgaaatgcgtagagatctggaggaataccggtggcgaaggcggccccctggacgaagactgacgctcaggtgcgaaagcgtggggagcaaacaggattagataccctggtagtccacgccgtaaacgatgtctatttggaggttgtgcccttgaggcgtggcttccggagctaacgcgttaaatagaccgcctggggagtacggccgcaaggttaaaactcaaatgaattgacgggggcccgcacaagcggtggagcatgtggtttaattcgatgcaacgcgaagaaccttacctggtcttgacatccacagaagttttcagagatgagaacgtgccttcgggaactgtgagacaggtgctgcatggctgtcgtcagctcgtgttgtgaaatgttgggttaagtcccgcaacgagcgcaacccttatcctttgttgccagcggttaggccgggaactcaaaggagactgccagtgataaactggaggaaggtggggatgacgtcaagtcatcatggcccttacgaccagggctacacacgtgctacaatggcatatacaaagagaagcgacctcg

SEQ ID NO: 530 - DNA, 1436 bp, Cloacibacillus evryensis
cgcgtcgcgacgctggcggcgtgcctaacacatgcaagtcgaacgaagaccatagaggagcttgcgttaatatggttttagtggcggacgggtgagtaacgcgtgaggacttgtcgagtacagggggacaacaggtggaaacgtctgctaataccccataagccttcgggtaaaaggagcgatccggtacacgagagactcgcgttctatcagctagtaggtggggtaacggcccacccaggccaagacggatagccggactgagaggtcgatcggccacactggaactgagacacggtccagactcctacgggaggcagcagtggggaatattgggcaatgggggaaaccctgacccagcgacgccgcgtgagtgaagaaatccctcgggatgtaaaactctgttgtgtgggaagataatgacggtaccacacgaggaagccccggcaaactacgtgccagcagccgcggtaatacgtagggggcgagcgttgttcggaattactgggcgtaaagcgcacgcaggcggaccagtaagtctgtcgtcaaaggcggaggctcaaccttcgttccacgatagatactgcgggtctagagtatgtgagagggaagtggaattcccggtgtagcggtgaaatgcgtagatatcgggaggaacaccagtggcgaaggcggcttcctggcacacaactgacgctcatgtgcgaaagccagggcagcgaacgggattagataccccggtagtcctggccgtaaacgatggatactgggtgtgggtgaagcagttcatccgtgccgtagttaacgcgttaagtatcccgcctggggactacggtcgcaagactgaaactcaaaggaattgacgggggcccgcacaagcggtggagcacgtggtttaattcgatgcaaaccgaagaaccttacctgggtttgacatactaccggtactgacctgaaagggaagggaccccagcttgctggggaagtagaacaggtgctgcatggctgtcgtcagctcgtgtcgtgagatgttgggttaagtcccgcaacgagcgcaacccctatagccagttgctaacaagtgaagttgagcactctggcgagactgccgccgacaaggcggaggaaggtggggatgacgtcaagtcatcatggcctttatgcccagggcgacacacgtgctacaatggacggcacaaaaggcagcttactagcgatagttggcgaatcctaaaaagccgttcccagttcggattgcagtctgaaacccgactgcatgaagccggaatcgctagtaatcgcagatcagccaagctgcggtgaatacgttcccgggccttgtacacaccgcccgtcacaccacccgagttgggggcacccgaagccgcaggcttaacccgtaagggaaagaagcgtctaaggtgcgccgagtaagg

SEQ ID NO: 531 - DNA, 975 bp, Clostridiaceae bacterium END-2
  modified_base (738)..(738): a, c, t, g, unknown or other
  modified_base (856)..(856): a, c, t, g, unknown or other
  modified_base (917)..(917): a, c, t, g, unknown or other
  modified_base (926)..(926): a, c, t, g, unknown or other
  modified_base (946)..(946): a, c, t, g, unknown or other
  modified_base (952)..(952): a, c, t, g, unknown or other
  modified_base (954)..(954): a, c, t, g, unknown or other
  modified_base (958)..(958): a, c, t, g, unknown or other
  modified_base (967)..(969): a, c, t, g, unknown or other
gattatttcggtaagaagtactttatgactgagtggcggacgggtgagtaacgcgtggataacctgcctcatacagggggataacagttagaaatgactgctaataccgcataagcgcacagtgctgcatggcacagtgcgaaaagctccggcggtatgagatggatccgcgtttgattagctagttggtggggtaaaggcctaccaaggcgacgatcaatagccgacctgagagggtgaccggccacattgggactgagacacggcccaaactcctacgggaggcagcagtggggaatattgcacaatgggggaaaccctgatgcagcgacgccgcgtgaaggaagaagtatttcggtatgtaaacttctatcagcagggaagaaaatgacggtacctgactaagaagccccggctaattacgtgccagcagccgcggtaatacgtaaggggcaagcgttatccggatttactgggtgtaaagggagcgtagacggcagtgcaagtctgatgtgaaagcccggggctcaaccccgggactgcattggaaactgtgcagctagagtgtcggagaggtaagtggaattcctagtgtagcggtgaaatgcgtagatattaggaggaacaccagtggcgaaggcggcttactggacgataactgacgttgaggctcgaaagcgtggggagcaaacaggattagataccctggtagtccacgccgtaaacgatgaatactangtgtcgggcgccaaaggcgttcggtgccgcagcaaacgcaataagtattccacctggggagtacgttcgcaagaatgaaactcaaaggaattgacggggacccgcacaagcggtggancatgtggtttaattcgaagcaacgcgaagaaccttaccaagtcttgacatctgcctgaccnggtccgtanaggacccttccttcgggacnggcaananaggnggtgcatgnnngtcgtc

SEQ ID NO: 532 - DNA, 990 bp, Clostridiaceae bacterium JC13
  modified_base (896)..(896): a, c, t, g, unknown or other
  modified_base (904)..(904): a, c, t, g, unknown or other
  modified_base (924)..(924): a, c, t, g, unknown or other
  modified_base (934)..(934): a, c, t, g, unknown or other
  modified_base (942)..(942): a, c, t, g, unknown or other
  modified_base (968)..(968): a, c, t, g, unknown or other
  modified_base (970)..(970): a, c, t, g, unknown or other
  modified_base (983)..(984): a, c, t, g, unknown or other
gaagtgaagatagcttgctattggaacttagtggcgaacgggtgagtaacacgtagataacctgcctgtatgaccgggataacagttggaaacgactgctaataccggataggcagagaggaggcatctcttctctgttaaagttgggacacaacgcaaacagatggatctgcggtgcattagctagttggtgaggtaacggcccaccaaggcgatgatgcatagccggcctgagagggcgaacggccacattgggactgagacacggcccaaactcctacgggaggcagcagtagggaattttcggcaatgggggaaaccctgaccgagcaatgccgcgtgagtgaagacggccttcgggttgtaaagctctgttgtaagggaagaacggcatagagagggaatgctctatgagtgacggtaccttaccagaaagccacggctaactacgtgccagcagccgcggtaatacgtaggtggcaagcgttatccggaattattgggcgtaaagggtgcgtaggcggcgagataagtctgaggtaaaagcccgtggctcaaccacggtaagccttggaaactgtctggctggagtgcaggagaggacaatggaattccatgtgtagcggtaaaatgcgtagatatatggaggaacaccagtggcgaaggcggttgtctggcctgtaactgacgctgaagcacgaaagcgtggggagcaaataggattagataccctagtagtccacgccgtaaacgatgagaactaagtgttggggaaactcagtgctgcagttaacgcaataagttctccgcctggggagtatgcacgcaagtgtgaaactcaaaggaattgacgggggcccgcacaagcggtggagtatgtggtttaattcgacgcnacgcgaanaaccttaccaggccttgacntggtatcaanggccctanagatagggagatagttatggtacacncnggtggtgcatggnngtcgtc

SEQ ID NO: 533 - DNA, 1480 bp, Clostridiales bacterium 9400853
tagagtttgatcctggctcaggatgaacgctggcggcgtgcctaacacatgcaagtcgagcgagaagttactcaatgaatcttcggaagaattgagtaatggaaagcggcggacgggtgagtaacgcgtgggcaacctgcctttcacagagggatagccaaaggaaactttgattaaaacctcataaagccggaatagtgcataatataccggccaaagatttatcggtgaaagatgggcccgcgtctgattagctagttggtggggtaacggctcaccaaggcaacgatcagtagccgacctgagagggtgatcggccacattggaactgagacacggtccaaactcctacgggaggcagcagtggggaatattgcacaatgggcgcaagcttgatgcagcaacgccgcgtgaacgaagaaggccttcgggtcgtaaagttctgtccatagggaagaaacaaatgacggtacctatggaggaagccccggctaaatacgtgccagcagccgcggtaatacgtatggggcaagcgttatccggaattattgggcgtaaagagtgcgtaggtggtggcttaagcgcagggtttaaggcaatggcttaactattgttcgccttgcgaactgggtcacttgagtacaggagaggaaagcggaattcctagtgtagcggtgaaatgcatagatattaggaggaacaccggtggcgaaggcggctttctggactgcaactgacactgaggcacgaaagcgtgggtagcaaacaggattagataccctggtagtccacgccgtaaacgatgagcactaggtgtcggccaataaaggtcggtgccgcagttaacgcattaagtgctccgcctggggagtacgcacgcaagtgtaaaactcaaaggaattgacggggacccgcacaagcagcggagcatgtggtttaattcgaagcaacgcgaagaaccttaccagagcttgacatccctctgacagatccttaatcggattcttcttcggacagaggagacaggtggtgcatggttgtcgtcagctcgtgtcgtgagatgttgggttaagtcccgcaacgagcgcaacccttatcattagttgccatcattaagttgggcactctagtgagactgccggggacaactcggaggaaggtggggatgacgtcaaatcatcatgccccttatgttctgggctacacacgtgctacaatggtcggtacagaaagcagcgaaaccgtgaggtgaagccaatctccaaaaccgatctcagttcggattgtaggctgcaactcgcctacatgaagtcggagttgctagtaatcgcagatcagaatgctgcggtgaatgcgttcccgggtcttgtacacaccgcccgtcacaccatggaagttgggggtgcccgaagttggacaataaatcgtttacctaaggcaaaaccaatgactggggtgaagtcgtaacaaggtagccgta

SEQ ID NO: 534 - DNA, 1489 bp, Clostridiales bacterium 9403326
tagagtttgatcctggctcaggataaacgctggcggcgtgcgtaacacatgcaagtcgaacgagaatgtgctgacggatccttagggtgaagatagcacaggacagtggcggatgggtgagtaacgcgtaagaaacctgcctttcacaccgggatagcagctggaaacggctattaataccggatgacactttttccccgcatgaggaagaggttaaagaatttcggtgaaagatggtcttgcgtctgattagctagttggtggggtaacggcctaccaaggcgacgatcagtagccggcctgagagggtgtacggccacattgggactgagacacggcccaaactcctacgggaggcagcagtggggaattttgcacaatggaggaaactctgatgcagcgacgccgcgtgaacgaagaaggtcttcggattgtaaagttctgtcctgggtgaagataatgacggtaactcaggaggaagccccggctaactacgtgccagcagccgcggtaatacgtagggggcgagcgttgttcggaattattgggcgtaaagggtacgtaggcggtttgttaagtttggcgttaaatcacggggctcaaccccgttcagcgttgaaaactggcaaacttgagtagtagaggggacagtggaattcctagtgtagcggtgaaatgcgtagagattaggaagaataccggtggcgaaggcgactgtctggatacatactgacgctcaggtacgaaagcgtggggagcaaacaggattagataccctggtagtccacgccctaaacgatgagtgctaggtgtcgggtgtcaaagcccggtgccgccgttaacacattaagcactccgcctggggagtacgcacgcaagtgtgaaactcaaaggaattgacggggacccgcacaagtagcggagcatgtggtttaattcgaagcaacgcgaagaaccttaccagggcttgacataacagtgacgggttaagagattaaccgttcccttcggggacactgctacaggtggtgcatggttgtcgtcagctcgtgtcgtgagatgttgggttaagtcccgcaacgagcgcaacccttgtcgttagttgccagcattaagttggggactctagcgagactgccggtgataaaccggaggaaggtggggatgacgtcaaatcatcatgccctttatgtcctgggctacacacgtgctacaatggccgaaaacagcgtgaagcaacctcgtgagagcaagcgaaccacgaaaagtcggtctcagttcggactgtaggctgcaactcgcctacacgaagtcggagttactagtaatcgcgaatcagcatgtcgcggtgaatgcgttcccgggtcttgtacacaccgcccgtcacaccatggaagttggtaatacccgaagccgctgagcgaacctatgacgcaggcgtcgaaggtaggatcaatgactggggtgaagtcgtaacaaggtagccgta

SEQ ID NO: 535 - DNA, 1335 bp, Clostridiales bacterium SY8519
gagtttgatcctggctcaggatgaacgctggcggcgtgcctaacacatgcaagtcgaacgagtggcggacgggtgagtaacgcgtggataacctgcctcaaacagggggataacagccggaaacggctgctaataccgcataagaaaaagtggtttgagatggatccgcgtctgattagttagttggcggggtaacggcccaccaaggcgacgatcagtagccggcctgagagggtgaacggccacattgggactgagacacggcccagactcctacgggaggcagcagtggggaatattgcacaatgggggaaaccctgatgcagcaacgccgcgtgagcgaagaagtatttcggtatgtaaagctctatcagcagggaagatgacggtacctgactaagaagctccggctaaatacgtgccagcagccgcggtaatacgtatggagcaagcgttatccggatttactgggtgtaaagggagcgcaggcggtggcgcaagtctgatgtgaaaacccggggcccaaccccgggactgcattggaaactgcgtgacttgagtgtcggaggggtaagtggaattcctagtgtagcggtgaaatgcgtagatattaggaggaacaccagtggcgaaggcggcttactggacgaactgacgctgaggctcgaaagcgtggggagcaaacaggattagataccctggtagtccacgccgtaaacgatgaatactaggtgttggcatgtcagtgccgcagcaaacgcattaagtattccacctggggagtacgttcgcaagaatgaaactcaaaggaattgacggggacccgcacaagcggtggagcatgtggtttaattcgaagcaacgcgaagaaccttaccaggccttgacatcgacaggtggtgcatggttgtcgtcagctcgtgtcgtgagatgttgggttaagtcccgcaacgagcgcaacccttgtgtatagtagccagcggccgggcactctatacagactgccagggacaacctggaggaaggcggggatgacgtcaaatcatcatgccccttatggcctgggcgacacacgtgctacaatggcgtacagagggaggcraagccgcgaggtggagcgaatcccaaaacgtctcagttcggatgcaggctgcaacccgcctgcagaagctggaatcgctagtaatcgcagatcagcatgctgcggtgaatacgttcccgggtcttgtacacaccgcccgtcacaccatgggagtcggaaatgcccgaagccggtacccagggagccgtcgaaggcaggtctgataactggggtgaagtcgtaacaaggtagcc

SEQ ID NO: 536 - DNA, 1319 bp, Clostridiales bacterium oral clone P4PA_66 P1
gacgaacgctggcggcgcgcctaacacatgcaagtcgagcgagcggcggacgggtgagtaacgcgtgagcaacctaccttttacagggggataacgtcccgaaagggaccctaataccgcatgagcaaagccggtaaaagatgggctcgcgtccgattagatagttggtgaggtaacggcccaccaagtcaacgatcggtagccgacctgagagggtgatcggccacattggaactgagacacggtccagactcctacgggaggcagcagtggggaatattgggcaatgggggaaaccctgacccagcgacgccgcgtgaaggaagacggccttcgggttgtaaacttctgttcttggtgaagaagacggtaaccaaggaggaagccccggctaactacgtgccagcagccgcggtaatacgtagggggcgagcgttgtccggaatgattgggcgtaaagggcgcgtaggcggctacggaagtctggagtggaagtcctattttcaaggtaggaattgctttggaaactccgcagcttgagtgcaggagaggttatcggaattcccggtgtagcggtgaaatgcatagagatcgggaggaacaccagtggcgaaggcgggtaactggactgactgacgctgaggcgcgaaagtgtggggagcaaacaggattagataccctggtagtccacactgtaaacgatgaatgctaggtgtaggtgcatctgtgccgtcgtaaacacaataagcattccgcctggggagtacggtcgcaagattaaaactcaaaggaattgacgggggcccgcacaagcagcggagcatgtggtttaattcgaagcaacgcgaagaaccttaccaggtcttgacatcgacaggtggtgcatggatgtcgtcagctcgtgtcgtgagatgttgggttaagtcccgcaacgagcgcaacccttgccaatagttactaacggctgaggactctattgggactgccgtggacaacacggaggaaggtggggacgacgtcaaatcatcatgccccttatgacctgggctacacacgtgctacaatggtcgccaaagaggagcaaagccgcaaggcggagcggatctcaagcgatctcagttcagatgtgggctgcaacccgcccacagaagtcggagttgctagtaatcgcgaatcagcatgtcgcggtgaatacgttcccgggccttgtacacaccgcccgtcacaccatgggagttgatagcgcccgaaggcagaaggtagccatctgacgaaggcgagattaatgactggggtgaagtcgtaacagggtagccgta

SEQ ID NO: 537 - DNA, 1487 bp, Clostridiales bacterium oral taxon 093
gagtttgatcctggctcaggacgaacgctggcggcatgcttaacacatgcaagtcgaacgagctgattccttcgggatgaaagcgagtgcgaacgggtgagtaatgtatgagtaacctgcctctgtctacgggataacatttggaaacaagtgctaatacggtataagaccacagcaccgcatggtgcaggggtaaaagatttatcggacagagatggactcatatcccattagctagttggtgagataatagcccaccaaggcgacgatgggtagccgagctgagaggctgatcggccacattggaactgaaacacggtccagactcctacgggaggcagcagtggggaatattgggcaatggaggaaactctgacccagcaatgccgcgtgagcgatgaaggtcatcgattgtaaagctcttttcctgggaacgaaacaaatgacggtacccagggaataagccccggctaactacgtgccagcagccgcggtaatacgtagggggcgagcgttgtccggaatgactgggcgtaaagggtgcgtaggtggtttaataagttagaagtgtaatacccgggcttaactcgggtgctgcttctaaaactgttaggcttgagtgtagtagaggaaagcggaattcaatgtgtagcggtggaatgcgtagatatattgaagaacatcagtggcgaaggcggctttctggactataactgacactgaggcacgaaagcgtggggagcaaacaggattagataccctagtagtccacgccgtaaacgatggatactagatgcaggaggtattcactccttctgtgtcgcagctaacgcaataagtatcccgcctggggagtacgatcgcaagattaaaactcaaaggaattgacggggacccgcacaagcagcggaacatgtggtttaattcgaagcaacgcgaaaaaccttaccaagacttgacatcagtatgactatcatagaaatatggtatctcgcaagagcatactgacaggtggtgcatggttgtcgtcagctcgtgtcgtgagatgttaggttaagtcctgcaacgagcgcaacccttataactagttgccaatattaagttaggaactctagttagactgccgtggtcaacacggaggaaggtggggatgacgtcaaatcatcatgccccttacgtcttgggctacacacgtgctacaatggctattacaaagagttgcaagttggtaacagcaagctaatctcaaaaaaatagtctcagttcggattgtgggctgcaacccgcccacatgaagtcggagttgctagtaatcccgaatcagcatgtcggggtgaatgcgttcccgggtcttgtacacaccgcccgtcacgccatgggagttggtagtacccaaagtcggtgagctaaccgcaaggaagcagccgcctaaggtaagatcaatgactggggtgaagtcgtaacaaggtagccgtatcggaaggtgc

SEQ ID NO: 538 - DNA, 1532 bp, Clostridiales bacterium oral taxon F32
agagtttgatcctggctcaggataaacgctggcggcgcacataagacatgcaagtcgaacgaaagtcgttgtatatgaaattgactaagaatttagatttatctagaagatgagaatgtagattatacaacaatggctttagtggcggactggtgagtaatacgtaagcaacctgcctattagaggggaataacaattagaaatgattgataataccgcatatgccatagtcatcacatgatgatagtgggaaaggagtaatccgctgatagatgggcttacgcctgattagatagttggtagggtaatggcctaccaagtctgcgatcagtagccgaactgagaggttgaacggccacattgggactgagatacggcccagactcctacgggaggcagcagtcgggaatattgcgcaatggaggaaactctgacgcagtgacgccgcgtgcaggaagaaggttttcggattgtaaactgctttagacagggaagataaaagacagtacctgtaaaataagctccggctaactacgtgccagcagccgcggtaatacgtagggagcgagcgttatccggatttattgggtgtaaagggtgcgtagacgggaaattaagttatttgtgaaatccctcggcttaaccgaggaactgcaactaaaactgattttcttgagtattggagaggaaagtggaattcctagtgtagcggtgaaatgcgtagatattaggaggaacaccagtggcgaaggcgactttctggacaataactgacgttgaggcacgaaagtgtggggagcaaacaggattagataccctggtagtccacactgtaaacgatggatactaggtgtagggtgtgataaacgctctgtgccgtcgctaacgcagtaagtatcccacctggggagtacgaccgcaaggttgaaactcaaaggaattgacgggggcccgcacaagcagtggagtatgtggtttaattcgacgcaacgcgaagaaccttaccagggcttgacatatacaggaatatgctagagatagtatagctcttcggagcctgtatacaggtggtgcatggttgtcgtcagctcgtgtcgtgagatgttgggttaagtcccgcaacgagcgcaacccctatctttagttaccagcgagtaatgtcgggaactctagagagactgccggtgttaaatcggaggaaggtggggacgacgtcaaatcatcatgccctttatgtcctgggctacacacgtactacaatggctattacaaagggaagcaatacagcaatgtggagcaaaactcaaaaaaatagtctcagttcggattgaaggctgaaattcgccttcatgaagctggaattgctagtaatggcaggtcagcatactgccgtgaatacgttcccgggccttgtacacaccgcccgtcacaccatgagagttggggatacccgaagcctgtgagctaacttttagaggcagcagtcgaaggtagaatcaatgattggggtgaagtcgtaacaaggtagccgt

SEQ ID NO: 539 - DNA, 1474 bp, Clostridiales bacterium ph2
tggctcaggattaacgctggcggcgtgcataacacatgcatgttgaacgagaatctctttgacagatccttcgggtgacgacagagagaggaaagtagcggatgggtgagtaacacgtaaggaacctgccatgcacagggggatagcagccggaaacgactattaataccccatgacacctcactttcgcatgaaagagaggtcaaagatttatcggtgtgtgatggccttgcgtctgattagcttgttggtggggtaaaggcctaccaaggcgatgatcagtagccggcttgagagagtgtacggccacattgggattgagacacggcccagactcctacgggaggcagcagtggggaattttgcacaatggaggaaactctgatgcagcgacgccgcgtgaacgaagaaggtcttcggattgtaaagttctgtcctggacgaagataatgacggtaatccaggaggaagccccggctaactacgtgccagcagccgcggtaatacgtagggggcgagcgttgtccggaatgattgggtgtaaagggtacgcaggcggtctattaagtttgacgtgaaagcccggggctcaacctcggcaagcgttgaaaactggtagacttgaatagtggaagggacagtggaattcctagtgtagcggtgaaatgcgtagagattaggaagaataccaatggcgaaagcaactgtctggacacatattgacgctgaggtacgaaagcgtggggagcaaacaggattagataccctggtagtccacgccgtaaacgctgagtgctaggtgttgggggtcaaacctcggtgccgacgttaacacattaagcactccacctggggagtacgcacgcaagtgtgaaactcaaaggaattgacggggacccgcacaagtagcggagcatgtggtttaattcgacgcaacgcgaagaaccttaccaaggcttgacataaaacggaccggtgtagagatacaccytctcttcggagctgttttacaggtggtgcatggttgtcgtcagctcgtgttgtgaaatgttgggttaagtcccgcaacgagcgcaacccctgtcgttagttaccagcaagtaaagttggggactctaacgagactgccggtgataaaccggaggaaggtggggacgacgtcaaatcatcatgccctttatgtcttgggctacacacgtgctacaatggttgggaacaaagcgcagcaaggtcgcgaggccaagcgaatcgcagaaaaccaatctcagttcggattggaggctgcaacccgcctccatgaagtcggagttactagtaatcgtggatcagcatgccacggtgaatgcgttcccgggtcttgtacacaccgcccgtcacaccatggaagttggtaatacccgaagtcgctgagcgaaccgcaaggaagcaggcgccgaaggtaggatcaatgactggggtgaagtcgtaacaagta

SEQ ID NO: 540 - DNA, 1523 bp, Clostridiales sp.
  BVAB3
agagtttgatcctggctcaggatgaacgctggcggcgtgcttaacacatgcaagtcgaacggagctttgaggaagtgcttgcacagaattaaagcttagtggcggacgggtgagtaacgcgtgaggaacctgcctttcacagtggaataacaacgggaaaccgttgctaatggcgcatgacatcgcattgaggcatctcagagcgattaaaggagaaatccggtgaaagatggactcgcgtccgattagctagttggtgaggtaacggcccaccaaggcgacgatcggtagccgaactgagaggttgatcggccacattgggactgagacacggcccagactcctacgggaggcagcagtggggaatattgggcaatgggcgaaagcctgacccagcaacgccgcgtgaagtatgaaggccttcgggttgtaaacttctttgatcagggaagaaacaaatgacggtacctgaaaaacaagccacggctaactacgtgccagcagccgcggtaatacgtaggtggcgagcgttatccggatttactgggtgtaaagggcgtgcaggcgggctgataagtcagatgtgaaatccccgagcttaactcgggaactgcatctgatactgttggtcttgagtgctggagaggatagtggaattcctagtgtagcggtaaaatgcgcagatattaggaggaacaccagtggcgaaggcggctatctggacagtaactgacgctgaggcgcgaaagcgtgggtagcaaacaggattagataccctggtagtccacgccgtaaacgatgattactaggtgtaggaggtatcgaccccttctgtgccggagttaacacaataagtaatccacctggggagtacggccgcaaggttgaaactcaaaggaattgacgggggcccgcacaagcagtggagtatgtggtttaattcgacgcaacgcgaagaaccttaccagggtttgacatcccttgaacgatgtagagatacataattcccttcggggacaaggagacaggtggtgcatggttgtcgtcagctcgtgtcgtgagatgttgggttaagtcccgcaacgagcgcaacccctattgccagttgccatcatttagttgggcactcaggcgagactgccgttgataaaacggaggaaggtggggatgacgtcaaatcatcatgccccttatatcctgggctacacacgtactacaatggctacaacagagagcagcgacgtcgcgaggcgaagcaaatccccaaatgtagtctcagttcggattgcaggctgcaactcgcctgcatgaagccggaattgctagtaatggcaggtcagcatactgccgtgaatacgttctcgggccttgtacacaccgcccgtcacaccatgagagtcagtaacacccgaagtcagtagtctaaccgcaagggggacgctgccgaaggtgggaccgataattggggtgaagtcgtaacaaggtagccgtatcggaaggtgcggctggatcacctcctttct

SEQ ID NO: 541 - DNA, 1020 bp, Clostridiales bacterium 1_7_47FAA
  modified_base (14)..(15): a, c, t, g, unknown or other
  modified_base (969)..(969): a, c, t, g, unknown or other
  modified_base (974)..(974): a, c, t, g, unknown or other
  modified_base (977)..(977): a, c, t, g, unknown or other
  modified_base (983)..(985): a, c, t, g, unknown or other
gaacgaagcatccnnataggaagttttcggatggaatatgggatgactgagtggcggacgggtgagtaacgcgtggataacctgcctcacactgggggataacagttagaaatggctgctaataccgcataagcgcacagtaccgcatggtacggtgtgaaaaacccaggtggtgtgagatggatccgcgtctgattagccagttggcggggtaacggcccaccaaagcgacgatcagtagccgacctgagagggtgaccggccacattgggactgagacacggcccaaactcctacgggaggcagcagtggggaatattgcacaatgggcgaaagcctgatgcagcgacgccgcgtgagtgaagaagtatctcggtatgtaaagctctatcagcagggaagaaaatgacggtacctgactaagaagccccggctaactacgtgccagcagccgcggtaatacgtagggggcaagcgttatccggatttactgggtgtaaagggagcgtagacggcgatgcaagtctgaagtgaaagcccggggctcaaccccgggactgctttggaaactgtgtggctggagtgcaggagaggtaagtggaattcctagtgtagcggtgaaatgcgtagatattaggaggaacaccagtggcgaaggcggcttactggactgtaactgacgttgaggctcgaaagcgtggggagcaaacaggattagataccctggtagtccacgccgtaaacgatgaatgctaggtgtcggggggcaaagcccctcggtgccgccgctaacgcaataagcattccacctggggagtacgttcgcaagaatgaaactcaaaggaattgacggggacccgcacaagcggtggagcatgtggtttaattcgaagcaacgcgaagaaccttaccaagtcttgacatccccctgaccggacagtaacgtgtcccttccttcgggacaggganacagnggngcatgnnntcgtcagctcgtgtcgtgagatgttgggttaagtc

SEQ ID NO: 542 - DNA, 1435 bp, Clostridiales sp.
  SM4/1
gacgaattgactgagtggcggacgggtgagtaacgcgtgggtaacctgcctcacactgggggacaacagctggaaacggctgctaataccgcataagcgcacagcttcgcatgaagcagtgtgaaaaactccggtggtgtgagatggacccgcgtctgattagctagttggtaaggtaacggcttaccaaggcgacgatcagtagccgacctgagagggtgaccggccacattgggactgagacacggcccaaactcctacgggaggcagcagtggggaatattgcacaatgggggaaaccctgatgcagcgacgccgcgtgagtgaagaagtatttcggtatgtaaagctctatcagcagggaagaaaatgacggtacctgactaagaagccccggctaactacgtgccagcagccgcggtaatacgtagggggcaagcgttatccggatttactgggtgtaaagggagcgtagacggcgaagcaagtctgaagtgaaagcccggggctcaaccgcgggactgctttggaaactgttttgctagagtgctggagaggtaagtggaattcctagtgtagcggtgaaatgcgtagatattaggaggaacaccagtggcgaaggcggcttactggacagtaactgacgttgaggctcgaaagcgtggggagcaaacaggattagataccctggtagtccacgccgtaaacgatgaatactaggtgttggtgagcaaagctcatcggtgccgtcgcaaacgcaataagtattccacctggggagtacgttcgcaagaatgaaactcaaaggaattgacggggacccgcacaagcggtggagcatgtggtttaattcgaagcaacgcgaagaaccttaccaagtcttgacatcggaatgaccggaacttaaccgttccttttcttcggaacattccagacaggtggtgcatggttgtcgtcagctcgtgtcgtgagatgttgggttaagtcccgcaacgagcgcaacccttatcctaagtagccagcagttcggctgggcactcttgggagactgccagggataacctggaggaaggtggggatgacgtcaaatcatcatgccccttatgatttgggctacacacgtgctacaatggcgtaaacaaagggaagcgaagctgtgaagctgagcaaatctcaaaaataacgtctcagttcggattgtagtctgcaactcgactacatgaagctggaatcgctagtaatcgcggatcagaatgccgcggtgaatacgttcccgggtcttgtacacaccgcccgtcacaccatgggagtcagtaacgcccgaagtcagtgacccaaccgcaaggagggagctgccgaaggcgggaccgataactggggtgaagtcgtaacaaggtagccgtatcggaaggtgcggctggatcacctcctttct

SEQ ID NO: 543 - DNA, 1297 bp, Clostridiales sp.
  SS3/4
gatgaacgctggcggcgtgcctaacacatgcaagtcgaacgagtggcggacgggtgagtaacgcgtgggtaacctgcctcatacagggggataacggttagaaatgactgctaataccgcataagaaaaagtggtatgagatggacccgcgtctgattagctagttggtggggtaacggcccaccaaggcgacgatcagtagccgacctgagagggtgaccggccacattgggactgagacacggcccagactcctacgggaggcagcagtgggggatattgcacaatggaggaaactctgatgcagcgacgccgcgtgagtgaagaagtatttcggtatgtaaagctctatcagcagggaagatgacggtacctgactaagaagccccggctaactacgtgccagcagccgcggtaatacgtagggggcaagcgttatccggatttactgggtgtaaagggagcgtagacggcgacgcaagtctgaagtgaaatacccgggctcaacctgggaactgctttggaaactgtgttgctagagtgctggagaggtaagcggaattcctagtgtagcggtgaaatgcgtagatattaggaagaacaccagtggcgaaggcggcttactggacagactgacgttgaggctcgaaagcgtggggagcaaacaggattagataccctggtagtccacgccgtaaacgatgaatactaggtgttggtgcatcggtgccgccgcaaacgcaataagtattccacctggggagtacgttcgcaagaatgaaactcaaaggaattgacggggacccgcacaagcggtggagcatgtggtttaattcgaagcaacgcgaagaaccttaccaaatcttgacatcgacaggtggtgcatggttgtcgtcagctcgtgtcgtgagatgttgggttaagtcccgcaacgagcgcaacccctattgtcagtagccagcagctgggcactctgatgagactgccagggataacctggaggaaggtggggatgacgtcaaatcatcatgccccttatgatttgggctacacacgtgctacaatggcgtacaaagagaagcgagcctgcgagggggagcaaatctcaaaacgtctcagttcggatgtagtctgcaactcgactacagaagctggaatcgctagtaatcgcagatcagaatgctgcggtgaatacgttcccgggtcttgtacacaccgcccgtcacaccatgggagtcggaaatgcccgaagccagtacccagggagctgtcgaaggcaggtctgataactggggtg

SEQ ID NO: 544 - DNA, 1378 bp, Clostridiales sp.
  SSC/2
  modified_base (13)..(13): a, c, t, g, unknown or other
ccttatttgattnttcttcggaactgaagatttggtgattgagtggcggacgggtgagtaacgcgtgggtaacctgccctgtacagggggataacagtcagaaatgactgctaataccgcataagaccacagcaccgcatggtgcaggggtaaaaactccggtggtacaggatggacccgcgtctgattagctggttggtgaggtaacggctcaccaaggcgacgatcagtagccggcttgagagagtgaacggccacattgggactgagacacggcccaaactcctacgggaggcagcagtggggaatattgcacaatgggggaaaccctgatgcagcgacgccgcgtgagtgaagaagtatctcggtatgtaaagctctatcagcagggaagaaaatgacggtacctgactaagaagccccggctaactacgtgccagcagccgcggtaatacgtagggggcaagcgttatccggaattactgggtgtaaagggtgcgtaggtggtatggcaagtcagaagtgaaaacccagggcttaactctgggactgcttttgaaactgtcagactgagtgcaggagaggtaagcggaattcctagtgtagcggtgaaatgcgtagatattaggaggaacatcagtggcgaaggcggcttactggactgaaactgacactgaggcacgaaagcgtggggagcaaacaggattagataccctggtagtccacgccgtaaacgatgaatactaggtgtcggggccgtagaggcttcggtgccgcagccaacgcagtaagtattccacctggggagtacgttcgcaagaatgaaactcaaaggaattgacggggacccgcacaagcggtggagcatgtggtttaattcgaagcaacgcgaagaaccttacctggtcttgacatccttctgaccggtccttaaccgggcgtttgcgtcgggacaggagtgacaggtggtgcatggttgtcgtcagctcgtgtcgtgagatgttgggttaagtcccgcaacgagcgcaacccctatctttagtagccagcatataaggtgggcactctagagagactgccagggataacctggaggaaggtggggacgacgtcaaatcatcatgccccttatgaccagggctacacacgtgctacaatggcgtaaacagagggaagcagcctcgtgagagtgagcaaatcccaaaaataacgtctcagttcggattgtagtctgcaactcgactacatgaagctggaatcgctagtaatcgcgaatcagaatgtcgcggtgaatacgttcccgggtcttgtacacaccgcccgtcacaccatgggagtcagtaacgcccgaagtcagtgacccaaccgtaaggaggga

SEQ ID NO: 545 - DNA, 1510 bp, Clostridium acetobutylicum
tttaaattgagagtttgatcctggctcaggacgaacgctggcggcgtgcttaacacatgcaagtcgagcggggaacttcggttcccagcggcggacgggtgagtaacacgtgggtaacctacctcatagtggggaatagcctttcgaaaggaagattaataccgcataatactcgagaatcgcatgattcttgagccaaaggatttattcgctatgagatggacccgcggcgcattagcttgttggtgaggtaacggctcaccaaggcttcgatgcgtagccgacctgagagggtgatcggccacattggaactgagacacggtccagactcctacgggaggcagcagtggggaatattgcacaatgggggaaaccctgatgcagcaacgccgcgtgagtgatgaaggtcttcggatcgtaaaactctgtcttatgggacgataatgacggtaccataggaggaagccacggctaactacgtgccagcagccgcggtaatacgtaggtggcaagcgttgtccggatttactgggcgtaaaggatgtgtaggcggatatttaagtgagatgtgaaatccccgggcttaacttgggggctgcatttcaaactggatgtctggagtgcaggagaggaaggcagaattcctagtgtagcggtgaaatgcgtagagattaggaagaataccagtggcgaaggcggccttctggactgtaactgacgctgaggcatgaaagcgtggggagcaaacaggattagataccctggtagtccacgccgtaaacgatgaatactaggtgtaggaggtatcgactccttctgtgccgcagttaacacaataagtattccgcctgggaagtacggtcgcaagattaaaactcaaaggaattgacggggacccgcacaagcagcggagcatgtggtttaattcgaagcaacgcgaagaaccttacctagacttgacatctcctgaattagtccgtaatggatgaagtcccttcggggacaggatgacaggtggtgcatggttgtcgtcagctcgtgtcgtgagatgttgggttaagtcccgcaacgagcgcaacccttatcattagttgctaacatttagttgagcactctagtgagactgcccgggttaaccgggaggaaggtggggatgacgtcaaatcatcatgccccttatgtctagggctacacacgtgctacaatggtggggacaaaaagatgcaataccgcaaggtggagcaaaactcaaaaccccatcccagttcggattgtaggctgaaactcgcctacatgaagccggagttgctagtaatcgcgaatcagaatgtcgcggtgaatacgttcccgggtcttgtacacaccgcccgtcacaccatgagagtcggcaacacccgaagcccgtgaggtaaccttttggaaccagcggtcgaaggtggggttgataattggggtgaagtcgtaacaaggtagccgtaggagaacctgcggctggatcacctcctttct

SEQ ID NO: 546 - DNA, 1470 bp, Clostridium aerotolerans
  modified_base (1082)..(1083): a, c, t, g, unknown or other
  modified_base (1085)..(1089): a, c, t, g, unknown or other
cgcgtgcttaacacatgcaagtcgagcgaagcattttaaaggaagttttcggatggaatttaagatgacttagcggcggacgggtgagtaacgcgtgggtaacctgcctcatacagggggataacagttagaaatgactgctaataccgcataagcgcacagtgctgcatagcacagtgtgaaaaactccggtggtatgagatggacccgcgtctgattaggtagttggtgaggtaacggcccaccaagccgacgatcagtagccgacctgagagggtgaccggccacattgggactgagacacggcccaaactcctacgggaggcagcagtggggaatattggacaatgggggaaaccctgatccagcgacgccgcgtgagtgaagaagtatttcggtatgtaaagctctatcagcagggaagaaaatgacggtacctgactaagaagccccggctaactacgtgccagcagccgcggtaatacgtagggggcaagcgttatccggatttactgggtgtaaagggagcgtagacggctctgcaagtctggagtgaaagccggggctcaaccccgggactgctttggaaactgtggagctagagtgcaggagaggtaagtggaattcctagtgtagcggtgaaatgcgtagatattaggaggaacaccagtggcgaaggcggcttactggactgtaactgacgttgaggctcgaaagcgtggggagcaaacaggattagataccctggtagtccacgccgtaaacgatgaatactaggtgttggggagcaaagctcttcggtgccgccgctaacgcaataagtattccacctggggagtacgttcgcaagaatgaaactcaaaggaattgacggggacccgcacaagcggtggagcatgtggtttaattcgaagcaacgcgaagaaccttaccaagtcttgacatcggaatgaccgtctcgtaacggagacctcccttcggggcattccagacaggtggtgcatggttgtcgtcagctcgtgtcgtgagatgttgggttaagtcccgcaacgagcgcaacccttatccttagtagccagcanntnnnnntgggcactctggggagactgccagggataacctggaggaaggtggggatgacgtcaaatcatcatgccccttatgatttgggctacacacgtgctacaatggcgtaaacaaagggaagcaaaggagcgatctggagcaaatcccaaaaataacgtctcagttcggattgtagtctgcaactcgactacatgaagctggaatcgctagtaatcgcagatcagaatgctgcggtgaatacgttcccgggtcttgtacacaccgcccgtcacaccatgggagttggtaacgcccgaagtcagtgacccaaccgtaaggagggagctgccgaaggcgggactgataactggggtgaagtcgtaacaaggtagccgtatcggaagg

SEQ ID NO: 547 - DNA, 1289 bp, Clostridium aldenense
  modified_base (139)..(139): a, c, t, g, unknown or other
  modified_base (676)..(676): a, c, t, g, unknown or other
ggtgagtaacgcgtggataacctgcctcacactgggggataacagttagaaatggctgctaataccgcataagcgcacagtaccgcatgggacggtgtgaaaaacccaggtggtgtgagatggatccgcgtctgattanccagttggcggggtaacggcccaccaaagcgacgatcagtagccgacctgagagggtgaccggccacattgggactgagacacggcccaaactcctacgggaggcagcagtggggaatattgcacaatgggcgcaagcctgatgcagcgacgccgcgtgagtgaaaaaatatctcggtatgtaaagctctatcagcaggaaaaaggataaaaacccggctaactacgtgccagcagccgcggtaatacgtagggggcaagcgttatccggatttactgggtgtaaagggagcgtagacggcgacgcaagtctggagtgaaagcccggggcccaaccccgggactgctttggaaactgtgctgctggagtgcagagaggtaagtggaattcctagtgtacggtgaaatgcgtaatattagaggaacaccagtggcgaaggcggcttactggactgtaactgacgttgaggctcgaaagcgtggggagcaaacaggattagataccctggtagtccacgccgtaaacgatgaatgctangtgtcggggggcaaagcccttcggtgccgccgctaacgcaataagcattccacctggggagtacgttcgcaagaatgaaactcaaaggaattgaccgggacccgcacaagcggtggaccatgtgctttaattcgaaacaacgcgaaaaaccttaccaagtcttgacatccccctgaccggtccgtaacggggcctttccttcgggacaggggagacaggtggtgcatggttgtcgtcagctcgtgtcgtgagatgttgggttaagtcccgcaacgagcgcaacccttatccttagtagccagcacgtcgtggtgggcactctagggagactgccagggataacctggaggaaggtggggatgacgtcaaatcatcatgccccttatgatttgggctacacacgtgctacaatggcgtaaacaaagggaggcgaccctgcgaaggtaagcaaatcccaaaaataacgtcccagttcggactgtagtctgcaacccgactacacgaagctggaatcgctagtaatcgcggatcagaatgccgcggtgaatacgttcccgggtcttgtacacaccgcccgtcacaccatgggagtcagcaacgcccgaagtcagtg

SEQ ID NO: 548 - DNA, 1482 bp, Clostridium aldrichii
  modified_base (47)..(47): a, c, t, g, unknown or other
  modified_base (145)..(145): a, c, t, g, unknown or other
  modified_base (367)..(367): a, c, t, g, unknown or other
  modified_base (946)..(946): a, c, t, g, unknown or other
cggcgtgcttaacacatgcaagtcgagcggaaatacattgaagattnatcggatatgtattttagcggcggacgggtgagtaacgcgtgggcaatctgcctcacacaggggaataacactgggaaactagtgctaataccgcatnatatagtgaagtggcatcactttactatcaaaggagcaatccggtgtgagatgagcccgcgtccgattagctagttggtggggtaacggcccaccaaggcgacgatcggtagccgaactgagaggttgatcggccacattgggactgagacacggcccagactcctacgggaggcagcagtggggaatattgcgcaatgggggaaaccctgacgcagcaacnccgcgtgaaggatgaaggttttcggattgtaaacttctttgattggggacgataatgacggtacccaaaaaacaagccacggctaactacgtgccagcagccgcggtaatacgtaggtggcaagcgttgtccggaattactgggtgtaaagggcgtgtaggcggggatgcaagtcagatgtgaaattccgaagctcaacttcggcgctgcatctgaaactgtatctcttgagtgctggagaggaaagcggaattcctagtgtagcggtgaaatgcgtagatattaggaggaacaccagtggcgaaggcggctttctggacagtaactgacgctgaggcgcgaaagcgtggggagcgaacaggattagataccctggtagtccacgccgtaaacgatggatactaggtgtaggaggtatcgaccccttctgtgccggagttaacacaataagtatcccacctggggagtacggccgcaaggttgaaactcaaaggaattgacgggggcccgcacaagcagtggagtatgtggtttaattcgaagcaacgcgaagaaccttaccagggcttgacataccantgacgtacttagagataggtattcccttcgggacaatggatacaggtggtgcatggttgtcgtcagctcgtgtcgtgagatgttgggttaagtcccgcaacgagcgcaacccctgttgttagttgccatcattaagttgggcactctagcgagactgccggtgacaaatcggaggaaggtggggacgacgtcaaatcatcatgccccttatgtcctgggctacacacgtactacaatggctattacagagggaagcgaagccgcgaggtggagcaaatctccaaaaatagtcccagttcagattgcaggctgaaactcgcctgcatgaagtcggaattgctagtaatggcaggtcagcatactgccgtgaatacgttcccgggccttgtacacaccgcccgtcacaccatgagagtctgcaacacccgaagtcagtagtctaactgtaaagaggacgctgccgaaggtggggccgatgattggggtgaagtcgtaacaaggtagccgtatcggaaggtgcggctggatcacctcct

SEQ ID NO: 549 - DNA, 1481 bp, Clostridium algidicarnis
agagtttgatcctggctcaggacgaacgctggcggcgtgcttaacacatgcaagtcgagcgaagttattccttcggggataacttagcggcggacgggtgagtaacacgtgggtaacctgcctcatagagggggatagccttccgaaaggaagattaataccccataacatagcattatcgcatgataaagttattaaaggagtaatccgctatgagatggacccgcggcgcattagctagttggtgaggtaacggctcaccaaggccacgatgcgtagccgacctgagagggtgatcggccacattgggactgagacacggcccagactcctacgggaggcagcagtggggaatattgcacaatgggcgaaagcctgatgcagcaacgccgcgtgagtgatgaaggccttcgggtcgtaaagctctgtcttcggggacgataatgacggtacccgaggaggaagccacggctaactacgtgccagcagccgcggtaatacgtaggtggcaagcgttgtccggatttactgggcgtaaagggagcgtaggcggatacttaagtgggatgtgaaatacccgggctcaacccgggtgctgcattccaaactgggtatctagagtgtgggagaggaaagtggaattcctagtgtagcggtgaaatgcgtagagattaggaagaacaccagtggcgaaggcgactttctggaccataactgacgctgaggctcgaaagcgtggggagcaaacaggattagataccctggtagtccacgccgtaaacgatggatactaggtgtgggggataccaatcctccgtgccgtcgttaacacactaagtatcccgcctggggagtacgatcgcaagattaaaactcaaaggaattgacgggggcccgcacaagcagcggagcatgtggtttaattcgaagcaacgcgaagaaccttacctagacttgacatctcctgaattacctgtaattagggaagcccttcggggcaggaagacaggtggtgcatggttgtcgtcagctcgtgtcgtgagatgttgggttaagtcccgcaacgagcgcaacccttattgttagttgctaccatttagttgagcactctagcgagactgcctgggttaaccaggaggaaggtggggatgacgtcaaatcatcatgccccttatgtctagggctacacacgtgctacaatggcgagtacaacgagatgcaatatcgtgaggtggagcaaaactcaaaaaactcgtcccagttcggattgtaggctgaaactcgcctacatgaagccggagttgctagtaatcgcgaatcagaatgtcgcggtgaatacgttcccgggccttgtacacaccgcccgtcacaccatgagagttggcaatacccgaagtccgtgcgctaacgcgtaagcgaggcagcggccgaaggtagggtcagcgattggggtgaagtcgtaacaaggtagccgtaggaga

SEQ ID NO: 550 - DNA, 1502 bp, Clostridium algidixylanolyticum
agagtttgatcctggctcaggatgaacgctggcggcgtgcttaacacatgcaagtcgagcgaagcgattttaaggaagccttcgggtggaattagaattgacttagcggcggacgggtgagtaacgcgtgggtaacctgcctcatacagggggataacagttagaaatgactgctaataccgcataagcgcacagtgctgcatagcacagtgtgaaaaactccggtggtatgagatggacccgcgtctgattaggtagttggtgaggtaacggcccaccaagccgacgatcagtagccgacctgagagggtgaccggccacattgggactgagacacggcccaaactcctacgggaggcagcagtggggaatattggacaatgggggaaaccctgatccagcgacgccgcgtgactgaagaagtatttcggtatgtaaaggtctatcagcagggaagaaaatgacggtacctgactaagaagccccggctaactacgtgccagcagccgcggtaatacgtagggggcaagcgttatccggatttactgggtgtaaagggagcgtagacggctctgcaagtctggagtgaaagcccggggctcaaccccgggactgctttggaaactgtggagctagagtgcaggagaggtaagtggaattcctagtgtagcggtgaaatgcgtagatattaggaggaacaccagtggcgaaggcggcttactggactgtaactgacgttgaggctcgaaagcgtggggagcaaacaggattagataccctggtagtccacgccgtaaacgatgaatactaggtgtcggggagcaaagctcttcggtgccgtcgctaacgcaataagtattccacctggggagtacgttcgcaagaatgaaactcaaaggaattgacggggacccgcacaagcggtggagcatgtggtttaattcgaagcaacgcgaagaaccttaccaagtcttgacatcggaatgacagccttataactaaggtctccctacggggcattctagacaggtggtgcatggttgtcgtcagctcgtgtcgtgagatgttgggttaagtcccgcaacgagcgcaacccttatccttagtagccagcagttcggctgggcactctggggagactgccagggataacctggaggaaggtggggatgacgtcaaatcatcatgccccttatgatttgggctacacacgtgctacaatggcgtaaacaaagggaagcgaaggagcgatctggagcaaaccccaaaaataacgtctcagttcggattgtagtctgcaactcgactacatgaagctggaatcgctagtaatcgcagatcagaatgctgcggtgaatacgttcccgggtcttgtacacaccgcccgtcacaccatgggagttggtaacgcccgaagtcagtgacccaaccgtaaggagggagctgccgaaggcgggactgataactggggtgaagtcgtaacaaggtagccgtatcggaga

SEQ ID NO: 551 - DNA, 1454 bp, Clostridium aminovalericum
  modified_base (465)..(466): a, c, t, g, unknown or other
  modified_base (572)..(573): a, c, t, g, unknown or other
  modified_base (774)..(774): a, c, t, g, unknown or other
ttaacacatgcaagtcaacggagttaatcaagcgcgaagtcttcggatggaagcttgttaacttagtggcggacgggtgagtaacgcgtgggtaacctgccttatacagggggataacagccggaaacggttgctaataccgcataagcatacagtgccgcatggtacagtgtgaaaaagattaagttcaacttcgttcaactctggtataagatggacccgcgtctgattagctagttggtgaggtaatggctcaccaatggcgacgatcagtagccggcttgagagagtgaccggccacattgggactgagacacggcccaaactcctacgggaggcagcagtggggaatattgcacaatgggggaaaccctgatgcagcgacgccgcgtgagtgaagaagtatttcggtatgtaaagctctatcagcagggacgataatgacggtacctgactaagaagccnnggctaactacgtgccagcagccgcggtaatacgtagggggcaagcgttatccggatttactgggtgtaaagggagcgtagacggtctggtaagtcaggtgtgaaanncccggggctcaaccccggattgcacttgaaactacccgactagagtgcaggagaggtaagtggaattcctagtgtagcggtgaaatgcgtagatattaggaggaacaccagtggcgaaggcggcttactggactgtaactgacgttgaggctcgaaagcgtggggagcgaaacaggattagataccctggtagtccacgcngtaaacgatgaatactaggtgttggggtccataaggacttcggtgccgtcgcaaacgcaataagtattccacctggggagtacgttcgcaagaatgaaactcaaaggaattgacggggacccgcacaagcgtgggagcatgtggtttaattcgaagcaacgcgaagaaccttaccaggtcttgacatccctctgaccggtccgtaatgggacctttccttcgggacagaggaacaggtggtgcatggttgtcgtcagctcgtgtcgtgagatgttgggttaagtcccgcaacgagcgcaacccctatctttagtagccagcagttcggctgggcactctagagagactgccagggataacctggaggaaggcggggatgacgtcaaatcatcatgccccttatgatctgggctacacacgtgctacaatggtgactacaaagagaagcaaagctgtgaagtggagccaatctcaaaaaggtcatctcagttcggattgtagtctgcaactcgactacatgaagctggaatcgctagtaatcgcagatcagaatgctgtggtgaatacgttcccgggtcttgtacacaccgcccgtcacaccatgggagttggatatgcccgaagtcagtgacccaaccgtaaggagggagctgccgaaggtggagccaatgactggggtg

SEQ ID NO: 552 - DNA, 1485 bp, Clostridium amygdalinum
ctcaggatgaacgctggcggcgtgcttaacacatgcaagtcgagcgaagcagttttaaggaagttttcggatggaattaaaattgactgagcggcggacgggtgagtaacgcgtgggtaacctgcctcatacagggggataacagttggaaacgactgctaataccgcataagcgcacagtgctgcatggcacggtgtgaaaaactccggtggtatgagatggacccgcgtctgattaggtagttggtggggtaacggcccaccaagccgacgatcagtagccgacctgagagggtgaccggccacattgggactgagacacggcccaaactcctacgggaggcagcagtggggaatattggacaatgggggaaaccctgatccagcgacgccgcgtgactgaagaagtatttcggtatgtaaaggtctatcagcagggaagaaaatgacggtacctgactaagaagccccggctaactacgtgccagcagccgcggtaatacgtagggggcaagcgttatccggatttactgggtgtaaagggagcgtagacggcgatgcaagtctggagtgaaagcccggggctcaaccccgggactgctttggaaactgtgttgctagagtgcaggagaggtaagtggaattcctagtgtagcggtgaaatgcgtagatattaggaggaacaccagtggcgaaggcggcttactggactgtaactgacgttgaggctcgaaagcgtggggagcaaacaggattagataccctggtagtccacgccgtaaacgatgaatactaggtgttggggagcaaagctcttcggtgccgccgctaacgcaataagtattccacctggggagtacgttcgcaagaatgaaactcaaaggaattgacggggacccgcacaagcggtggagcatgtggtttaattcgaagcaacgcgaagaaccttaccaagtcttgacatcggaatgaccggtccgtaacggggccttcccttcggggcattccagacaggtggtgcatggttgtcgtcagctcgtgtcgtgagatgttgggttaagtcccgcaacgagcgcaacccttatccttagtagccagcagtacggctgggcactctggggagactgccagggataacctggaggaaggtggggatgacgtcaaatcatcatgccccttatgatttgggctacacacgtgctacaatggcgtaaacaaagggaagcgaaggagtgatccggagcaaatctcaaaaataacgtctcagttcggattgtagtctgcaactcgactacatgaagctggaatcgctagtaatcgcggatcagaatgccgcggtgaatacgttcccgggtcttgtacacaccgcccgtcacaccatgggagttggtaacgcccgaagtcagtgacccaaccgtaaggagggagctgccgaaggcgggactgataactggggtgaagtcgtaacaaggtagccgtatcgga

SEQ ID NO: 553 - DNA, 1504 bp, Clostridium argentinense
agagtttgatcctggctcaggacgaacgctggcggcgtgcctaacacatgcaagtcgagcgatgaagcttccttcgggaagtggattagcggcggacgggtgagtaacacgtgggtaacctgcctctaagaggggaatagcctcccgaaagggagattaataccgcataaagtatgaaggtcgcatgacttttataccaaaggagtaatccgctatgagatggacccgcggcgcattagctagttggtgaggtaagggctcaccaaggcaacgatgcgtagccgacctgagagggtgatcggccacattggaactgagacacggtccagactcctacgggaggcagcagtggggaatattgcgcaatgggggaaaccctgacgcagcaacgccgcgtgaatgaagaaggccttagggttgtaaagttctgtcatatgggaagataatgacggtaccatatgaggaagccacggctaactacgtgccagcagccgcggtaatacgtaggtggcaagcgttgtccggatttactgggcgtaaaggatgcgtaggcggacatttaagtcagatgtgaaatacccgggctcaacttgggtgctgcatttgaaactgggtgtctagagtgcaggagaggaaagcggaattcctagtgtagcggtgaaatgcgtagagattaggaagaacaccagtggcgaaggcggctttctggactgtaactgacgctgaggcatgaaagcgtggggagcaaacaggattagataccctggtagtccacgccgtaaacgatgaatactaggtgtaggaggtatcgaccccttctgtgccgcagttaacacaataagtattccgcctggggagtacgatcgcaagattaaaactcaaaggaattgacgggggcccgcacaagcagcggagcatgtggtttaattcgaagcaacgcgaagaaccttacctagacttgacatcccctgaattacctgtaatgagggaagcccttcggggcagggagacaggtggtgcatggttgtcgtcagctcgtgtcgtgagatgttgggttaagtcccgcaacgagcgcaacccttatcattagttgctaccattaagttgagcactctagtgagactgcccgggttaaccgggaggaaggtggggatgacgtcaaatcatcatgccccttatgtctagggctacacacgtgctacaatggttggtacaacaagatgcaagaccgcgaggtggagctaaacttaaaaaaccaacccagttcggattgtaggctgaaactcgcctacatgaagccggagttgctagtaatcgcgaatcagcatgtcgcggtgaatacgttcccgggccttgtacacaccgcccgtcacaccatgagagctggtaacacccgaagtccgtgaggtaaccgtaaggagccagcgccgaaggtgggattagtgattggggtgaagtcgtaacaaggtagccgtaggagaacctgcggttggatcacctcctt

SEQ ID NO: 554 - DNA, 1387 bp, Clostridium asparagiforme
tcgaacgaagcattttagatgaagttttcggatggattctgagatgactgagtggcggacgggtgagtaacacgtggataacctgcctcacactgggggacaacagttagaaatgactgctaataccgcataagcgcacagtaccgcatggtacggtgtgaaaaactccggtggtgtgagatggatccgcgtctgattagccagttggcggggtaacggcccaccaaagcgacgatcagtagccgacctgagagggtgaccggccacattgggactgagacacggcccaaactcctacgggaggcagcagtggggaatattgcacaatgggcgaaagcctgatgcagcgacgccgcgtgagtgaagaagtatttcggtatgtaaagctctatcagcagggaagataatgacggtacctgactaagaagccccggctaactacgtgccagcagccgcggtaatacgtagggggcaagcgttatccggatttactgggtgtaaagggagcgtagacggcatggcaagtctgaagtgaaaacccagggctcaaccctgggactgctttggaaactgtcaagctagagtgcaggagaggtaagtggaattcctagtgtagcggtgaaatgcgtagatattaggaggaacaccagtggcgaaggcggcttactggactgtaactgacgttgaggctcgaaagcgtggggagcaaacaggattagataccctggtagtccacgccgtaaacgatgagtgctaggtgttggggggcaaagcccttcggtgccgtcgcaaacgcaataagcactccacctggggagtacgttcgcaagaatgaaactcaaaggaattgacggggacccgcacaagcggtggagcatgtggtttaattcgaagcaacgcgaaaaaccttaccaagtcttgacatcctcttgaccggcgtgtaacggcgcctttccttcgggacaagagagacaggtggtgcatggttgtcgtcagctcgtgtcgtgagatgttgggttaagtcccgcaacgagcgcaacccttatccttagtagccagcattaagatgggcactctagggagactgccagggacaacctggaggaaggtggggatgacgtcaaatcatcatgccccttatgatttgggctacacacgtgctacaatggcgtaaacaaagggaagcgaccctgcgaaggtgagcaaatctcaaaaataacgtcccagttcggactgtagtctgcaacccgactacacgaagctggaatcgctagtaatcgcgaatcagaatgtcgcggtgaatacgttcccgggtcttgtacacaccgcccgtcacaccatgggagtcagcaacgcccgaagtcagtgacccaaccgaaaggaggga

SEQ ID NO: 555 - DNA, 1508 bp, Clostridium baratii
gagagtttgatcctggctcaggacgaacgctggcggcgtgcctaacacatgcaagtcgagcgatgaagtttccttcgggaaacggattagcggcggacgggtgagtaacacgtgggtaacctgcctcatagaggggaatagcctcccgaaagggagattaataccgcataacattgcagtttcgcatgaaacagcaattaaaggagcaatccgctatgagatggacccgcggcgcattagctagttggtaaggtaatggcttaccaaggcgacgatgcgtagccgacctgagagggtgatcggccacattgggactgagacacggcccagactcctacgggaggcagcagtggggaatattgcacaatgggggaaaccctgatgcagcaacgccgcgtgagtgatgacggtcttcggattgtaaagctctgtctttggggacgataatgacggtacccaaggaggaagccacggctaactacgtgccagcagccgcggtaatacgtaggtggcgagcgttgtccggatttactgggcgtaaagggagcgtaggcggatttttaagtgggatgtgaaatacccgggctcaacctgggtgctgcattccaaactgggaatctagagtgcaggaggggagagtggaattcctagtgtagcggtgaaatgcgtagagattaggaagaacaccagtggcgaaggcgactctctggactgtaactgacgctgaggctcgaaagcgtggggagcgaacaggattagataccctggtagtccacgccgtaaacgatgaatactaggtgtaggggtttcaacacctctgtgccgccgctaacgcattaagtattccgcctggggagtacggtcgcaagattaaaactcaaaggaattgacgggggcccgcacaagtagcggagcatgtggtttaattcgaagcaacgcgaagaaccttacctagacttgacatcctctgcattacccttaatcggggaagttccttcgggaacagagtgacaggtggtgcatggttgtcgtcagctcgtgtcgtgagatgttgggttaagtcccgcaacgagcgcaacccctattgttagttgctaccattaagttgagcactctagcgagactgcctgggttaaccaggaggaaggtggggatgacgtcaaatcatcatgccccttatgtctagggctacacacgtgctacaatggcaagtacagagagatgctataccgcgaggtggagctaaacttcaaaacttgtctcagttcggattgtaggctgaaactcgcctacatgaagctggagttgctagtaatcgcgaatcagcatgtcgcggtgaatacgttcccgggccttgtacacaccgcccgtcacaccatgagagttggcaatacccaaagttcgtgagctaacgcgtaagcgaggcagcgacctaaggtagggtcagcgattggggtgaagtcgtaacaaggtagccgtaggagaacctgcggctggatcacctcctt

SEQ ID NO: 556 - DNA, 1364 bp, Clostridium bartlettii
tcgagcgattctcttcggagaagagcggcggacgggtgagtaacgcgtgggtaacctgccctgtacacacggataacataccgaaaggtatgctaatacgggataacataagaaattcgcatgtttttcttatcaaagctccggcggtacaggatggacccgcgtctgattagctagttggtgaggtaatggctcaccaaggcgacgatcagtagccgacctgagagggtgatcggccacattggaactgagacacggtccaaactcctacgggaggcagcagtggggaatattgcacaatgggcgaaagcctgatgcagcaacgccgcgtgagcgatgaaggccttcgggtcgtaaagctctgtcctcaaggaagataatgacggtacttgaggaggaagccccggctaactacgtgccagcagccgcggtaatacgtagggggctagcgttatccggatttactgggcgtaaagggtgcgtaggcggtcttttaagtcaggagtgaaaggctacggctcaaccgtagtaagctcttgaaactggaggacttgagtgcaggagaggagagtggaattcctagtgtagcggtgaaatgcgtagatattaggaggaacaccagtagcgaaggcggctctctggactgtaactgacgctgaggcacgaaagcgtggggagcaaacaggattagataccctggtagtccacgccgtaaacgatgagtactagctgtcggaggttacccccttcggtggcgcagctaacgcattaagtactccgcctggggagtacgctcgcaagagtgaaactcaaaggaattgacggggacccgcacaagtagcggagcatgtggtttaattcgaagcaacgcgaagaaccttacctaagcttgacatccttttgaccgatgcctaatcgcatctttcccttcggggacagaagtgacaggtggtgcatggttgtcgtcagctcgtgtcgtgagatgttgggttaagtcccgcaacgagcgcaacccttgcctttagttgccatcattaagttgggcactctagagggactgccagggataacctggaggaaggtggggatgacgtcaaatcatcatgccccttatgcttagggctacacacgtgctacaatgggtggtacagagggcagcgaagtcgtgaggccaagctaatcccttaaagccattctcagttcggattgtaggctgaaactcgcctacatgaagctggagttactagtaatcgcagatcagaatgctgcggtgaatgcgttcccgggtcttgtacaccccgcccgtcacaccatgggagttgggggcgcccgaagccggctagctaaccttttaggaagcggtc

SEQ ID NO: 557 - DNA, 1505 bp, Clostridium beijerinckii
agagtttgatcctggctcaggacgaacgctggcggcgtgcttaacacatgcaagtcgagcgatgaagttccttcgggaacggattagcggcggacgggtgagtaacacgtgggtaacctgcctcatagaggggaatagcctttcgaaaggaagattaataccgcataagattgtagtgccacatggcatagcaattaaaggagtaatccgctatgagatggacccgcgtcgcattagctagttggtgaggtaacggctcaccaaggcgacgatgcgtagccgacctgagagggtgatcggccacattgggactgagacacggcccagactcctacgggaggcagcagtggggaatattgcacaatgggggaaaccctgatgcagcaacgccgcgtgagtgatgacggtcttcggattgtaaagctctgtcttcagggacgataatgacggtacctgaggaggaagccacggctaactacgtgccagcagccgcggtaatacgtaggtggcaagcgttgtccggatttactgggcgtaaagggagcgtaggtggatatttaagtgggatgtgaaatactcgggcttaacctgggtgctgcattccaaactggatatctagagtgcaggagaggaaagtagaattcctagtgtagcggtgaaatgcgtagagattaggaagaataccagtggcgaaggcgactttctggactgtaactgacactgaggctcgaaagcgtggggagcaaacaggattagataccctggtagtccacgccgtaaacgatgaatactaggtgtaggggttgtcatgacctctgtgccgccgctaacgcattaagtattccgcctggggagtacggtcgcaagattaaaactcaaaggaattgacgggggcccgcacaagcagcggagcatgtggtttaattcgaagcaacgcgaagaaccttacctagacttgacatctcctgaattactcttaatcggggaagcccttcggggcaggaagacaggtggtgcatggttgtcgtcagctcgtgtcgtgagatgttgggttaagtcccgcaacgagcgcaacccttattgttagttgctaccatttagttgagcactctagcgagactgcccgggttaaccgggaggaaggtggggatgacgtcaaatcatcatgccccttatgtctagggctacacacgtgctacaatggctggtacagagagatgctaaaccgcgaggtggagccaaactttaaaaccagtctcagttcggattgtaggctgaaactcgcctacatgaagctggagttgctagtaatcgcgaatcagaatgtcgcggtgaatacgttcccgggccttgtacacaccgcccgtcacaccatgagagttggcaatacccaaagttcgtgagctaacgcgtaagcggggcagcgacctaaggtagggtcagcgattggggtgaagtcgtaacaaggtagccgtaggagaacctgcggctggatcacctccttt

SEQ ID NO: 558 - DNA, 1329 bp, Clostridium bifermentans
  modified_base (1316)..(1316): a, c, t, g, unknown or other
  modified_base (1320)..(1321): a, c, t, g, unknown or other
gatctcttcggagagagcggcggacgggtgagtaacgcgtgggtaacctgccctgtacacacggataacataccgaaaggtatactaatacgggataacatatgaaagtcgcatggcttttgtatcaaagctccggcggtacaggatggacccgcgtctgattagctagttggtaaggtaatggcttaccaaggcaacgatcagtagccgacctgagagggtgatcggccacactggaactgagacacggtccagactcctacgggaggcagcagtggggaatattgcacaatgggcgaaagcctgatgcagcaacgccgcgtgagcgatgaaggccttcgggtcgtaaagctctgtcctcaaggaagataatgacggtacttgaggaggaagccccggtaactactgccccggatacagggggtcggaattactgggcgtaaagggtgcgtaggtggttttttaagtcagaagtgaaaggctacggctcaaccgtagtaagcttttgaaactagagaacttgagtgcaggagaggagagtagaattcctagtgtagcggtgaaatgcgtagatattaggaggaataccagtagcgaaggcggctctctggactgtaactgacactgaggcacgaaagcgtggggagcaaacaggattagataccctggtagtccacgccgtaaacgatgagtactaggtgtcgggggttacccccctcggtgccgcagctaacgcattaagtactccgcctgggaagtacgctcgcaagagtgaaactcaaaggaattgacggggacccgcacaagtagcggagcatgtggtttaattcaaagctacgcgaagaaccttacctaagcttgacatccggctacgcctcacccgaagtgagcttttccatctggggaagtggtgacaggtggtgcatggttgtcgtcagctcgtgtcgtgagatgttgggttaagtcccgcaacgagcgcaacccttgcctttagttgccagcattaagttgggcactctagagggactgccgaggataactcggaggaaggtggggatgacgtcaaatcatcatgccccttatgcttagggctacacacgtgctacaatgggtggtacagagggttgccaagccgcgaggtggagctaatcccttaaagccattctcagttcggattgtaggctgaaactcgcctacatgaagctggagttactagtaatcgcagatcagaatgctgcggtgaatgcgttcccgggtcttgtacacaccgcccgtcacaccatggaagttgggggcgcccgaagccggttagctancctnntaggaagc

SEQ ID NO: 559 - DNA, 1377 bp, Clostridium bolteae
  modified_base (13)..(13): a, c, t, g, unknown or other
gaagcaattaaanggaagttttcggatggaatttgattgactgagtggcggacgggtgagtaacgcgtggataacctgcctcacactgggggataacagttagaaatgactgctaataccgcataagcgcacagtaccgcatggtacggtgtgaaaaactccggtggtgtgagatggatccgcgtctgattagccagttggcggggtaacggcccaccaaagcgacgatcagtagccgacctgagagggtgaccggccacattgggactgagacacggcccaaactcctacgggaggcagcagtggggaatattgcacaatgggcgaaagcctgatgcagcgacgccgcgtgagtgaagaagtatttcggtatgtaaagctctatcagcagggaagaaaatgacggtacctgactaagaagccccggctaactacgtgccagcagccgcggtaatacgtagggggcaagcgttatccggatttactgggtgtaaagggagcgtagacggcgaagcaagtctgaagtgaaaacccagggctcaaccctgggactgctttggaaactgttttgctagagtgtcggagaggtaagtggaattcctagtgtagcggtgaaatgcgtagatattaggaggaacaccagtggcgaaggcggcttactggacgataactgacgttgaggctcgaaagcgtggggagcaaacaggattagataccctggtagtccacgccgtaaacgatgaatgctaggtgttggggggcaaagcccttcggtgccgtcgcaaacgcagtaagcattccacctggggagtacgttcgcaagaatgaaactcaaaggaattgacggggacccgcacaagcggtggagcatgtggtttaattcgaagcaacgcgaagaaccttaccaagtcttgacatccttttgaccggcgtgtaacggcgccttcccttcggggcaagagagacaggtggtgcatggccgtcgtcagctcgtgtcgtgagatgttgggttaagtcccgcaacgagcgcaacccttatccttagtagccagcaggtagagctgggcactctagggagactgccagggataacctggaggaaggtggggatgacgtcaaatcatcatgccccttatgatttgggctacacacgtgctacaatggcgtaaacaaagggaagcaagacagtgatgtggagcaaatcccaaaaataacgtcccagttcggactgtagtctgcaacccgactacacgaagctggaatcgctagtaatcgcgaatcagaatgtcgcggtgaatacgttcccgggtcttgtacacaccgcccgtcacaccatgggagtcagcaacgcccgaagtcagtgacccaactcgcaag

SEQ ID NO: 560 - DNA, 1355 bp, Clostridium botulinum
tgaagcttccttcgggaagtggattagcggcggacgggtgagtaacacgtgggtaacctgcctcaaagtgggggatagccttccgaaaggaagattaataccgcataacataagagaatcgcatgattttcttatcaaagatttattgctttgagatggacccgcggcgcattagctagttggtaaggtaacggcttaccaaggcaacgatgcgtagccgacctgagagggtgatcggccacattggaactgagacacggtccagactcctacgggaggcagcagtggggaatattgcgcaatgggggaaaccctgacgcagcaacgccgcgtgggtgagaaggtcttcggattgtaacctgttttctgggacgataatgacggtaccagaggaggaagccacggctaactacgtgccagcagccgcggtaatacgtaggtggcgagcgttgtccggatttactgggcgtaaagggtgcgtaggcggatgtttaagtgggatgtgaaatccccgggcttaacctgggggctgcattccaaactggatatctagagtgcaggagaggaaagcggaattcctagtgtagcggtgaaatgcgtagagattaggaagaacaccagtggcgaaggcggctttctggactgtaactgacgctgaggcacgaaagcgtgggtagcaaacaggattagataccctggtagtccacgccgtaaacgatggatactaggtgtagggggtatcaactccccctgtgccgcagttaacacaataagtatcccgcctggggagtacggtcgcaagagtaaaactcaaaggaattgacgggggcccgcacaagcagcggagcatgtggtttaattcgaagcaacgcgaaaaaccttacctggacttgacatcccttgcatagcctagagataggtgaagcccttcggggcaaggagacaggaggtgcatgggtgtcgtcagctcgtgtcgtgagatgttaggttaagtcctgcaacgagcgcaacccttgttattagttgctaccattaagttgagcactctaatgagactgcctgggtaaccaggaggaaggtggggatgacgtcaaatcatcatgccccttatgtccagggctacacacgtgctacaatggtaggtacaataagacgcaagaccgtgaggtggagcaaaacttataaaacctatctcagttcggattgtaggctgcaactcgcctacatgaagctggagttgctagtaatcgcgaatcagaatgtcgcggtgaatacgttcccgggccttgtacacaccgcccgtcacaccatgagagctggtaacacccgaagtccgtgaggtaaccgtaaggagc

SEQ ID NO: 561 - DNA, 1366 bp, Clostridium butyricum
tcgagcgatgaagctccttcgggagtggattagcggcggacgggtgagtaacacgtgggtaacctgcctcatagaggggaatagcctttcgaaaggaagattaataccgcataagattgtagtaccgcatggtacagcaattaaaggagtaatccgctatgagatggacccgcgtcgcattagctagttggtgaggtaacggctcaccaaggcgacgatgcgtagccgacctgagagggtgatcggccacattgggactgagacacggcccagactcctacgggaggcagcagtggggaatattgcacaatgggggaaaccctgatgcagcaacgccgcgtgagtgatgacggtcttcggattgtaaagctctgtctttagggacgataatgacggtacctaaggaggaagccacggctaactacgtgccagcagccgcggtaatacgtaggtggcaagcgttgtccggatttactgggcgtaaagggagcgtaggtggatatttaagtgggatgtgaaatacccgggcttaacctgggtgctgcattccaaactggatatctagagtgcaggagaggaaaggagaattcctagtgtagcggtgaaatgcgtagagattaggaagaataccagtggcgaaggcgcctttctggactgtaactgacactgaggctcgaaagcgtggggagcaaacaggattagataccctggtagtccacgccgtaaacgatgaatactaggtgtaggggttgtcatgacctctgtgccgccgctaacgcattaagtattccgcctggggagtacggtcgcaagattaaaactcaaaggaattgacgggggcccgcacaagcagcggacatgtggtttaattgaagcaacgcgaagaaccttacctagacttgacatctcctgaattctctgtaatggagaagccacttcggtggcaggaagacaggtggtgcatggttgtggtcagctcgtgtcgtgagatgttgggttaagtcccgcaacgagcgcaacccttattgttagttgctcccatttagttgagcactctagcgagactgcccgggttaaccgggaggaaggtggggatgacgtcaaatcatcatgccccttatgtctagggctacacacgtgctacaatggtcggtacaatgagatgcaacctcgcgagagtgagcaaaactataaaaccgatctcagttcggattgtagggtgaaactcgcctacatgaagctggagttgctagtaatcgcgaatcagaatgtcgcggagaatacgttcccgggccttgtacacaccgcccgtcacaccatgagagttggcaatacccaaagttcgtgagctaaccgcaaggaggca

SEQ ID NO: 562 - DNA, 1473 bp, Clostridium cadaveris
agagtttgatcctggctcaggatgaacgctggcggcgtgcttaacacatgcaagtcgagcgagggagcaccttcgggtgtgaactagcggcggacgggtgagtaacacgtgggcaacctgccttacagagggggatagccttccgaaaggaagattaataccgcatattatgatttttctgcatgggaaagtcatgaaaggagcaatccgctgtaagatgggcccgcggcgcattagctagttggtgaggtaagggctcaccaaggcgacgatgcgtagccgacctgagagggtgatcggccacattgggactgagacacggcccagactcctacgggaggcagcagtggggaatattgcacaatgggggaaaccctgatgcagcaacgccgcgtgagtgatgacggccttcgggttgtaaagctctgtcttcagggacgataatgacggtacctgaggaggaagccacggctaactacgtgccagcagccgcggtaatacgtaggtggcgagcgttatccggatttactgggcgtaaaggatgcgtaggtggaattttaagtgggatgtgaaatacccgggctcaacctgggaactgcattccaaactggaattctagagtgcaggagaggaaagcggaattcctagtgtagcggtgaaatgcgtagagattaggaagaacaccagtggcgaaggcggctttctggactgtaactgacactgaggcatgaaagcgtggggagcaaacaggattagataccctggtagtccacgccgtaaacgatgggtactaggtgtaggggtttcgatacctctgtgccgccgtaaacacaataagtaccccgcctggggagtacggtcgcaagattaaaactcaaaggaattgacgggggcccgcacaagtagcggagcatgtggtttaattcgaagcaacgcgaagaaccttacctagacttgacatgtcctgaattacctgtaataagggaagctctttcgggagcaggaacacaggtggtgcatggttgtcgtcagctcgtgtcgtgagatgttgggttaagtcccgcaacgagcgcaacccctatagttagttgctaacagtaagatgagcactctagctagactgccgtggttaacgcggaggaaggtggggatgacgtcaaatcatcatgccccttatgtctagggctacacacgtgctacaatggcgagaacaaagagaagcaagaccgcgaggtggagcaaaactcataaaactcgtcccagttcggattgcaggctgcaactcgcctgcatgaagccggagttactagtaatcgcgaatcagaatgtcgcggtgaatacgttcccgggccttgtacacaccgcccgtcacaccatgagagttggcaatacccaaagtccgtgaggtaaccgaaaggagccagcggcctaaggtagggtcagcgattggggtgaagtcgtaacaaggtaacc

SEQ ID NO: 563 - DNA, 1499 bp, Clostridium carboxidivorans
ttgatcctggctcaggacgaacgctggcggcgtgcttaacacatgcaagtcgagcgatgaaatcccttcggggatggattagcggcggacgggtgagtaacacgtgggcaacctgcctcaaagtgggggatagccttccgaaagggagattaataccgcataacattagtttttcacatgaaatactaattaaaggagtaatccgctttgagatgggcccgcggcgcattagctagttggtgaggtaacggctcaccaaggccacgatgcgtagccgacctgagagggtgatcggccacattggaactgagacacggtccagactcctacgggaggcagcagtggggaatattgcacaatgggcgaaagcctgatgcagcaacgccgcgtgagtgatgaaggccttcgggttgtaaagctctgtctttggggacgataatgacggtacccaaggaggaagccacggctaactacgtgccagcagccgcggtaatacgtaggtggcgagcgttgtccggatttactgggcgtaaaggatgcgtaggcggatgtttaagtcagatgtgaaaatcccgagcttaacttgggaactgcatttgaaactggatatctagagtgcgggagaggagaatggaattcctagtgtagcggtgaaatgcgtagagattaggaagaacaccagtggcgaaggcgattctctggaccgtaactgacgctgaggcatgaaagcgtgggtagcaaacaggattagataccctggtagtccacgccgtaaacgatgaatactaggtgtaggaggtatcgactccttctgtgccgcagctaacgcaataagtattccgcctgggaagtacgatcgcaagattaaaactcaaaggaattgacgggggcccgcacaagcagcggagcatgtggtttaattcgaagcaacgcgaagaaccttacctagacttgacatcccctgaattacctgtaatgagggaagcccttcggggcagggagacaggtggtgcatggttgtcgtcagctcgtgtcgtgagatgttaggttaagtcctgcaacgagcgcaacccttatcattagttgctaccattaagttgagcactctagtgagactgcccgggttaaccgggaggaaggtggggatgacgtcaaatcatcatgccccttatgtctagggctacacacgtgctacaatggtgagtacagaaagatgcaagaccgtgaggtggagcaaaacttttaaaactcatctcagttcggattgtaggctgaaactcgcctacatgaagctggagttgctagtaatcgcgaatcagcatgtcgcggtgaatacgttcccgggccttgtacacaccgcccgtcacaccatgagagctggcaacacccgaagtccgtgaggtaaccgtaaggagccagcggccgaaggtggggttagtaattggggtgaagtcgtaacaaggtagccgtaggagaacctgcggctggatcacctcctt

SEQ ID NO: 564 - DNA, 1458 bp, Clostridium carnis
  modified_base (1)..(3): a, c, t, g, unknown or other
  modified_base (92)..(92): a, c, t, g, unknown or other
  modified_base (96)..(97): a, c, t, g, unknown or other
  modified_base (606)..(607): a, c, t, g, unknown or other
  modified_base (837)..(837): a, c, t, g, unknown or other
  modified_base (930)..(944): a, c, t, g, unknown or other
  modified_base (1172)..(1172): a, c, t, g, unknown or other
  modified_base (1360)..(1360): a, c, t, g, unknown or other
nnntaggtgagagtttgatcctggctcaggacgaacgctggcggcgtgcctaacacatgcaagtcgagcgaggggagtttcttcggaaaccnaacnnagcggcggacgggtgagtaacacgtgggcaacctgccttgtagaggggaatagccttccgaaaggaagattaataccgcataatattgcagcttcgcatgaagcagtaattaaaggagcaatccgctacaagatgggcccgcggcgcattagctagttggtgaggtaacggctcaccaaggcgacgatgcgtagccgacctgagagggtgatcggccacattgggactgagacacggcccagactcctacgggaggcagcagtggggaatattgcacaatgggggaaaccctgatgcagcaacgccgcgtgagtgatgaaggttttcggatcgtaaagctctgtcttcggggacgataatgacggtacccgaggaggaagccacggctaactacgtgccagcagccgcggtaatacgtaggtggcaagcgttgtccggatttactgggcgtaaagggagcgtaggcggacttttaagtgagatgtgaaatacccgggctcaacctgggnnctgcatttcaaactggaagtctagagtgcaggagaggagagtggaattcctagtgtagcggtgaaatgcgtagagattaggaagaacaccagtggcgaaggcgactctctggactgtaactgacgctgaggctcgaaagcgtggggagcaaacaggattagataccctggtagtccacgccgtaaacgatgaatactaggtgtaggggttgtcatgacctctgtgccgcngctaacgcattaagtattccgcctggggagtacggtcgcaagattaaaactcaaaggaattgacgggggcccgcacaagcagcggagcatgtnnnnnnnnnnnnnnnaacgcgaagaaccttacctagacttgacatctcctgcattactcttaatcgaggaagtcctttcggggacaggatgacaggtggtgcatggttgtcgtcagctcgtgtcgtgagatgttgggttaagtcccgcaacgagcgcaacccttattgttagttgctaccatttagttgagcactctagcgagactgcccgggttaaccgggaggaaggtggggatgacgtcnaatcatcatgccccttatgtctagggctacacacgtgctacaatggcaagtacaaagagatgcaataccgcgaggtggagctaaactataaaacttgtctcagttcggattgtaggctgaaactcgcctacatgaagctggagttgctagtaatcgcgaatcagcatgtcgcggtgaatacgttcccnggccttgtacacaccgcccgtcacaccatgagagttggcaatacccaaagttcgtgagctaaccgcaaggaggcagcgacctaaggtagggtcagcga

SEQ ID NO: 565 - DNA, 1012 bp, Clostridium celatum
  modified_base (14)..(14): a, c, t, g, unknown or other
  modified_base (40)..(42): a, c, t, g, unknown or other
  modified_base (63)..(63): a, c, t, g, unknown or other
  modified_base (107)..(107): a, c, t, g, unknown or other
  modified_base (109)..(109): a, c, t, g, unknown or other
  modified_base (111)..(111): a, c, t, g, unknown or other
gggtgtaaagctcngtcttcagggacgataatgacggtannngaggaggaagccacggctaantacgtgccagcagccgcggtaatacgtaggtggcgagcgttgtncngnatttactgggcgtaaagggagcgtaggcggacttttaagtgagatgtgaaatacccgggctcaacttgggtgctgcatttcaaactggaagtctagagtgcaggagaggagaatggaattcctagtgtagcggtgaaatgcgtagagattaggaagaacaccagtggcgaaggcgattctctggactgtaactgacgctgaggctcgaaagcgtggggagcaaacaggattagataccctggtagtccacgccgtaaacgatgaatactaggtgtaggggttgtcatgacctctgtgccgccgctaacgcattaagtattccgcctggggagtacggtcgcaagattaaaactcaaaggaattgacgggggcccgcacaagcagcggagcatgtggtttaattcgaagcaacgcgaagaaccttacctagacttgacatctcctgaattacccgtaactggggaagtcgcttcggcgacaggaagacaggtggtgcatggttgtcgtcagctcgtgtcgtgagatgttgggttaagtcccgcaacgagcgcaacccctattgttagttgctaccattaagttgagcactctagcgagactgcccgggttaaccgggaggaaggtggggatgacgtcaaatcatcatgccccttatgtctagggctacacacgtgctacaatggcaagtacaaagagaagcaagaccgcgaggtggagcaaaactcaaaaacttgtctcagttcggattgtaggctgaaactcgcctacatgaagctggagttgctagtaatcgcgaatcagcatgtcgcggtgaatacgttcccgggccttgtacacaccgcccgtcacaccatgagagttggcaatacccaaagtgcgtgatctgactcgcaagagagga

SEQ ID NO: 566 - DNA, 1435 bp, Clostridium celerecrescens
catgcaagtcgagcgaagcgatttcaaggaagttttcggacggaattgaaattgactgagcggcggacgggtgagtaacgcgtgggtaacctgcctcatacagggggataacagttggaaacgactgctaataccgcataagcacacagtgccgcatggtacggtgtgaaaaactccggtggtatgagatggacccgcgtctgattaggtagttggtgaggtaacggcccaccaagccgacgatcagtagccgacctgagagggtgaccggccacattgggactgagacacggcccaaactcctacgggaggcagcagtggggaatattggacaatgggggaaaccctgatccagcgacgccgcgtgagtgaagaagtatttcggtatgtaaagctctatcagcagggaagaaaatgacggtacctgactaagaagccccggctaactacgtgccagcagccgcggtaatacgtagggggcaagcgttatccggatttactgggtgtaaagggagcgtagacggcactgcaagtctggagtgaaagcccggggctcaaccccgggactgctttggaaactgtggtgctggagtgcaggagaggtaagtggaattcctagtgtagcggtgaaatgcgtagatattaggaggaacaccagtggcgaaggcggcttactggactgtaactgacgttgaggctcgaaagcgtggggagcaaacaggattagataccctggtagtccacgccgtaaacgatgaatactaggtgttggggagcaaagctcttcggtgccgccgctaacgcaataagtattccacctggggagtacgttcgcaagaatgaaactcaaaggaatttgacggggacccgcacaagcggtggagcatgtggtttaattcgaagcaacgcgaagaaccttaccaagtcttgacatcggaatgaccgggatgtaacgatcccttccctacggggcattccagacaggtggtgcatggttgtcgtcagctcgtgtcgtgagatgttgggttaagtcccgcaacgagcgcaacccttatccttagtagccagcaagttaagttgggcactctggggagactgccagggataacctggaggaaggtggggatgacgtcaaatcatcatgccccttatgatttgggctacacacgtgctacaatggcgtaaacaaagggaagcaaaggagcgatctggagcaaaccccaaaaataacgtctcagttcggattgtagtctgcaactcgactacatgaagctggaatcgctagtaatcgcggatcagaatgccgcggtgaatacgttcccgggtcttgtacacaccgcccgtcacaccatgggagttggtaacgcccgaagtcagtgacccaaccgtaaggagggagctgccgaaggcgggactgataactggggtgaagtcg

SEQ ID NO: 567 - DNA, 1500 bp, Clostridium cellulosi
  modified_base (1380)..(1381): a, c, t, g, unknown or other
tttgatcctggctcaggacgaacgctggcggcgtgcctaacacatgcaagtcgagcggagatagtacttcggttctatcttagcggcggacgggtgagtaacgcgtgagcaacctgccctgagcacggggatagcgtctggaaacggacggtaataccgcataatgtacgttggaggcatctccgatgtaccaaaggaggaatccactcaaggatgggctcgcgtccgattaggtagttggtgaggtaacggcccaccaagcctgcgatcggtagccggactgagaggttgtacggccacattgggactgagacacggcccagactcctacgggaggcagcagtggggaatattgcacaatggaggaaactctgatgcagcgacgccgcgtgagggaagaaggtcttcggattgtaaacctctgtctttcgggacgaaggaagtgacggtaccgaaagaggaagccacggctaactacgtgccagcagccgcggtaatacgtaggtggcgagcgttgtccggaattactgggtgtaaagggtgcgtaggcgggttgtcaagttggatgtgaaatctctgggcttaactcagaggttgcattcaaaactggcgatcttgagtgaggtagaggcaggcggaattcccggtgtagcggtgaaatgcgtagatatcgggaggaacaccagtggcgaaggcggcctgctgggccttaactgacgctgaggcgcgaaagcgtggggagcaaacaggattagataccctggtagtccatgctgtaaacgatgattgctaggtgtgggtggactgaccccatccgtgccggagttaacacaataagcatcccacctggggagtacggccgcaaggctgaaactcaaaggaattgacgggggcccgcacaagcagtggagtatgtggtttaattcgaagcaacgcgaagaaccttaccaggtcttgacatccaccgaatccggaagagattctggagtgcccttcggggagcggtgagacaggtggtgcatggttgtcgtcagctcgtgtcgtgagatgttgggttaagtcccgcaacgagcgcaacccttgttaatagttgctacgcaagagcactctattaagactgccgttgataaaacggaggaaggtggggatgacgtcaaatcatcatgccccttatgacctgggctacacacgtactacaatggccgccaacaaagggaagcaataccgcgaggtggagcgaatccccaaaagcggtcccagttcagattgcaggctgcaacccgcctgcatgaagacggaattgctagtaatcgcggatcagcatgccgcggtgaatacgttcccgggccttgtacacaccgcccgtcacaccatgagagnnggcaacacccgaagtcgtttgcgtaaccgaaaggagcgcggcgccgaaggtgggatcggtgattggggtgaagtcgtaacaaggtagccgtatcggaaggtgcggctggatcacctcct

SEQ ID NO: 568 - DNA, 1283 bp, Clostridium chauvoei
tgggcaacctgccttgtagaggggaatagccttccgaaaggaagattaataccgcataatattgcagcttcgcatggagcagtaattaaaggagcaatccgctacaagatgggcccgcggcgcattagctagttggtgaggtaacggctcaccaaggcgacgatgcgtagccgacctgagagggtgatcggccacattgggactgagacacggcccagactcctacgggaggcagcagtggggaatattgcacaatgggggaaaccctgatgcagcaacgccgcgtgagtgatgaaggttttcggatcgtaaagctctgtcttcagggacgataatgacggtacctgaggaggaagccacggctaactacgtgccagcagccgcggtaatacgtaggtggcgagcgttgtccggattttttgggcgtaaagggagcgtaggcggacttgtaagtgagatgtgaaatacccgggctcaacttgggtgctgcatttcaaactggaagtctagagtgcaggagaggagagtggaattcctagtgtagcggtgaaatgcgtagagattaggaagaacaccagtggcgaaggcgactctctggactgtaactgacgctgaggctcgaaagcgtggggagcaaacaggattagataccctggtagtccacgccgtaaacgatggatactaggtgtgggaggtatcaactccttccgtgccgccgttaacacattaagtatcccgcctggggagtacggtcgcaagattaaaactcaaaggaattgacgctagcccgcacaagcagcggagcatgtggtttaattcgaagcaacgcgaagaaccttacctagacttgacatctcctgcattactcttaatcgaggaagtctcttcggagacaggatgacaggtggtgcatggttgtcgtcagctcgtgtcgtgagatgttgggttaagtcccgcaacgagcgcaacccttattgttagttgctaccatttagttgagcactctagcgagactgcccgggttaaccgggaggaaggtggtagtgacgtcaaatcatcatgccccttatgtctagggctacacacgtgctagaatggcaagtacaacgagatgcaataccgcgaggtggagctaaactataaaacttgtctcagttcggattgtaggctgaaactcgcctacatgaagctggagttgctagtaatcgcgaatcagcatgtcgcggtgaatacgttcccgagccttgtacacaccgcccgtcacaccatgagagttggcaata

SEQ ID NO: 569 - DNA, 1383 bp, Clostridium citroniae
  modified_base (12)..(14): a, c, t, g, unknown or other
acgaagcaattnnnaatgaagttttcggatggatttctgattgactgagtggcggacgggtgagtaacgcgtggataacctgcctcacactgggggataacagttagaaatggctgctaataccgcataagcgcacagtaccgcatggtacggtgtgaaaaactccggtggtgtgagatggatccgcgtctgattagttagttggcggggtaacggcccaccaagacagcgatcagtagccgacctgagagggtgaccggccacattgggactgagacacggcccaaactcctacgggaggcagcagtggggaatattgcacaatgggcgaaagcctgatgcagcgacgccgcgtgagtgaagaagtatttcggtatgtaaagctctatcagcagggaagaaaatgacggtacctgactaagaagccccggctaactacgtgccagcagccgcggtaatacgtagggggcaagcgttatccggatttactgggtgtaaagggagcgtagacggcgaagcaagtctggagtgaaaacccagggctcaaccctgggactgctttggaaactgttttgctagagtgtcggagaggtaagtggaattcctagtgtagcggtgaaatgcgtagatattaggaggaacaccagtggcgaaggcggcttactggacgataactgacgttgaggctcgaaagcgtggggagcaaacaggattagataccctggtagtccacgccgtaaacgatgaatgctaggtgttggggggcaaagcccttcggtgccgtcgcaaacgcaataagcattccacctggggagtacgttcgcaagaatgaaactcaaaggaattgacggggacccgcacaagcggtggagcatgtggtttaattcgaagcaacgcgaagaaccttaccaagtcttgacatccccctgaccggtcggtaaagcggcctttccttcgggacaggggagacaggtggtgcatggttgtcgtcagctcgtgtcgtgagatgttgggttaagtcccgcaacgagcgcaacccttatccttagtagccagcaggtaaagctgggcactctagggagactgccagggataacctggaggaaggtggggatgacgtcaaatcatcatgccccttatgatttgggctacacacgtgctacaatggcgtaaacaaagggaagcgaccctgcgaaggcaagcaaatcccaaaaataacgtcccagttcggactgtagtctgcaacccgactacacgaagctggaatcgctagtaatcgcgaatcagaatgtcgcggtgaatacgttcccgggtcttgtacacaccgcccgtcacaccatgggagtcagcaacgcccgaagtcagtgacccaaccgaaaggag

SEQ ID NO: 570 - DNA, 1560 bp, Clostridium clariflavum
gacgaacgctggcggcgtgcctaacacatgcaagtcgagcggtcctgcattcaacattgagtattcagctgacgttggagattgagccggcgtcaagcagaaacaaccatatactatgatatgtttaaagtttctgcttcacgctgaataaagtgccaacacaaaaaggagctgagtattgaatgttgaatgcaggatagcggcggacgggtgagtaacgcgtgggtaatctgcctcacacagggggataacactgggaaactagtgctaataccgcataacataacgaggtggcatcactttgttatcaaaggagcaatccggtgtgagatgagcccgcgtccgattagctagttggtgaggtaacggctcaccaaggcgacgatcggtagccgaactgagaggttgatcggccacattgggactgagacacggcccagactcctacgggaggcagcagtggggaatattgcgcaatgggggaaaccctgacgcagcaacgccgcgtgaaggaagaaggtcttcggattgtaaacttctttggttggggacgataatgacggtacccaaggaacaagccacggctaactacgtgccagcagccgcggtaatacgtaggtggcgagcgttgtccggaattactggatgtaaagggcgcgtaggcggggatgcaagtcagatgtgaaattccggggctcaaccccggcgctgcatctgaaactgtatttcttgagtgttggagaggaaagcggaattcctagtgtagcggtgaaatgcgtagagattaggaggaacaccagtggcgaaggcggctttctggacagtaactgacgctgaggcgcgaaagcgtggggagcaaacaggattagataccctggtagtccacgccgtaaacgatggatactaggtgtaggaggtatcgaccccttctgtgccggagttaacacaataagtatcccacctggggagtacggccgcaaggttgaaactcaaaggaattgacgggggcccgcacaagcagtggagtatgtggtttaattcgaagcaacgcgaagaaccttaccagggcttgacatccctctgacagctctagagatagggcttctcttcggagcagaggagacaggtggtgcatggttgtcgtcagctcgtgtcgtgagatgttgggttaagtcccgcaacgagcgcaacccttgttgttagttgccatcattaagttgggcactctaacgagactgccggtgataaatcggaggaaggtggggacgacgtcaaatcatcatgccccttatgtcctgggctacacacgtactacaatggctgctacaaagggaagcgagaccgcgaggtggagcaaatccccaaaagcagtcccagttcagattgcaggctgaaactcgcctgcatgaagtcggaattgctagtaatggcaggtcagcatactgccgtgaatacgttcccgggccttgtacacaccgcccgtcacaccatgagagtctgcaacacccgaagtcagtagtctaaccgagaggagggcgctgccgaaggtggggcagatga

SEQ ID NO: 571 - DNA, 1475 bp, Clostridium clostridiiformes
  modified_base (534)..(534): a, c, t, g, unknown or other
  modified_base (917)..(917): a, c, t, g, unknown or other
  modified_base (954)..(954): a, c, t, g, unknown or other
  modified_base (1010)..(1010): a, c, t, g, unknown or other
  modified_base (1453)..(1453): a, c, t, g, unknown or other
  modified_base (1471)..(1471): a, c, t, g, unknown or other
aacatgagagtttgatcctggctcaggatcaacgctggcggcgtgcctaacacatgcaagtcgaacgaagcaattaagatgaagttttcggatggaatcttgattgactgagtggcggacgggtgagtaacgcgtggataacctgcctcacactgggggataacagttagaaatgactgctaataccgcataagcgcacagtgccgcatggcagtgtgtgaaaaactccggtagtgtgagatggatccgcgtctgattagccagttggcggggtaacggcccaccaaagcgacgatcagtagccgacctgagagggtgaccggccacattgggactgagacacggcccaaactcctacgggaggcagcagtggggaatattgcacaatgggcgaaagcctgatgcagcgacgccgcgtgagtgaagaagtatttcggtatgtaaagctctatcagcagggaagaaaatgacggtacctgactaagaagccccggctaactacgtgccagcagccgcggtaatacgtagggggcnagcgttatccggatttactgggtgtaaagggagcgtagacggcgaagcaagtctgaagtgaaaacccagggctcaaccctggcactgctttggaaactgttttgctagagtgtcggagaggtaagtggaattcctagtgtagcggtgaaatgcgtagatattaggaggaacaccagtggcgaaggcggcttactggacgataactgacgttgaggctcgaaagcgtggggagcaaacaggattagataccctggtagtccacgccgtaaacgatgaatgctaggtgttggggggcaaagccttcggtgccgccgcaaacgcagtaagcattccacctggggagtacgttcgcaagaatgaaactcaaaggaattgacgggganccgcacaagcggtggagcatgtggtttaattcgaagnaacgcgaagaaccttaccaagtcttgacatccccctgacggccggtaacgcggccnttcttcgggacaggggagacaggtggtgcatggttgtcgtcagctcgtgtcgtgagatgttgggttaagtcccgcaacgagcgcaacccttatccttagtagccagcaggtaaagctgggcactctagggagactgccagggataacctggaggaaggtggggatgacgtcaaatcatcatgccccttatgatttgggctacacacgtgctacaatggcgtaaacaaagggaagcgagacagtgatgtggagcaaatcccaaaaataacgtcccagttcggactgtagtctgcaacccgactacacgaagctggaatcgctagtaatcgcgaatcagaatgtcgcggtgaatacgttcccgggtcttgtacacaccgcccgtcacaccatgggagtcagcaacgcccgaagtcagtgacccaaccgaaaggagggagctgccnaaggcggggcaggtaacngggg

SEQ ID NO: 572 - DNA, 1370 bp, Clostridium clostridioforme
attaagatgaagttttcggatggaatcttgattgactgagtggcggacgggtgagtaacgcgtggataacctgcctcacactgggggataacagttagaaatgactgctaataccgcataagcgcacagtgccgcatggcagtgtgtgaaaaactccggtggtgtgagatggatccgcgtctgattagccagttggcggggtaacggcccaccaaagcgacgatcagtagccgacctgagagggtgaccggccacattgggactgagacacggcccaaactcctacgggaggcagcagtggggaatattgcacaatgggcgaaagcctgatgcagcgacgccgcgtgagtgaagaagtatttcggtatgtaaagctctatcagcagggaagaaaagacggtacctgctaagaagccccggctaactacgtgccagcagccgcggtaatacgtagggggcaagcgttatccggatttactgggtgtaaagggagcgtagacggcgaagcaagtctgaagtgaaaacccagggctcaaccctgggactgctttggaaactgttttgctagagtgtcggagaggtaagtggaattcctagtgtagcggtgaaatgcgtagatattaggaggaacaccagtggcgaaggcggcttactggacgataactgacgttgaggctcgaaagcgtggggagcaaacaggattagataccctggtagtccacgccgtaaacgatgaatgctaggtgttggggggcaaagcccttcggtgccgccgcaaacgcagtaagcattccacctggggagtacgttcgcaagaatgaaactcaaaggaattgacggggacccgcacaagcggtggagcatgtggtttaattcgaagcaacgcgaagaaccttaccaagtcttgacatccccctgacgggccggtaacgcgggcgtttcattgggtagaggtagacaggtggagcatgggcgtcgtcagctcgtgtcgtgagatgttgggttaagtcccgcaacgagcgcaacccttatccttagtagccagcacgtgaaggtgggcactctagggagactgccagggataacctggaggaaggtggggatgacgtcaaatcatcatgccccttatgatttgggctacacacgtgctacaatggcgtaaacaaagggaagcgagacagtgatgtggagcaaatcccaaaaataacgtcccagttcggactgtagtctgcaacccgactacacgaagctggaatcgctagtaatcgcgaatcagaatgtcgcggtgaatacgttcccgggtcttgtacacaccgcccgtcacaccatgggagtcagcaacgcccgaagtcagtgacccaaccgaaagg

SEQ ID NO: 573 - DNA, 1521 bp, Clostridium coccoides
tttgagtttgatcctggctcaggatgaacgctggcggcgtgcttaacacatgcaagtcgagcgaagcgctaagacagatttcttcggattgaagtctttgtgactgagcggcggacgggtgagtaacgcgtgggtaacctgcctcatacagggggataacagttagaaatgactgctaataccgcataagcgcacaggaccgcatggtctggtgtgaaaaactccggtggtatgagatggacccgcgtctgattagctagttggaggggtaacggcccaccaaggcgacgatcagtagccggcctgagagggtgaacggccacattgggactgagacacggcccagactcctacgggaggcagcagtggggaatattgcacaatgggggaaaccctgatgcagcgacgccgcgtgaaggaagaagtatctcggtatgtaaacttctatcagcagggaagaaaatgacggtacctgactaagaagccccggctaactacgtgccagcagccgcggtaatacgtagggggcaagcgttatccggatttactgggtgtaaagggagcgtagacggaagagcaagtctgatgtgaaaggctggggcttaaccccaggactgcattggaaactgttgttctagagtgccggagaggtaagcggaattcctagtgtagcggtgaaatgcgtagatattaggaggaacaccagtggcgaaggcggcttactggacggtaactgacgttgaggctcgaaagcgtggggagcaaacaggattagataccctggtagtccacgccgtaaacgatgaatactaggtgtcgggtggcaaagccattcggtgccgcagcaaacgcaataagtattccacctggggagtacgttcgcaagaatgaaactcaaaggaattgacggggacccgcacaagcggtggagcatgtggtttaattcgaagcaacgcgaagaaccttaccaagtcttgacatccctctgaccgtcccgtaacgggggcttcccttcggggcagaggagacaggtggtgcatggttgtcgtcagctcgtgtcgtgagatgttgggttaagtcccgcaacgagcgcaacccttatccttagtagccagcacatgatggtgggcactctagggagactgccggggataacccggaggaaggcggggacgacgtcaaatcatcatgccccttatgatttgggctacacacgtgctacaatggcgtaaacaaagggaagcgagacagcgatgttgagcgaatcccaaaaataacgtcccagttcggactgcagtctgcaactcgactgcacgaagctggaatcgctagtaatcgcggatcagaatgccgcggtgaatacgttcccgggtcttgtacacaccgcccgtcacaccatgggagtcagtaacgcccgaagtcagtgacctaaccgaaaggaaggagctgccgaaggcgggaccgataactggggtgaagtcgtaacaaggtagccgtatcggaaggtgcggctggatcccc

SEQ ID NO: 574 - DNA, 1462 bp, Clostridium cochlearium
  modified_base (1)..(2): a, c, t, g, unknown or other
  modified_base (289)..(289): a, c, t, g, unknown or other
  modified_base (523)..(523): a, c, t, g, unknown or other
  modified_base (930)..(943): a, c, t, g, unknown or other
  modified_base (967)..(967): a, c, t, g, unknown or other
  modified_base (1136)..(1136): a, c, t, g, unknown or other
  modified_base (1213)..(1213): a, c, t, g, unknown or other
  modified_base (1363)..(1363): a, c, t, g, unknown or other
  modified_base (1383)..(1383): a, c, t, g, unknown or other
  modified_base (1458)..(1458): a, c, t, g, unknown or other
nnttaaattgagagtttgatcctggctcaggacgaacgctggcggcgtgcttaacacatgcaagtcgagcgatgaagcttccttcgggaagtggattagcggcggacgggtgagtaacacgtgggcaacctgcctcaaagaggggaatagccctccgaaaggaggattaataccgcataaagttagagtttcgcatgaaactttaaccaaaggagtaatctgctttgagatgggcccgcgtcccattagctagttggtaaggtaatggcttaccaaggcaacgatgggnagccgacctgagagggtgatcggccacattggaactgagacacggtccagactcctacgggaggcagcagtggggaatattgcgcaatgggggaaaccctgacgcagcaacgccgcgtgggtgatgaaggttttcggatcgtaaaaccctgttttctgggacgataatgacggtaccagatgaggaagccacggctaactacgtgccagcagccgcggtaatacgtaggtggcnagcgttgtccggatttactgggcgtaaagggtgcgtaggcggatgcttaagtgagatgtgaaatacctaggcttaacttaggggctgcatttcaaactgggcatctagagtacaggagagggaaacggaattcctagtgtagcggtgaaatgcgtagagattaggaagaacaccagtggcgaaggcggtttcctggactgtaactgacgctgaggcacgaaagcgtgggtagcaaacaggattagataccctggtagtccacgccgtaaacgatgaatactaggtgtaggagggtccaaccttctgtgccgcagttaacacattaagtattccgcctggggagtacggtcgcaagactaaaactcaaaggaattgacgggggcccgcacaagcagcggagcatgtgnnnnnnnnnnnnnnaacgcgaagaaccttacctggacntgacatcccctgaattactcgtaactgaggaaatctcttcggagacagggagacaggtggtgcatggttgtcgtcagctcgtgtcgtgagatgttgggttaagtcccgcaacgagcgcaacccttattattagttgctaccattaagttgagcactctaatgagactgnccgggtgaaccgggaggaaggtggggatgacgtcaaatcatcatgccccttatgtccagggctacacacgtgctacnatggtgggtacagagagaagcgataccgcgaggtggagcaaatctcaaaaacccatcccagttcggattgcaggctgaaactcgcctgcatgaagccggagttgctagtaatcgcaaatcagaatgttgcggtgaatacgttcccgggcnttgtacacaccgcccgtcanaccatgagagttggcaacacccgaagtccgtgaggtaaccgtaaggagccagcggccgaaggtggggttaatgantggg

SEQ ID NO: 575 - DNA, 1489 bp, Clostridium cocleatum
ctcaggatgaacgctggcggcgtgcctaatacatgcaagtcgaacgcgggcacttgtgcccgagtggcgaacgggtgagtaatacataagtaacctggcctttacagggggataactgctggaaacggtagctaagaccgcataggtagggacactgcatggtgaccgtattaaaagtgctgcaaggcactggtagaggatggacttatggcgcattagctggttggtgaggtaacggctcaccaaggcgacgatgcgtagccgacctgagagggtgaccggccacactgggactgagacacggcccagactcctacgggaggcagcagtagggaattttcggcaatggggggaaccctgaccgagcaacgccgcgtgaaggaagaaggaattcgttctgtaaacttctgttataaaggaagaaaggcggatggaggaaatgacatccgagtgacggtactttatgagaaagccacggctaactacgtgccagcagccgcggtaatacgtaggtggcaagcgttatccggaattattgggcgtaaagagggagcaggcggcagcaaaggtctgtggtgaaagactgaagcttaacttcagtaagccatagaaaccaggcagctagagtgcaggagaggatcgtggaattccatgtgtagcggtgaaatgcgtagatatatggaggaacaccagtggcgaaggcgacgatctggcctgtaactgacgctcagtcccgaaagcgtggggagcaaataggattagataccctagtagtccacgccgtaaacgatgagtactaagtgttggaagtcaaatttcagtgctgcagttaacgcagtaagtactccgcctgagtagtagcttcgcaagaatgaaactcaaaggaattgacgggggcccgcacaagcggtggagcatgtggtttaattcgaagcaacgcgaagaaccttaccaggtcttgacatactcataaaggatccagagatggatagatagttatatgagatacaggtggtgcatggttgtcgtcagctcgtgtcgtgagatgttgggttaagtcccgcaacgagcgcaacccttatcgttagttaccatcattaagttggggactctagcgagactgccagtgacaagctggaggaaggcggggatgacgtcaaatcatcatgccccttatgacctgggctacacacgtgctacaatggatggtgcagagggaagcgaagccgcgaggcgaagcaaaacccataaaaccattctcagttcggattgtagtctgcaactcgactacatgaagttggaatcgctagtaatcgcgaatcagcatgtcgcggtgaatacgttctcgggccttgtacacaccgcccgtcacaccatgagagttgataacacccgaagccggtggcctaaccgaaaggaaggagctgtctaaggtgggattgatgattggggtgaagtcgtaacaaggtatccctacgggaacgtgggg

SEQ ID NO: 576 - DNA, 1451 bp, Clostridium colicanis
  modified_base (729)..(729): a, c, t, g, unknown or other
  modified_base (873)..(873): a, c, t, g, unknown or other
agtcgagcgatgaaattttcttcggaaatggattagcggcggacgggtgagtaacacgtgggtaacctgccctatagagagggatagccttccgaaagggagattaatacctcataatatcctagtatcgcatgatacatggattaaaggagcaatccgctataggatggacccgcggcgcattagctagttggtgaggtaacggctcaccaaggcgacgatgcgtagccgacctgagagggtgatcggccacattgggactgagacacggcccagactcctacgggaggcagcagtggggaatattgcacaatgggggaaaccctgatgcagcaacgccgcgtgagtgatgacggtcttcggattgtaaagctctgtctttagggacgataatgacggtacctaaggaggaagccacggctaactacgtgccagcagccgcggtaatacgtaggtggcaagcgttgtccggatttactgggcgtaaagggagcgtaggcggatctttaagtgggatgtgaaatactcgggctcaacctgggggctgcattccaaactggggatctagagtacaggaggggagagtggaattcctagtgtagcggtgaaatgcgtagagattaggaagaacaccagtggcgaaggcgactctctggactgtaactgacgctgaggctcgaaagcgtggggagcaaacaggattagataccctggtagtccacgccgtanacgatgaatactaggtgtagggggtgtcaactccccctgtgccgccgctaacgcattaagtattccgcctggggagtacggtcgcaagattaaaactcaaaggaattgacgggggcccgcacaagtagcggagcatgtggtttnattcgacgcacgcgaagaacttacctagacttgacatcttctgcattacccttaatcggggaagttccttcggggacagaatgacaggtggtgcatggttgtcgtcagctcgtgtcgtgagatgttgggttaagtcccgcaacgagcgcaacccttattgttagttgctaccatttagttgagcactctagcgagactgcccgggttaaccgggaggaaggtggggatgacgtcaaatcatcatgccccttatgtctagggctacacacgtgctacaatggccggtacagaaagacgcgataccgcgaggtggagcaaaactttaaaaccggtctcagttcggattgtaggctgaaactcgcctacatgaagctggagttactagtaatcgcgaatcagcatgtcgcggtgaatacgttcccgggccttgtacacaccgcccgtcacaccatgagagttggcaatacccaaagttcgtgagctaaccgcaaggaggcagcgacctaaggtagggtcagcgattggggtgaagtcgtaacaaggtagccgtaggagaacctgcggctggatcacctcct

SEQ ID NO: 577 - DNA, 1473 bp, Clostridium colinum
cggcgtgcctaacacatgcaagtcgagcggagttttatgggagcttgcttttataaaacttagcggcggacgggtgagtaacgcgtgggtaacctgccctatacacagggataacattgagaaattgatgctaatacctgataagccaacagtaggcatctacaagttggaaaaactgaggtggtataggaggggcccgcgtctgattagctagttggtggggtaaaggcctaccaaggcgacgatcagtagccgacctgagagggtgatcggccacattggaactgagacacggtccaaactcctacgggaggcagcagtggggaatattgcacaatggggggaaccctgatgcagcaacgccgcgtgaaggaagaagtatttcggtatgtaaacttctatcgacagggaagaaataaatgacggtacctgaataagaagcaccggctaaatacgtgccagcagccgcggtaatacgtatggtgcaagcgttatccggatttactgggtgtaaagggtgagtaggcggttatgcaagtcatatgtgaaattctggggctcaacctcagggctgcataagaaactgtgtaactagagtacaggagaggtaagcggaattcctagtgtagcggtgaaatgcgtagatattaggaagaacaccggtggcgaaggcggcttactggactgaaactgacgctgagtcacgaaagcgtggggagcgaacaggattagataccctggtagtccacgccgtaaacgatgagtgctaggtgttgggaagagattctcggtgccgcagcaaacgcaataagcactccacctggggagtacgaccgcaaggttgaaactcaaaggaattgacggggaccgcacaagcggtggagcatgtggtttaattcgaagcaacgcgaagaaccttacctaaacttgacatcccgatgacaatctgtgtaatgcagactttcttcggaacatcggtgacaggtggtgcatggttgtcgtcagctcgtgtcgtgagatgttgggttaagtcccgcaacgagcgcaacccctattcttagtagccagcawttcggatgggcactctagggagactgccgtggataacacggaggaaggtggggatgacgtcaaatcatcatgccccttatgtttagggctacacacgtgctacaatggctgtaacaaagtgaagcaagatagtgatatggagcaaagcacaaaaaagcagtcccagttcggattgtagtctgcaactcgactacatgaagttggaatcgctagtaatcgcgaatcagaatgtcgcggtgaatacgttcccgggtcttgtacacaccgcccgtcacaccatgggagttggaagcgcccgaagcctgtgacctaaccgcaaggaggagcagtcgaaggtgaagccagtgactggggtgaagtcgtaacaaggtagccgtatcggaaggtgcgctgatcacctcc

SEQ ID NO: 578 - DNA, 1365 bp, Clostridium difficile
  modified_base (1347)..(1347): a, c, t, g, unknown or other
  modified_base (1352)..(1353): a, c, t, g, unknown or other
ttgagcgatttacttcggtaaagagcggcggacgggtgagtaacgcgtgggtaacctaccctgtacacacggataacataccgaaaggtatgctaatacgggataatatatttgagaggcatctcttgaatatcaaaggtgagccagtacaggatggacccgcgtctgattagctagttggtaaggtaacggcttaccaaggcgacgatcagtagccgacctgagagggtgatcggccacattggaactgagacacggtccaaactcctacgggaggcagcagtggggaatattgcacaatgggcgaaagcctgatgcagcaacgccgcgtgagtgatgaaggccttcgggtcgtaaaactctgtcctcaaggaagataatgacggtacttgaggaggaagccccggctaactacgtgccagcagccgcggtaatacgtagggggctagcgttatccggatttactgggcgtaaagggtgcgtaggcggtctttcaagtcaggagtgaaaggctacggctcaaccgtagtaagctcttgaaactgggagacttgagtgcaggagaggagagtggaattcctagtgtagcggtgaaatgcgtagatattaggaggaacaccagttgcgaaggcggctctctggactgtaactgacgctgaggcacgaaagcgtggggagcaaacaggattagataccctggtagtccacgctgtaaacgatgagtactaggtgtcgggggttacccccttcggtgccgcagctaacgcattaagtactccgcctgggaagtacgctcgcaagagtgaaactcaaaggaattgacggggacccgcacaagtagcggagcatgtggtttaattcgaagcaacgcgaagaaccttacctaagcttgacatcccaatgacatctccttaatcggaaagttcccttcggggagattggggacagaggggaattgcttgtgtagcgctggtatggggagatattgggataagtcccgcaacgagcgcaacccttgtctttagttgccatcattaagttgggcactctagagagactgccagggataacctggaggaaggtggggatgacgtcaaatcatcatgccccttatgcttagggctacacacgtgctacaatgggtagtacagagggttgccaagccgtaaggtggagctaatcccttaaagctactctcagttcggattgtaggctgaaactcgcctacatgaagctggagttactagtaatcgcagatcagaatgctgcggtgaatgcgttcccgggtcttgtacacaccgcccgtcacaccacgggagttggagacgcccgaagccgattatctanccttnngaagaagtcgtc

SEQ ID NO: 579 - DNA, 1379 bp, Clostridium disporicum
  modified_base (14)..(14): a, c, t, g, unknown or other
  modified_base (28)..(29): a, c, t, g, unknown or other
tcgagcgagtggangttcttcggaacannagctagcggcggacgggtgagtaacacgtgggcaacctgcctcatagaggggaatagcctcccgaaagggagattaataccgcataagattgtagcttcgcatgaagtagcaattaaaggagcaatccgctatgagatgggcccgcggcgcattagctagttggtgaggtaacggctcaccaaggcgacgatgcgtagccgacctgagagggtgatcggccacattgggactgagacacggcccagactcctacgggaggcagcagtggggaatattgcacaatgggggaaaccctgatgcagcaatgccgcgtgagtgatgacggccttcgggttgtaaagctctgtcttcggggacgataatgacggtacccgaggaggaagccacggctaactacgtgccagcagccgcggtaatacgtaggtggcaagcgttgtccggatttactgggcgtaaagggagcgtaggcggatttttaagtgagatgtgaaatacccgggcttaacttgggtgctgcatttcaaactggaagtctagagtgcaggagaggagaagggaattcctagtgtagcggtgaaatgcgtagagattaggaagaacaccagtggcgaaggcgcttctctggactgtaactgacgctgaggctcgaaagcgtggggagcaaacaggattagataccctggtagtccacgccgtaaacgatgaatactaggtgtaggggttgtcatgacctctgtgccgccgctaacgcattaagtattccgcctggggagtacggtcgcaagattaaaactcaaaggaattgacgggggcccgcacaagcagcggagcatgtggtttaattcgaagcaacgcgaagaaccttacctagacttgacatctcctgaattacccgtaactggggaagtcgcttcggcgacaggaagacagtaggtgcatggaagtcgtcagctcgtgtcgtgagatgttgggttaagtcccgcaacgagcgcaacccttattgttagttgctaccatttagttgagcactctagcgagactgcccgggttaaccgggaggaaggtggggatgacgtcaaatcatcatgccccttatgtctagggctacacacgtgctacaatggcaagtacaaagagaagcaagaccgcgaggtggagcaaaactcaaaaacttgtctcagttcggattgtaggctgaaactcgcctacatgaagctggagttgctagtaatcgcgaatcagcatgtcgcggtgaatacgttcccgggccttgtacacaccgcccgtcacaccatgagagttggcaatacccaaagtgcgtgatctaactcgcaagagaggaagcgccc

SEQ ID NO: 580 - DNA, 1473 bp, Clostridium estertheticum
cctggctcaggacgaacgctggcggcgtgcctaacacatgcaagtcgagcgatgcgatccttcggggtcaattagcggcggacgggtgagtaacacgtgggtaacctgcctcaaagaggggaatagcctcccgaaagggagattaataccgcataatatgttttgatcgcatgatcttaacatcaaaggaatttttcggaatttcactttgagatggacccgcggcgcattagctagttggtgaggtaaaggcccaccaaggcaacgatgcgtagccgacctgagagggtgatcggccacattggaactgagacacggtccagactcctacgggaggcagcagtggggaatattgcgcaatgggggaaaccctgacgcagcaacgccgcgtgaatgatgaaggccttcgggttgtaaagttctgtcttctgggacgataatgacggtaccagaggaggaagccacggctaactacgtgccagcagccgcggtaatacgtaggtggcaagcgttgtccggatttactgggcgtaaaggatgcgtaggcggacatttaagtcagatgtgaaatacccgagcttaacttgggtgctgcatttgaaactgggtgtctagagtgcaggagaggtaagtggaattcctagtgtagcggtgaaatgcgtagagattaggaagaacaccagtggcgaaggcgacttactggactgtaactgacgctgaggcatgaaagcgtggggagcaaacaggattagataccctggtagtccacgccgtaaacgatgaatactaggtgtcgggggtcgaacctcggtgccgccgttaacacattaagtattccgcctggggagtacgatcgcaagattaaaactcaaaggaattgacgggggcccgcacaagcagcggagcatgtggtttaattcgaagcaacgcgaagaaccttacctagacttgacatcccttgcataactcagagatgagtgaagtccttcgggacaaggtgacaggtggtgcatggttgtcgtcagctcgtgtcgtgagatgttgggttaagtcccgcaacgagcgcaacccttatcattagttgctaccattaagttgagcactctagtgagactgcccgggttaaccgggaggaaggtggggatgacgtcaaatcatcatgccccttatgtctagggctacacacgtgctacaatggtgagtacaaagagatgcaagaccgcaaggtggagccaaactcaaaaactcatcccagttcggattgtaggctgcaactcgcctacatgaagccggagttgctagtaatcgcgaatcagcatgtcgcggtgaatacgttcccgggccttgtacacaccgcccgtcacaccatgagagttggtaacacccgaagtccgtgaggtaaccgtaaggagccagcggccgaaggtgggatcgatgattggggtgaagtcgtaacaaggtagccgtaggaga

SEQ ID NO: 581 - DNA, 1465 bp, Clostridium fallax
  modified_base (1)..(3): a, c, t, g, unknown or other
  modified_base (164)..(164): a, c, t, g, unknown or other
  modified_base (238)..(238): a, c, t, g, unknown or other
  modified_base (337)..(338): a, c, t, g, unknown or other
  modified_base (421)..(421): a, c, t, g, unknown or other
  modified_base (523)..(523): a, c, t, g, unknown or other
  modified_base (858)..(858): a, c, t, g, unknown or other
  modified_base (935)..(935): a, c, t, g, unknown or other
  modified_base (939)..(945): a, c, t, g, unknown or other
  modified_base (1151)..(1151): a, c, t, g, unknown or other
  modified_base (1171)..(1172): a, c, t, g, unknown or other
  modified_base (1360)..(1360): a, c, t, g, unknown or other
  modified_base (1461)..(1462): a, c, t, g, unknown or other
nnntaaattgagagtttgatcctggctcaggacgaacgctggcggcgtgcttaacacatgcaagtcgagcgagagagttttcttcggaaaactatctagcggcggacgggtgagtaacacgtgggtaacctgcctcatagagggggatagcctcccgaaagggngattaataccgcataacatcattttagcgcatgctcaaatgatcaaaggagtaatccgctatgagatggacccncggcgcattagctagttggtgaggtaacggctcaccaaggccacgatgcgtagccgacctgagagggtgatcggccacattgggactgagacacggccnngactcctacgggaggcagcagtggggaatattgcacaatgggggaaaccctgatgcagcaacgccgcgtgagtgatgacggcnttcgggttgtaaagctctgtctttagggacgataatgacggtacctaaggaggaagccacggctaactacgtgccagcagccgcggtaatacgtaggtggcnagcgttgtccggatttactgggcgtaaagggagcgtaggtggattcttaagtgagatgtgaaatacccgggcttaacttgggtcctgcatttcaaactgggaatctagagtgcaggagaggaaagtggaattcctagtgtagcggtgaaatgcgtagagattaggaagaacaccagtggcgaaggcgactttctggactgtaactgacactgaggctcgaaagcgtggggagcaaacaggattagataccctggtagtccacgccgtaaacgatggatactaggtgtgggaggtatcaactccttccgtgccgccgttaacacattaagtatccngcctggggagtacggtcgcaagattaaaactcaaaggaattgacggggacccgcacaagcagcggagcatgtggttnaatnnnnnnnaacgcgaagaaccttacctagacttgacatctcctgaattactcttaatcgaggaagcccttcggggacaggaagacaggtggtgcatggttgtcgtcagctcgtgtcgtgagatgttgggttaagtcccgcaacgagcgcaacccttattgttagttgctaccatttagttgagcactctagcgagactgcccgggttaaccggnaggaaggtggggatgacgtnnaatcatcatgccccttatgtctagggctacacacgtgctacaatggctggtacaaagagaagcaagaccgtgaggtggagcaaaactcaaaaaccagtcccagttcggattgtaggctgaaactcgcctacatgaagccggagttgctagtaatcgcgaatcagcatgtcgcggtgaatacgttcccnggtcttgtacacaccgcccgtcacaccatgagagttggcaatacccgaagtctgtgagctaacctgtaaagggggcaacggccgaaggtagggtcagcgannggg

SEQ ID NO: 582 - DNA, 1011 bp, Clostridium favososporum
  modified_base (8)..(8): a, c, t, g, unknown or other
  modified_base (855)..(855): a, c, t, g, unknown or other
  modified_base (929)..(929): a, c, t, g, unknown or other
  modified_base (943)..(943): a, c, t, g, unknown or other
  modified_base (945)..(947): a, c, t, g, unknown or other
  modified_base (949)..(949): a, c, t, g, unknown or other
  modified_base (991)..(991): a, c, t, g, unknown or other
gcgatgantttccttcgggaaacggattagcggcggacgggtgagtaacacgtgggtaacctgccttatagtgggggatagcctttcgaaaggaagattaataccgcataagattgtagtatcgcatgatatagcaattaaaggagcaatccgctataagatggacccgcgtcgcattagctagttggtgaggtaatggctcaccaaggcgacgatgcgtagccgacctgagagggtgatcggccacattgggactgagacacggcccagactcctacgggaggcagcagtggggaatattgcacaatgggcgaaagcctgatgcagcaacgccgcgtgagtgatgacggccttcgggttgtaaaactctgtcttcagggacgataatgacggtacctgaggaggaagccacggctaactacgtgccagcagccgcggtaatacgtaggtggcaagcgttgtccggatttactgggcgtaaagggagcgtaggcggatgtttaagtgggatgtgaaatactcgggctcaacttgagtgctgcattccaaactggatatctagagtgcaggagaggaaaggagaattcctagtgtagcggtgaaatgcgtagagattaggaagaataccagtggcgaaggcgcctttctggactgtaactgacgctgaggctcgaaagcgtggggagcaaacaggattagataccctggtagtccacgccgtaaacgatgaatactaggtgtaggggttgtcatgacctctgtgccgccgctaacgcattaagtattccgcctggggagtacggtcgcaagattaaaactcaaaggaattgacgggggcccgcacaagcagcggancatgtggtttaattcgaagcaacgcgaagaaccttacctagacttgacatctcctgaattactctgtaatggangaagctcttcggancnnnanacaggtggtgcatggttgtcgtcagctcgtgtcgtgagatgntgggttaagtcccgcaacga

SEQ ID NO: 583 - DNA, 1439 bp, Clostridium felsineum
aacgctggcggcgtgcttaacacatgcaagtcgagcggggaacttcggttcccagcggcggacgggtgagtaacacgtgggtaacctgcctcatagtggggaatagccttccgaaaggaagattaataccgcataatactcggaaatcacatgatttctgagccaaaggatttattcgctatgagatggacccgcggcgcattagcttgttggtgaggtaacggctcaccaaggcttcgatgcgtagccgacctgagagggtgatcggccacattggaactgagacacggtccagactcctacgggaggcagcagtggggaatattgcacaatgggggaaaccctgatgcagcaacgccgcgtgagtgatgaaggtcttcggatcgtaaaactctgtcttatgggacgatgatgacggtaccataggaggaagccacggctaactacgtgccagcagccgcggtaatacgtaggtggcaagcgttgtccggatttactgggcgtaaaggatgtgtaggcggatatttaagtgagatgtgaaatccccgggcttaacttgggggctgcatttcaaactggatgtctggagtgcaggagaggaaggcagaattcctagtgtagcggtgaaatgcgtagagattaggaagaataccagtggcgaaggcggccttctggactgtaactgacgctgaggcatgaaagcgtggggagcaaacaggattagataccctggtagtccacgccgtaaacgatgaatactaggtgtaggaggtatcgactccttctgtgccgcagttaacacaataagtattccgcctgggaagtacggtcgcaagattaaaactcaaaggaattgacggggacccgcacaagcagcggagcatgtggtttaattcgaagcaacgcgaagaaccttacctagacttgacatctcctgaattagtccgtaatggatgaagtcccttcggggacaggatgacaggtggtgcatggttgtcgtcagctcgtgtcgtgagatgttgggttaagtcccgcaacgagcgcaacccttatcattagttgctaacatttagttgagcactctagtgagactgcccgggttaaccgggaggaaggtggggatgacgtcaaatcatcatgccccttatgtctagggctacacacgtgctacaatggtagggacaaaaagatgctataccgcaaggtggagctaaactcaaaaccctatcccagttcggattgtaggctgaaactcgcctacatgaagccggagttgctagtaatcgcgaatcagaatgtcgcggtgaatacgttcccgggtcttgtacacaccgcccgtcacaccatgagagtcggcaacacccgaagcccgtgaggtaaccttttggaaccagcggtcgaaggtggggttgatgattggggtgaagtcgtaacaaggt

SEQ ID NO: 584 - DNA, 1481 bp, Clostridium frigidicarnis
agagtttgatcctggctcaggatgaatgctggcggcgtgcttaacacatgcaagtcgagcgagagagtctcttcggagacaatagcggcggacgggtgagtaacacgtgggcaacctgccttgtagtgggggatagccctccgaaaggaggattaataccgcatattgtcacattgaggcatctcaaagtgatgaaaggagtaatccgctacaagatgggcccgcggcgcattagctagttggtgaggtaacggctcaccaaggcgacgatgcgtagccgacctgagagggtgatcggccacattgggactgagacacggcccagactcctacgggaggcagcagtggggaatattgcacaatgggggaaaccctgatgcagcaacgccgcgtgagtgatgaaggtcttcggattgtaaagctctgtcttcggggacgataatgacggtacccgaggaggaagccacggctaactacgtgccagcagccgcggtaatacgtaggtggcaagcattatccggatttactgggcgtaaagggtgcgtaggcggatttttaagtgagatgtgaaatacccgggctcaacctgggggctgcatttcaaactggaaatctagagtgcaggagaggaaagtggaattcctagtgtagcggtgaaatgcgtagagattaggaagaacaccagtggcgaaggcgactttctggactgtaactgacgctgaggcacgaaagcgtggggagcaaacaggattagataccctggtagtccacgccgtaaacgatggatactaggtgtgggaggtttaactccttccgtgccgccgttaacacattaagtatcccgcctggggagtacggtcgcaagattaaaactcaaaggaattgacgggggcccgcacaagtagcggagcatgtggtttaattcgaagcaacgcgaagaaccttacctagacttgacatgtcctgaattaccagtaatgtgggaagtccttcggggacaggaacacaggtggtgcatggttgtcgtcagctcgtgtcgtgagatgttgggttaagtcccgcaacgagcgcaacccctattgttagttgctaccattaagttgagcactctagcgagactgcctgggataaccaggaggaaggcggggatgacgtcaaatcatcatgccccttatgtctagggctacacacgtgctacaatggcaagtacaaagagatgcaagaccgcgaggtggagctaaactcataaaacttgtctcagttcggattgtaggctgaaactcgcctacatgaagctggagttactagtaatcgcgaatcagaatgtcgcggtgaatacgttcccgggccttgtacacaccgcccgtcacaccatgagagttggcaatacccaacgtccgtgagctaacctgtaagggaggcagcggcctaaggtagggtcagcgattggggtgaagtcgtaacaaggtagccgtaggaga

SEQ ID NO: 585 - DNA, 1483 bp, Clostridium gasigenes
agagtttgatcctggctcaggacgaacgctggcggcgtgcctaacacatgcaagtcgagcgagaggagttcttcggaacgaatctagcggcggacgggtgagtaacacgtgggcaacctaccttatagaggggaatagccttccgaaaggaagattaataccgcataacattgcagtttcgcatgaaacagcaattaaaggagaaatccgctataagatgggcccgcggcgcattagctagttggtgaggtaaaggctcaccaaggcgacgatgcgtagccgacctgagagggtgatcggccacattgggactgagacacggcccagactcctacgggaggcagcagtggggaatattgcacaatgggggaaaccctgatgcagcaacgccgcgtgagtgatgaaggttttcggatcgtaaaactctgtctttggggacgataatgacggtacccaaggaggaagccacggctaactacgtgccagcagccgcggtaatacgtaggtggcaagcgttgtccggatttactgggcgtaaagggagcgtaggtggatttttaagtgaggtgtgaaatactcgggctcaacccgagaactgcatttcaaactggaaatctagagtgcaggagaggaaagtggaattcctagtgtagcggtgaaatgcgtagatattaggaagaacaccagtggcgaaggcgactttctggactgtaactgacactgaggctcgaaagcgtggggagcaaacaggattagataccctggtagtccacgccgtaaacgatgaatactaggtgtgggggttgtcatgacctccgtgccgccgctaacgcattaagtattccgcctggggagtacggtcgcaagattaaaactcaaaggaattgacgggggcccgcacaagcagcggagcatgtggtttaattcgaagcaacgcgaagaaccttacctagacttgacatctcctgaattacccgtaattggggaagtggcttcggccacaggaagacaggtggtgcatggttgtcgtcagctcgtgtcgtgagatgttgggttaagtcccgcaacgagcgcaacccttattgttagttgccatcatttagttgggcactctagcgagactgcccgggttaaccgggaggaaggtggggatgacgtcaaatcatcatgccccttatgtctagggctacacacgtgctacaatggcaagtacaaagagaagcaagaccgcgaggtggagccaaactataaaacttgtctcagttcggattgcaggctgaaactcgcctgcatgaagctggagttgctagtaatcgcgaatcagcatgtcgcggtgaatacgttcccgggccttgtacacaccgcccgtcacaccacgagagttggcaatacccaaagttcgtgagctaacccgcaagggaggcagcgacctaaggtagggtcagcgattggggtgaagtcgtaacaaggtagccgtaggaga

SEQ ID NO: 586 - DNA, 1359 bp, Clostridium ghonii
tcgagcgaacccttcggggtgagcggcggacgggtgagtaacgcgtgggtaacctgccctgtacacacggataacataccgaaaggtatgctaatacgggataacatatgagagtcgcatggcttttgtatcaaagctccggcggtacaggatggacccgcgtctgattagctagttggtaaggtaacggcttaccaaggcaacgatcagtagccgacctgagagggtgatcggccacattggaactgagacacggtccaaactcctacgggaggcagcagtggggaatattgcacaatgggcgaaagcctgatgcagcaacgccgcgtgagcgatgaaggccttcgggtcgtaaagctctgtcctcaaggaagataatgacggtacttgaggaggaagccccggctaactacgtgccagcagccgcggtaatacgtagggggctagcgttatccggaattactgggcgtaaagggtgcgtaggcggtctttcaagccagaagtgaaaggctacggctcaaccgtagtaagcttttggaactgtaggacttgagtgcaggagaggagagtggaattcctagtgtagcggtgaaatgcgtagatattaggaggaacaccagtagcgaaggcggctctctggactgtaactgacgctgaggcacgaaagcgtggggagcaaacaggattagataccctggtagtccacgccgtaaacgatgagtactaggtgtcgggggttacccccctcggtgccgcagctaacgcattaagtactccgcctgggaagtacgctcgcaagagtgaaactcaaaggaattgacggggacccgcacaagtagcggagcatgtggtttaattcgaagcaacgcgaagaaccttacctaagcttgacatcccattgacctctccctaatcggagatttcccttcggggacagtggtgacaggtggtgcatggctgtcgtcagctcgtgtcgtgagatgttggggtaagtcccgcaacgagcgcaacccttgcctttagttgccagcattaagttgggcactctagagggactgccgaggataactcggaggaaggtggggatgacgtcaaatcatcatgccccttatgcttagggctacacacgtgctacaatgggtggtacagagggttgccaagccgtgaggtggagctaatcccttaaagccattctcagttcggattgtaggctgaaactcgcctacatgaagctggagttactagtaatcgcagatcagaatgctgcggtgaatgcgttcccgggtcttgtacacaccgcccgtcacaccatgggagttgggggcgcccgaagccggttagctaaccttttaggaagcg

SEQ ID NO: 587 - DNA, 1333 bp, Clostridium glycolicum
ttcggagaagagcggcggacgggtgagtaacgcgtgggtaacctgcctcatacacatggataacataccgaaaggtatgctaatacaggataacataagagattcgcatgtttctcttatcaaagctccggcggtatgagatggacccgcgtctgattagctagttggtaaggtaatggcttaccaaggcgacgatcagtagccgacctgagagggtgatcggccacattggaactgagacacggtccaaactcctacgggaggcagcagtggggaatattgcacaatgggcgaaagcctgatgcagcaacgccgcgtgagtgatgaaggccttcgggtcgtaaaactctgtcctcaaggaagataatgacggtacttgaggaggaagccccggctaactacgtgccagcagccgcggtaatacgtagggggctagcgttatccggtttactgggcgtaaagggtgcgtaggtggtttcttaagtcaggagtgaaaggtacggcttaaccgtagtaagctcttgaaactgggaaacttgagtgcaggagaggaaagtggaattcctagtgtagcggtgaaatgcgtagatattaggaggaacaccagtagcgaaggcggctttctggactgtaactgacactgaggcacgaaagcgtggggagcaaacaggattagataccctggtagtccacgccgtaaacgatgagtactaggtgtcgggggttacccccctcggtgccgcagctaacgcattaagtactccgcctggggagtacgctcgcaagagtgaaactcaaaggaattgacggggacccgcacaagtagcggagcatgtggtttaattcgaagcaacgcgaagaaccttacctaagcttgacatccttttgaccgatgcctaatcgcatttttcccttcggggacagaagtgacaggtggggcatgggagtcgtcagctcgtgtcgtgagatgttgggttaagtcccgcaacgagcgcaacccttgcctttagttgccagcattaagttgggcactctagagggactgccagggataacctggaggaaggtggggatgacgtcaaatcatcatgccccttatgcttagggctacacacgtgctacaatgggtggtacagagggcagccaagtcgtgaggccgagctaatcccttaaagccattctcagttcggattgtaggctgaaactcgcctacatgaagctggagttactagtaatcgcagatcagaatgctgcggtgaatgcgttcccgggtcttgtacacaccgcccgtcacaccacggaagttgggggcgcccgaagccacttagctaac

SEQ ID NO: 588 - DNA, 956 bp, Clostridium glycyrrhizinilyticum
  modified_base (907)..(907): a, c, t, g, unknown or other
  modified_base (935)..(935): a, c, t, g, unknown or other
tcgaacgaagcactttaccggatttcttcggaatgaaagttttgtgactgagtggcggacgggtgagtaacgcgtgggtaacctgcctcatacagggggataacagttagaaatgactgctaataccgcataagaccacaggattgcatggtccggtggtaaaaactccggtggtatgagatggacccgcgtctgattaggtagttggtggggtaacggcttaccaagccgacgatcagtagccgacctgagagggtgaccggccacattgggactgagacacggcccaaactcctacgggaggcagcagtggggaatattgcacaatgggggaaaccctgatgcagcgacgccgcgtgagcgatgaagtatttcggtatgtaaagctctatcagcagggaagaaaatgacggtacctgactaagaagcaccggctaaatacgtgccagcagccgcggtaatacgtatggtgcaagcgttatccggatttactgggtgtaaagggagcgtagacggagaggcaagtctgatgtgaaaacccggggctcaaccccgggactgcattggaaactgtttttctagagtgtcggagaggtaagtggaattcctagtgtagcggtgaaatgcgtagatattaggaggaacaccagtggcgaaggcggcttactggacgatgactgacgttgaggctcgaaagcgtggggagcaaacaggattagataccctggtagtccacgccgtaaacgatgactgctaggtgtcgggaggcaaagcctttcggtgccgcagcaaacgcaataagcagtccacctggggagtacgttcgcaagaatgaaactcaaaggaattgacggggacccgcacaagcggtggagcatgtggtttaattcgaagcaacgcgaagaancttacctgcccttgacatccggctgacnggcgagtaatgtcgcctttcc

SEQ ID NO: 589 - DNA, 1465 bp, Clostridium haemolyticum
gacgaacgctggcggcgtgcctaacacatgcaagtcgagcgatgaaacttccttcgggaagtggattagcggcggacgggtgagtaacacgtgggtaacctgcctcaaagagggggatagcctcccgaaagggagattaataccgcataacattattttatggcatcatagaataatcaaaggagcaatccgctttgagatggacccgcggcgcattagctagttggtgaggtaagggctcaccaaggcgacgatgcgtagccgacctgagagggtgatcggccacattggaactgagacacggtccagactcctacgggaggcagcagtggggaatattgcgcaatgggggaaaccctgacgcagcaacgccgcgtgagtgatgaaggttttcggatcgtaaaactctgtctttagggacgataatgacggtacctaaggaggaagccacggctaactacgtgccagcagccgcggtaatacgtaggtggcaagcgttgtccggatttactgggcgtaaagagtatgtaggtgggtgcttaagtcagatgtgaaattcccgggcttaacctgggcgctgcatttgaaactgggcatctagagtgcaggagaggaaagtggaattcctagtgtagcggtgaaatgcgtagagattaggaagaacaccagtggcgaaggcgactttctggactgtaactgacactgagatacgaaagcgtgggtagcaaacaggattagataccctggtagtccacgccgtaaacgatgaatactaggtgtcggggggtaccaccctcggtgccgcagcaaacgcattaagtattccgcctggggagtacggtcgcaagattaaaactcaaaggaattgacggggacccgcacaagcagcggagcatgtggtttaattcgaagcaacgcgaagaaccttacctagacttgacatctcctgaattactcttaatcgaggaagtcccttcggggacaggaagacaggtggtgcatggttgtcgtcagctcgtgtcgtgagatgttgggttaagtcccgcaacgagcgcaacccttattgttagttgctactattaagttaagcactctaacgagactgccgcggttaacgtggaggaaggtggggatgacgtcaaatcatcatgccccttatgtctagggctacacacgtgctacaatggctggtacaacgagcagcaaacccgcgagggggagcaaaacttgaaagccagtcccagttcggattgtaggctgaaactcgcctacatgaagttggagttgctagtaatcgcgaatcagcatgtcgcggtgaatacgttcccgggtcttgtacacaccgcccgtcacaccatgagagccggtaacacccgaagcccgtgaggtaaccgtaaggagccagcggtcgaaggtgggattggtgattggggtgaagtcgtaacaaggtagccgtaggagaacc

SEQ ID NO: 590 - DNA, 1384 bp, Clostridium hathewayi
  modified_base (19)..(19): a, c, t, g, unknown or other
  modified_base (939)..(939): a, c, t, g, unknown or other
  modified_base (942)..(942): a, c, t, g, unknown or other
  modified_base (980)..(980): a, c, t, g, unknown or other
gtcgagcgaagcggtttcnatgaggttttcggatggatttgaaattgacttagcggcggacgggtgagtaacgcgtgggtaacctgccttacactgggggataacagttagaaatgactgctaataccgcataagcgcacagggccgcatggtccggtgtgaaaaactccggtggtgtaagatggacccgcgtctgattaggtagttggtggggtaacggcccaccaagccgacgatcagtagccgacctgagagggtgaccggccacattgggactgagacacggcccaaactcctacgggaggcagcagtggggaatattggacaatgggcgaaagcctgatccagcgacgccgcgtgagtgaagaagtatttcggtatgtaaagctctatcagcagggaagaaaatgacggtacctgactaagaagccccggctaactacgtgccagcagccgcggtaatacaggggcaagcgtccggattactgggtgtaaagggagcgtaacggtttagcaagttgaagtgaaagcccggggctcaaccccggtactgctttggaaactgttagacttgagtgcaggagaggtaagtggaattctagtgtagcggtgaaatgcgtagatattaggaggaacaccagtggcgaaggcggcttactggactgtaactgacgttgaggctcgaaagcgtggggagcaaacaggattagataccctggtagtccacgccgtaaacgatgaatactaggtgtcggggggcaaagcccttcggtgccgccgcaaacgcaataagtattccacctggggagtacgttcgcaagaatgaaactcaaaggaattgacggggacccgcacaagcggtggagcatgtggtttaattcgaagcaacgcgaagaaccttaccaagtcttgacatcccattgaaaacaagtttatccngantactctgtgcagagggggcgaaaacggtggagcaagtntgaagtcaacgcgtcgtgagatgttgggttaagtcccgcaacgagcgcaacccttatccttagtagccagcgagtagagtcgggcactctggggagactgccagggataacctggaggaaggtggggatgacgtcaaatcatcatgccccttatgatttgggctacacacgtgctacaatggcgtaaacaaagggaggcaaaggagcgatccggagcaaaccccaaaaataacgtctcagttcggattgcaggctgcaactcgcctgcatgaagctggaatcgctagtaatcgcgaatcagaatgtcgcggtgaatacgttcccgggtcttgtacacaccgcccgtcacaccatgggagttggtaacgcccgaagtcagtgacccaaccgcaaggagggagctg

SEQ ID NO: 591 - DNA, 1393 bp, Clostridium hiranonis
acatgcaagtcgagcgattctcttcggagaagagcggcggacgggtgagtaacgcgtgggtaacctgccctgtacacacggataacataccgaaaggtatgctaatacgggataatatataagagtcgcatgacttttatatcaaagatttttcggtacaggatggacccgcgtctgattagcttgttggcggggtaacggcccaccaaggcgacgatcagtagccgacctgagagggtgatcggccacattggaactgagacacggtccaaactcctacgggaggcagcagtggggaatattgcacaatgggcgcaagcctgatgcagcaacgccgcgtgagcgatgaaggccttcgggtcgtaaagctctgtcctcaaggaagataatgacggtacttgaggaggaagccccggctaactacgtgccagcagccgcggtaatacgtagggggctagcgttatccggatttactgggcgtaaagggtgcgtaggcggtctttcaagtcaggagttaaaggctacggctcaaccgtagtaagctcctgatactgtctgacttgagtgcaggagaggaaagcggaattcccagtgtagcggtgaaatgcgtagatattgggaggaacaccagtagcgaaggcggctttctggactgtaactgacgctgaggcacgaaagcgtggggagcaaacaggattagataccctggtagtccacgctgtaaacgatgagtactagttgtcggaggttaccccttcggtgccgcagctaacgcattaagtactccgcctggggagtacgcacgcaagtgtgaaactcaaaggaattgacggggacccgcacaagtagcggagcatgtggtttaattcgaagcaacgcgaagaaccttacctaggcttgacatccttctgaccgaggactaatctcctctttccctccggggacagaagtgacaggtggtgcatggttgtcgtcagctcgtgtcgtgagatgttgggttaagtcccgcaacgagcgcaacccttgtctttagttgccatcattaagttgggcactctagagagactgccagggataacctggaggaaggtggggatgacgtcaaatcatcatgccccttatgcctagggctacacacgtgctacaatgggtggtacagagggcagccaagccgtgaggtggagcaaatcccttaaagccattctcagttcggattgtaggctgaaactcgcctacatgaagctggagttactagtaatcgcagatcagaatgctgcggtgaatgcgttcccgggtcttgtacacaccgcccgtcacaccatgggagttggagacacccgaagccgactatctaaccttttgggagaagtcgtccccctcgaatcaatacccc

SEQ ID NO: 592 - DNA, 1460 bp, Clostridium histolyticum
gacgaacgctggcggcgtgcttaacacatgcaagtcgagcgatgaagttcccttcggggaacggattagcggcggacgggtgagtaacacgtgggtaacctgcctcaaagagggggatagcctcccgaaagggagattaataccgcataatatctttttaatgcatgttagaaagattaaaggagcaatccgctttgagatggacccgcggcgcattagctagttggtgaggtaacggctcaccaaggcgacgatgcgtagccgacctgagagggtgatcggccacattgggactgagacacggcccagactcctacgggaggcagcagtggggaatattgcgcaatgggggaaaccctgacgcagcaacgccgcgtgagtgatgaaggtcttcggatcgtaaagctctgtcttcagggacgataatgacggtacctgaggaggaagccacggctaactacgtgccagcagccgcggtaatacgtaggtggcaagcgttgtccggatttattgggcgtaaagcatgcgtaggcggatatttaagtgggatgtgaaatcccggggcttaaccccggtgctgcatttcaaactggatatctagagtgcaggagaggaaagcggaattcctagtgtagcggtgaaatgcgtagatattaggaagaacaccagtggcgaaggcggctttctggactgtaactgacgctgaggcatgaaagcgtgggtagcaaacaggattagataccctggtagtccacgccgtaaacgatgggtactaggtgtcggggtttcaatactccggtgccgcagttaacacattaagtaccccgcctggggagtacgatcgcaagattaaaactcaaaggaattgacgggggcccgcacaagtagcggagcatgtggtttaattcgaagcaacgcgaagaaccttacctgggcttgacatcccgagaatcctgtggaaacataggagtgcccttcggggaactcggtgacaggtggtgcatggttgtcgtcagctcgtgtcgtgagatgttgggttaagtcccgcaacgagcgcaaccctttgttgttagttgctaccattaagttgagcactctagcaagactgcctgggtaaccaggaggaaggtggggatgacgtcaaatcatcatgccccttatgtccagggctacacacgtgctacaatggttggtacagagagaagcaagaccgtgaggtggagccaatctcacaaagccaatctcagttcggattgtaggctgcaactcgcctacatgaagctggagttactagtaatcgcgaatcagaatgtcgcggtgaatgcgttcccgggccttgtacacaccgcccgtcacaccatgagagttggtaacacccgaagtccgtgaggtaaccgtaaggagccagcggccgaaggtgggatcgatgattggggtgaagtcgtaacaggtaaccgtaa

SEQ ID NO: 593 - DNA, 1400 bp, Clostridium hylemonae
tcgaacgaagcaatactgtgtgaagagattagcttgctaagatcagaactttgtattgactgagtggcggacgggtgagtaacgcgtgggcaacctgccttacacagggggataacagctagaaatggctgctaataccgcataagacctcagtaccgcatggtagaggggtaaaaactccggtggtgtaagatgggcccgcgtctgattaggtagttggtagggtaacggcctaccaagccgacgatcagtagccgacctgagagggtgaccggccacattgggactgagacacggcccaaactcctacgggaggcagcagtggggaatattgcacaatgggggaaaccctgatgcagcgacgccgcgtgaaggatgaagtatttcggtatgtaaacttctatcagcagggaagaagatgacggtaccgactaagaagccggctaactacgtgccacagccgcggtaatacgtagggggcaagcgttatccggatttactgggtgtaaagggagcgtagacggcatggcaagtctgaagtgaaagcccggggctcaaccccgggactgctttggaaactgtcaggctagagtgtcggagaggcaagtggaattcctagtgtagcggtgaaatgcgtagatattaggaggaacaccagtggcgaaggcggcttgctggacgatgactgacgttgaggctcgaaagcgtggggagcaaacaggattagataccctggtagtccacgccgtaaacgatgattactaggtgtcgggaagcaaagcttttcggtgccgcagccaacgcaataagtaatccacctggggagtacgttcgcaagaatgaaactcaaaggaattgacggggacccgcacaagcggtggagcatgtggtttaattcgaagcaacgcgaagaaccttacctgatcttgacatccccggcatgaaaagtctgaagtactctttcttcggaacaccggtgacaggtggtgcatggttgtcgtcagctcgtgtcgtgagatgttgggttaagtcccgcaacgagcgcaacccttatctttagtagccagcatttgaggtgggcactctagagagactgccagggataacctggaggaaggtggggatgacgtcaaatcatcatgccccttatgaccagggctacacacgtgctacaatggcgtaaacaaagggaagcgaccctgtgaaggcaagcaaatcccaaaaataacgtctcagttcggattgtagtctgcaactcgactacatgaagctggaatcgctagtaatcgcgaatcagaatgtcgcggtgaatacgttcccgggtcttgtacacaccgcccgtcacaccatgggagtcagtaacgcccgaagccggtgacctaaccgaaaggaaggagccg

SEQ ID NO: 594 - DNA, 994 bp, Clostridium indolis
  modified_base (944)..(944): a, c, t, g, unknown or other
  modified_base (961)..(961): a, c, t, g, unknown or other
cggatggaattccttaatgactgagtggcggacgggtgagtaacgcgtggggaacctgccctatacagggggataacagctggaaacggctgctaataccgcataagcgcacagaatcgcatgattcggtgtgaaaagctccggcagtataggatggtcccgcgtctgattagctggttggcggggtaacggcccaccaaggcgacgatcagtagccggcttgagagagtggacggccacattgggactgagacacggcccaaactcctacgggaggcagcagtggggaatattgcacaatggggggaaccctgatgcagcgacgccgcgtgagtgaagaagtatttcggtatgtaaagctctatcagcagggaagaaaaaagacggtacctgactaagaagccccggctaactacgtgccagcagccgcggtaatacgtagggggcaagcgttatccggaattactgggtgtaaagggtgcgtaggtggcatggtaagtcagaagtgaaagcccggggcttaaccccgggactgcttttgaaactgtcatgctggagtgcaggagaggtaagcggaattcctagtgtagcggtgaaatgcgtagatattaggaggaacaccagtggcgaaggcggcttactggactgtcactgacactgatgcacgaaagcgtggggagcaaacaggattagataccctggtagtccacgccgtaaacgatgaatactaggtgtcggggccgtagaggcttcggtgccgcagcaaacgcagtaagtattccacctggggagtacgttcgcaagaatgaaactcaaaggaattgacggggacccgcacaagcggtggagcatgtggtttaattcgaagcaacgcgaagaaccttacctggtcttgacatctaactgaccggttcgtaatgggacctttccttcgggacagttanacaggtggtgcatggtngtcgtcagctcgtgtcgtgagatgttgggttaa

SEQ ID NO: 595 - DNA, 1401 bp, Clostridium innocuum
  modified_base (15)..(16): a, c, t, g, unknown or other
  modified_base (1395)..(1395): a, c, t, g, unknown or other
tcgaacgaagtcttnnggaagcttgcttccaaaaagacttagtggcgaacgggtgagtaacacgtaggtaacctgcccatgtgtccgggataactgctggaaacggtagctaaaaccggataggtatacggagcgcatgctctgtatattaaagcgcccatcaaggcgtgaacatggatggacctgcggcgcattagctagttggtgaggtaacggcccaccaaggcgatgatgcgtagccggcctgagagggtaaacggccacattgggactgagacacggcccaaactcctacgggaggcagcagtagggaattttcgtcaatgggggaaaccctgaacgagcaatgccgcgtgagtgaagaaggtcttcggatcgtaaagctctgttgtaagtgaagaacggctcatagaggaaatgctatgggagtgacggtagcttaccagaaagccacggctaactacgtgccagcagccgcggtaatacgtaggtggcaagcgttatccggaatcattgggcgtaaagggtgcgtaggtggcgtactaagtctgtagtaaaaggcaatggctcaaccattgtaagctatggaaactggtatgctggagtgcagaagagggcgatggaattccatgtgtagcggtaaaatgcgtagatatatggaggaacaccagtggcgaaggcggtcgcctggtctgtaactgacactgaggcacgaaagcgtggggagcaaataggattagataccctagtagtccacgccgtaaacgatgagaactaagtgttggaggaattcagtgctgcagttaacgcaataagttctccgcctggggagtatgcacgcaagtgtgaaactcaaaggaattgacgggggcccgcacaagcggtggagtatgtggtttaattcgaagcaacgcgaagaaccttaccaggccttgacatggaaacaaataccctagagatagggggataattatggatcacacaggtggtgcatggttgtcgtcagctcgtgtcgtgagatgttgggttaagtcccgcaacgagcgcaacccttgtcgcatgttaccagcatcaagttggggactcatgcgagactgccggtgacaaaccggaggaaggtggggatgacgtcaaatcatcatgccccttatggcctgggctacacacgtactacaatggcgaccacaaagagcagcgacacagtgatgtgaagcgaatctcataaaggtcgtctcagttcggattgaagtctgcaactcgacttcatgaagtcggaatcgctagtaatcgcagatcagcatgctgcggtgaatacgttctcgggccttgtacacaccgcccgtcaaaccatgggagtcagtaatacccgaagccggtggcataaccgtaaggagngagccg

SEQ ID NO: 596 - DNA, 310 bp, Clostridium irregulare
  modified_base (44)..(44): a, c, t, g, unknown or other
  modified_base (59)..(59): a, c, t, g, unknown or other
  modified_base (265)..(266): a, c, t, g, unknown or other
gacccgcgtctgattagctagttggtaaggtaacggcttaccanggcgacgatcactanccgacctgagagggtgatcggccacattggaactgaaacacggtccaaactcctacgggaggcagcagtggggaatattgcacaatgggcgaaagcctgatgcaccaacgccgcgtgagcgatgaaggccttcgggtcgtaaagctctgtcctcaaggaagataatgacggtacttgaagaggaagccccggctaactacgtgccnncagccgcggtaatacgtagggggctagcgttatccggaattact

SEQ ID NO: 597 - DNA, 1023 bp, Clostridium isatidis
  modified_base (923)..(923): a, c, t, g, unknown or other
  modified_base (940)..(940): a, c, t, g, unknown or other
  modified_base (967)..(967): a, c, t, g, unknown or other
cgaggtgattccttcgggaatgaacctagcggcggacgggtgagtaacacgtgggtaacctgccttatagaggggaatagcctcccgaaagggagattaataccgcataatattgaagcttcgcatgaagtttcaatcaaaggagcaatccgctataagatgggcccgcggcgcattagctagttggtgaggtaacggctcaccaaggcgacgatgcgtagccgacctgagagggtgatcggccacattgggactgagacacggcccagactcctacgggaggcagcagtggggaatattgcacaatgggggaaaccctgatgcagcaacgccgcgtgagtgatgaaggttttcggatcgtaaagctctgtcttcagggacgataatgacggtacctgaggaggaagccacggctaactacgtgccagcagccgcggtaatacgtaggtggcgagcgttgtccggatttactgggcgtaaagggagcgtaggcggacttttaagtgagatgtgaaatactcgggctcaacccgggggctgcatttcaaactgaaagtctagagtgcaggagaggagagtggaattcctagtgtagcggtgaaatgcgtagagattaggaagaacaccagtggcgaaggcggctctctggactgtaactgacgctgaggctcgaaagcgtggggagcaaacaggattagataccctggtagtccacgccgtaaacgatgaatactaggtgtaggggttgtcatgacctctgtgccgccgctaacgcattaagtattccgcctggggagtacggtcgcaagattaaaactcaaaggaattgacgggggcccgcacaagcagcggagcatgtggtttaattcgaagcaacgcgaagaaccttacctagacttgacatctcctgcattacccttaanccggggaagtcccttcngggacaggatgacaggtggtgcatggntgtcgtcagctcgtgtcgtgagatgttgggttaagtcccgcaacgagcgcaacccc

SEQ ID NO: 598 - DNA, 1462 bp, Clostridium kluyveri
ttaaaataagagtttgatcctggctcaggacgaacgctggcggcgtgcctaacacatgcaagtcgagcgaggaagccccttcgggggtggaatagcggcggacgggtgagtaacacgtgggtaacctgcctcaaagagggggatagcctcccgaaagggagattaataccgcatagaaggtaaaaatcgcatgataaatgccttaaaggagcaatccgctttgagatgggcccgcgtcgcattagctagttggagggataaaagccccccaaggcgacgatgcgtagccgacctgagagggtgaacggccacattggaactgagatacggtccagactcctacgggaggcagcagtggggaatattgcacaatgggggaaaccctgatgcagcaacgccgcgtgagtgaagaaggttttcggatcgtaaagctctgtcatccgggacgataatgacggtaccggaagaggaagccacggctaactacgtgccagcagccgcggtaatacgtaggtggcgagcgttgtccggaattactgggcgtaaagggtgtgcaggcggatatttaagtgagatgtgaaagacccgggcttaacccgggcagtgcatttcaaactggatatctagagtgcaggagaggagaacggaattcctagtgtagcggtgaaatgcgtagagattaggaagaacaccagtggcgaaggcggttctctggactgtaactgacgctgaggcacgaaagcgtgggtagcaaacaggattagataccctggtagtccacgccgtaaacgatgagtactaggtgtagggggtatcgaccccccctgtgccgcagtaaacacaataagtactccgcctgggaagtacgatcgcaagattaaaactcaaaggaattgacggggacccgcacaagcagcggagcatgtggtttaattcgaagcaacgcgaagaaccttacctggacttgacatcccctgaatgactcgtaatggaggaagccctacggggcagggagacaggtggtgcatggttgtcgtcagctcgtgtcgtgagatgttaggttaagtcctgcaacgagcgcaacccctgtcgttagttgccagcacgtaaaggtgggcaccctaacgagactgccgcggttaacgtggaggaaggtggggatgacgtcaaatcatcatgccccttatgtccagggcaacacacgtgctacaatgggcagaacagagagaagcaataccgcgaggaggagcaaatctcaaaaactgcccccagttcggattgcaggctgaaacccgcctgcatgaagttggagttgctagtaatcgcgaatcagcatgtcgcggtgaatacgttcccgggtcttgtacacaccgcccgtcacaccatgagagctggcaacacccgaagtccgtagtctaaccaaggaggacgcggccgaaggtggggttagtgattggggtga

SEQ ID NO: 599 - DNA, 1361 bp, Clostridium lactatifermentans
agagcttcggcaggatttctatctatcttagtggcggacgggtgagtaacgtgtgggcaacctgccctgtactggggaataatcattggaaacgatgactaataccgcatgtggtcctcggaaggcatcttctgaggaagaaaggatttattcggtacaggatgggcccgcatctgattagctagttggtgagataacagcccaccaaggcgacgatcagtagccgacctgagagggtgatcggccacattgggactgagacacggcccaaactcctacgggaggcagcagtggggaatattgcacaatgggcgaaagcctgatgcagcaacgccgcgtgaaggatgaagggtttcggctcgtaaacttctatcaatagggaagaaataaatgacggtacctaaataagaagccccggctaactacggccagcagccgcggtaatactagggggcaagcgttatccggaattactgggtgtaaagggagcgtaggcggcatggtaagccagatgtgaaagccttgggcttaacccgaggattgcatttggaactatcaagctagagtacaggagaggaaagcggaattcctagtgtagcggtgaaatgcgtagatattaggaagaacaccagtggcgaaggcggctttctggactgaaactgacgctgagctcgaaagcgtggggagcaaacaggattagataccctggtagtccacgccgtaaacgatgagtgctaggtgtcggggaggaatcctcggtgccgcagctaacgcaataagcactccacctggggagtacgaccgcgaggttgaaactcaaaggaattgacgggggcccgcacaagcggtggagcatgtggtttaattcgaagcaacgcgaagaaccttaccaaggcttgacatcccgatgaccgctctagagatagagcttctcttcgtagcatcggtgaccgggggtgcatgggagtcgtcagctcgtgtcgtgagatgttgggttaagtcccgcaacgagcgcaacccttatcttcagtagccatcattcagttgggcactctggagagactgccgtggataacacggaggaaggtggggatgacgtcaaatcatcatgccccttatgtcttgggctacacacgtgctacaatggctggtaacaaagtgacgcaagacggcgacgttaagcaaatcacaaaaacccagtcccagttcggattgtagtctgcaactcgactacatgaagctggaatcgctagtaatcgcgaatcagcatgtcgcggtgaatacgttcccgggccttgtacacaccgcccgtcacaccatgggagttggaagcacccgaagtcggtgacctaaccgtaagg

SEQ ID NO: 600 - DNA, 1381 bp, Clostridium lavalense
  modified_base (17)..(19): a, c, t, g, unknown or other
tcgaacgaagcattttnnnatgaagttttcggatggattctgagatgactgagtggcggacgggtgagtaacacgtggataacctgcctcacactgggggacaacagttagaaatgactgctaataccgcataagcgcacagtaccgcatggtacagtgtgaaaaactccggtggtgtgagatggatccgcgtctgattagccagttggcggggtaacggcccaccaaagcgacgatcagtagccgacctgagagggtgaccggccacattgggactgagacacggcccaaactcctacgggaggcagcagtggggaatattgcacaatgggcgaaagcctgatgcagcgacgccgcgtgagtgaagaagtatttcggtatgtaaagctctatcagcagggaagataatgacggtacctgactaagaagccccggctaactacgtgccagcagccgcggtaatacgtagggggcaagcgttatccggatttactgggtgtaaagggagcgtagacggcatggcaagtctgaagtgaaaacccagggctcaaccctgggactgctttggaaactgtcaagctagagtgcaggagaggtaagtggaattcctagtgtagcggtgaaatgcgtagatattaggaggaacaccagtggcgaaggcggcttactggactgtaactgacgttgaggctcgaaagcgtggggagcaaacaggattagataccctggtagtccacgccgtaaacgatgagtgctaggtgttggggggcaaagcccttcggtgccgtcgcaaacgcaataagcactccacctggggagtacgttcgcaagaatgaaactcaaaggaattgacggggacccgcacaagcggtggagcatgtggtttaattcgaagcaacgcgaagaaccttaccaagtcttgacatcctcttgaccggcgtgtaacggcgcctttccttcgggacaagagagacaggtggtgcatggttgtcgtcagctcgtgtcgtgagatgttgggttaagtcccgcaacgagcgcaacccttatccttagtagccagcaataagatgggcactctagggagactgccagggacaacctggaggaaggtggggatgacgtcaaatcatcatgccccttatgatttgggctacacacgtgctacaatggcgtaaacaaagggaagcgaccctgcgaaggtgagcaaatctcaaaaataacgtcccagttcggactgtagtctgcaacccgactacacgaagctggaatcgctagtaatcgcgaatcagaatgtcgcggtgaatacgttcccgggtcttgtacacaccgcccgtcacaccatgggagtcagcaacgcccgaagtcagtgacccaactcgca

SEQ ID NO: 601 - DNA, 1505 bp, Clostridium leptum
cgacgctggcggcgtgcctaacacatgcaagtcgaacggagttaaattcgacacccgagtatccggccgggaggcggggtgctgggggttggatttaacttagtggcggacgggtgagtaacgcgtgagtaacctgcctttcagagggggataacgttctgaaaagaacgctaataccgcataacatcaatttatcgcatgataggttgatcaaaggagcaatccgctggaagatggactcgcgtccgattagccagttggcggggtaacggcccaccaaagcgacgatcggtagccggactgagaggttgaacggccacattgggactgagacacggcccagactcctacgggaggcagcagtgggggatattgcacaatgggggaaaccctgatgcagcaacgccgcgtgagggaagaaggttttcggattgtaaacctctgttcttagtgacgataatgacggtagctaaggagaaagctccggctaactacgtgccagcagccgcggtaatacgtagggagcgagcgttgtccggatttactgggtgtaaagggtgcgtaggcggcgaggcaagtcaggcgtgaaatctatgggcttaacccataaactgcgcttgaaactgtcttgcttgagtgaagtagaggtaggcggaattcccggtgtagcggtgaaatgcgtagagatcgggaggaacaccagtggcgaaggcggcctactgggctttaactgacgctgaagcacgaaagcatgggtagcaaacaggattagataccctggtagtccatgccgtaaacgatgattactaggtgtggggggtctgaccccctccgtgccgcagttaacacaataagtaatccacctggggagtacggccgcaaggttgaaactcaaaggaattgacgggggcccgcacaagcagtggagtatgtggtttaattcgaagcaacgcgaagaaccttaccaggtcttgacatccgtctaacgaagcagagatgcattaggtgcccttcggggaaaggcgagacaggtggtgcatggttgtcgtcagctcgtgtcgtgagatgttgggttaagtcccgcaacgagcgcaacccttgtttctagttgctacgcaagagcactctagagagactgccgttgacaaaacggaggaaggtggggacgacgtcaaatcatcatgccccttatgacctgggccacacacgtactacaatggctgtaaacagagggaagcaaagccgcgaggtggagcaaaaccctaaaagcagtcccagttcggatcgcaggctgcaacccgcctgcgtgaagtcggaattgctagtaatcgcggatcagcatgccgcggtgaatacgttcccgggccttgtacacaccgcccgtcacaccatgggagccggtaatacccgaagccagtagttcaaccgcaaggagagcgctgtcgaaggtaggattggcgactggggtgaagtcgtaacaaggtagccgtatcggaaggtgcggc

SEQ ID NO: 602 - DNA, 1500 bp, Clostridium limosum
tggctcaggacgaacgctggcggcgtgcttaacacatgcaagtcgagcgatgaagcttccttcgggaagtggattagcggcggacgggtgagtaacacgtgggtaacctgcctcaaagagggggatagccttccgaaaggaagattaataccgcataatatcatttcaatgcatgttgaaatgattaaaggagtaatccgctttgagatggacccgcggcgcattagctagttggtgaggtaacggctcaccaaggcgacgatgcgtagccgacctgagagggtgatcggccacattgggactgagacacggcccagactcctacgggaggcagcagtggggaatattgcgcaatgggggaaaccctgacgcagcaacgccgcgtgagtgatgacggtcttcggattgtaaagctctgttttcagggacgataatgacggtacctgaggaggaagccacggctaactacgtgccagcagccgcggtaatacgtaggtggcgagcgttgtccggatttattgggcgtaaagcatgcgtaggcggatacttaagtgggatgtgaaatcccggggctcaaccccggtgctgcattccaaactgggtatctagagtacaggagaggaaagcggaattcctagtgtagcggtgaaatgcgtagagattaggaagaacaccagtggcgaaggcggctttctggactgtaactgacgctgaggcatgaaagcgtgggtagcaaacaggattagataccctggtagtccacgccgtaaacgatgagtactaggtgtcggggtttcaatacttcggtgccgcagttaacacattaagtactccgcctgggaagtacgatcgcaagattaaaactcaaaggaattgacgggggcccgcacaagtagcggagcatgtggtttaattcgaagcaacgcgaagaaccttacctgggcttgacatcccaagaatcctgtggaaacacgggagtgcccttcggggaacttggtgacaggtggtgcatggttgtcgtcagctcgtgtcgtgagatgttgggttaagtcccgcaacgagcgcaacccttgttgttagttgctaccattaagttgagcactctagcaagactgcctgggtaaccaggaggaaggtggggatgacgtcaaatcatcatgccccttatgtccagggctacacacgtgctacaatggttggtacaaagagaagcaagaccgtgaggtggagcaaatctcataaaaccaatctcagttcggattgtaggctgaaactcgcctacatgaagctggagttactagtaatcgcgaatcagaatgtcgcggtgaatgcgttcccgggccttgtacacaccgcccgtcacaccatgagagttggtaacacccgaagtccgtgaggtaaccgcaaggagccagcggccgaaggtgggatcgatgattggggtgaagtcgtaacaaggtagccgtaggagaacctgcggctggatcacctcctttctga

SEQ ID NO: 603 - DNA, 1387 bp, Clostridium magnum
  modified_base (816)..(816): a, c, t, g, unknown or other
ggacgggtgagtaacacgtgggtaacctgcctcaaagagggggatagcctcccgaaagggagattaataccgcataacattagtttttcgcatgaagaactaattaaaggagtaatccgctttgagatggacccgcggcgcattagctagttggtgaggtaaaggctcaccaaggcgacgatgcgtagccgacctgagagggtgatcggccacattggaactgagacacggtccagactcctacgggaggcagcagtggggaatattgcacaatgggcgaaagcctgatgcagcaacgccgcgtgagtgatgaaggccttcgggttgtaaagctctgtcttttgggacgataatgacggtaccaaaggaggaagccacggctaactacgtgccagcagccgcggtaatacgtaggtggcgagcgttgtccggatttactgggcgtaaaggtagcgtaggcggatatttaagtgagatgtgaaatacccgagcttaacttgggtagctgcatttcaaactggatatctagagtgcgggagaggagaatggaattcctagtgtagcggtgaaatgcgtagagattaggaagaacaccagtggcgaaggcgattctctggaccgtaactgacgctgaggcatgaaagcgtgggtagcaaacaggattagataccctggtagtccacgccgtaaacgatgagtactaggtgtaggagggtccaaccttctgtgccgcagttaacacaataagtactccgcctgggaagtacgatcgcaagattaaaactcaaaggaattgacgggggcccgcacaagcanggacatgtggtttaattcgaagcaacgcgaagaaccttacctggacttgacatcccctgaatagtgcagagatgcatgaagcttcgggcaggagacaggtggtgcatggttgtcgtcagctcgtgtcgtgagatgttaggttaagtcctgcaacgagcgcaacccctatcattagttgctaccattaagttgagcactctagtgagactgcccgggttaaccgggaggaaggtggggatgacgtcaaatcatcatgccccttatgccagggctacacacgtgctacaatggtaggtacagagagatgcaagaccgcgaggtggagcaaaactcaaaaacctatcccagttcggattgtaggctgcaactcgcctacatgaagccggagttgctagtaatcgcgaatcagaatgtcgcggtgaatacgttcccgggccttgtacacaccgcccgtcacaccatgagagctggcaacacccgaagtccgtgaggtaaccgtgaaaggagccagcggaaaggtggggttagtgattggggtgaagtcgtaacaaggtagccgtaggactcgctg

SEQ ID NO: 604 - DNA, 1498 bp, Clostridium malenominatum
gtttgatcctggctcaggacgaacgctggcggcgtgcctaacacatgcaagtcgagcgatgatatcccttcggggattgattagcggcggacgggtgagtaacacgtgggtaacctgcctcaaagagggggatagccctccgaaaggaggattaataccgcataaagttgagagttcgcatgaacattcaaccaaaggagcaatccgctttgagatggacccgcgtcccattagctagttggtgaggtaatagctcaccaaggcgacgatgggtagccgacctgagagggtgatcggccacattggaactgagatacggtccagactcctacgggaggcagcagtggggaatattgcgcaatgggggaaaccctgacgcagcaacgccgcgtgggcgacgaaggtcttcggattgtaaagccctgtcttctgggacgataatgacggtaccagaggaggaagccacggctaactacgtgccagcagccgcggtaatacgtaggtggcaagcgttgtccggaattactgggcgtaaagggtgcgtaggcggatatttaagtgggatgtgaaatacctgagctcaactcgggtgctgcattccaaactggatatctagagtgcaggagaggagaatggaattcctagtgtagcggtgaaatgcgtagagattaggaagaacaccagtggcgaaggcgattctctggactgtaactgacgctgaggcacgaaagcgtgggtagcaaacaggattagataccctggtagtccacgccgtaaactatgaatactaggtgtaggggggaacctccctctgtgccgcagttaacacaataagtattccgcctggggagtacggtcgcaagactaaaactcaaaggaattgacgggggcccgcacaagcagcggagcatgtggtttaattcgaagcaacgcgaagaaccttacctgaacttgacatcccctgcattactcgtaatggaggaaatcccttcggggacagggagacaggtggtgcatggttgtcgtcagctcgtgtcgtgagatgttgggttaagtcccgcaacgagcgcaacccttattattagttgctaccattaagttgagcactctaatgagactgcccgggttaaccgggaggaaggtggggatgacgtcaaatcatcatgccccttatgttcagggctacacacgtgctacaatggtgagaacaacgagacgcaagaccgcaaggtggagcaaacctcaaaaactcatcccagttcggattgtaggctgaaactcgcctacatgaagccggagttgctagtaatcgcgaatcagcatgtcgcggtgaatacgttcccgggccttgtacacaccgcccgtcacaccatgagagttggcaacacccgaagtccgtgaggtaaccgtaaggagccagcggccgaaggtggggtcaatgattggggtgaagtcgtaacaaggtagccgtaggagaacctgcggctggatcacctcc

SEQ ID NO: 605 - DNA, 1347 bp, Clostridium mayombei
tcgagcgattctcttcggagaagagcggcggacgggtgagtaacgcgtgggtaacctgcctcatacacatggataacataccgaaaggtatgctaatacaggataacataagagattcgcatgtttctcttatcaaagctccggcggtatgagatggacccgcgtctgattagctagttggtaaggtaatggcttaccaaggcgacgatcagtagccgacctgagagggtgatcggccacattggaactgagacacggtccaaactcctacgggaggcagcagtggggaatattgcacaatgggcgaaagcctgatgcagcaacgccgcgtgagtgatgaaggccttcgggtcgtaaaactctgtcctcaaggaagataatgacggtacttgaggaggaagccccggctaactacgtgccagcagccgcggtaatacgtagggggctagcgttatccggatttactgggcgtaaagggtgcgtaggtggtttcttaagtcaggagtgaaaggtacggcttaaccgtagtaagctcttgaaactgggaaacttgagtgcaggagaggaaagtggaattcctagtgtagcggtgaaatgcgtagatattaggaggaacaccagtagcgaaggcggctttctggactgtaactgacactgaggcacgaaagcgtggggagcaaacaggattagataccctggtagtccacgccgtaaacgatgagtactaggtgtcgggggttacccccctcggtgccgcagctaacgcattaagtactccgcctggggagtacgctcgcaagagtgaaactcaaaggaattgacggggacccgcacaagtagcggagcatgtggtttaattcgaagcaacgcgaagaaccttacctaagcttgacatccttttgaccgatgcctaatcgcatttttcccttcggggacagaagtgacaggtggtgcatggatgtcgtcagctcgtgtcgtgagatgttgggttaagtcccgcaacgagcgcaacccttgcctttagttgccagcattaagttgggcactctagagggactgccagggataacctggaggaaggtggggatgacgtcaaatcatcatgccccttatgcttagggctacacacgtgctacaatgggtggtacagagggcagccaagtcgtgaggccgagctaatcccttaaagccattctcagttcggattgtaggctgaaactcgcctacatgaagctggagttactagtaatcgcagatcagaatgctgcggtgaatgcgttcccgggtcttgtacacaccgcccgtcacaccacggaagttgggggcgcccgaagcctacttagctaa

SEQ ID NO: 606 - DNA, 1363 bp, Clostridium methylpentosum
ttgttttggtgaagcccttcggggtggaaccggctcaacttagtggcggacgggtgagtaacacgtgagcaacctgccttacagaggggaataacgtttggaaacgaacgctaataccgcataacataacgggatcgcatgattttgttatcaaagattttatcgctgtaagatgggctcgcgtctgattagatagttggtgaggtaatggctcaccaagtcgacgatcagtagccggactgagaggttgaacggccacattgggactgagacacggcccagactcctacgggaggcagcagtggggaatattgcacaatgggggaaaccctgatgcagcgacgccgcgtgaaggaagaaggccttcgggttgtaaacttctgtcttcagggacgataatgacggacctgggggaagctccggctaactacgtgccagcagccgcggtaatacgtagggagcgagcgttgtccggaattactgggtgtaaagggagcgtaggcgggattgcaagttgaatgtgaaatctatgggcttaacccataaactgcgttcaaaactgcagttcttgagtgaagtagaggcaggcggaattcctagtgtagcggtgaaatgcgtagatattaggaggaacaccagtggcgaaggcggcctgctgggctttaactgacgctgaggctcgaaagcgtgggtagcaaacaggattagataccctggtagtccacgctgtaaacgatgattactaggtgtaggggggtcaaccttctgtgccggagttaacacaataagtaatccacctggggagtacgaccgcaaggttgaaactcaaaggaattgacgggggcccgcacaagcagtggagtatgtggtttaattcgaagcaacgcgaagaaccttaccaggtcttgacatccaactaacgaagtagagatacattagacgcccttcggggaaagttgagacaggtggagcatgggcgtcgtcagctcgtgtcgtgagatgttgggttaagtcccgcaacgagcgcaacccttacatttagttgctacgcaagagcactctagatggactgccgttgacaaaacggaggaaggtggggatgacgtcaaatcatcatgccccttatgacctgggctacacacgtactacaatggctattaacagagggaagcaatactgtgaagtggagcaaacccctaaaaatagtctcagttcggattgtaggctgcaactcgcctacatgaagccggaattgctagtaatcgcggatcagcatgccgcggtgaatacgttcccgggccttgtacacaccgcccgtcacaccatgagagttggcaacacccgaagtcagtagtctaaccgc

SEQ ID NO: 607 - DNA, 1392 bp, Clostridium nexile
tcgaacgaagcgcttaaatggatttcttcggattgaagtttttgtgactgagtggcggacgggtgagtaacgcgtgggtaacttgcctcatacagggggataacagttagaaatgactgctaataccgcataagcgcacagtgctgcatggcacagtgtgaaaaactccggtggtatgagatggacccgcgtctgattagctagttggtggggtaacggcctaccaaggcgacgatcagtagccggcctgagagggtgaacggccacattgggactgagacacggcccaaactcctacgggaggcagcagtggggaatattgcacaatgggggaaaccctgatgcagcgacgccgcgtgagcgaagaagtatttcggtatgtaaagctctatcagcagggaagaaaatgacggtacctgactaagaagcaccggctaaatacgtgccagcagccgcggtaatacgtatggtgcaagcgttatccggatttactgggtgtaaagggagcgtagacggttgtgtaagtctgatgtgaaagcccggggctcaaccccgggactgcattggaaactatgtaactagagtgtcggagaggtaagcggaattcctagtgtagcggtgaaatgcgtagatattaggaggaacaccagtggcgaaggcggcttactggacgatcactgacgttgaggctcgaaagcgtggggagcaaacaggattagataccctggtagtccacgccgtaaacgatgactactaggtgtcggggagcaaagctcttcggtgccgcagcaaacgcaataagtagtccacctggggagtacgttcgcaagaatgaaactcaaaggaattgacggggacccgcacaagcggtggagcatgtggtttaattcgaagcaacgcgaagaaccttacctggtcttgacatcccggtgaccggcaagtaatgttgcctttccttcgggacaccggtgacaggtggtgcatggttgtcgtcagctcgtgtcgtgagatgttgggttaagtcccgcaacgagcgcaacccctatcttcagtagccagcatttaaggtgggcactctggagagactgccagggataacctggaggaaggtggggatgacgtcaaatcatcatgccccttatgaccagggctacacacgtgctacaatggcgtaaacaaagggaagcgaacctgtgaggggaagcaaatctcaaaaataacgtctcagttcggattgtagtctgcaactcgactacatgaagctggaatcgctagtaatcgcgaatcagcatgtcgcggtgaatacgttcccgggtcttgtacacaccgcccgtcacaccatgggagtcagtaacgcccgaagtcagtgacccaaccgtaaggagggagctg

SEQ ID NO: 608 - DNA, 1493 bp, Clostridium novyi
gagagtttgatcctggctcaggacgaacgctggcggcgtgcctaacacatgcaagtcgagcgatgaagcttccttcgggaagtggattagcggcggacgggtgagtaacacgtgggtaacctgcctcaaagagtgggatagcctcccgaaagggagattaataccgcataacattattttacggcatcgtagaataatcaaaggagcaatccgctttgagatggacccgcggcgcattagctagttggtgaggtaacggctcaccaaggcaacgatgcgtagccgacctgagagggtgatcggccacattggaactgagacacggtccagactcctacgggaggcagcagtggggaatattgcgcaatgggggaaaccctgacgcagcaacgccgcgtgagtgatgaaggttttcggatcgtaaaactctgtcattagggacgataatgacggtacctaatgaggaagccacggctaactacgtgccagcagccgcggtaatacgtaggtggcaagcgttgtccggatttactgggcgtaaagagtatgtaggtgggcatttaagtcagatgtgaaattcccgggcttaacctgggagctgcatttgatactgggtgtctagagtgcaggagaggaaagtggaattcctagtgtagcggtgaaatgcgtagagattaggaagaacaccagtggcgaaggcgactttctggactgtaactgacactgagatacgaaagcgtgggtagcaaacaggattagataccctggtagtccacgccgtaaacgatgaatactaggtgtcggggggtaccaccctcggtgccgcagcaaacgcattaagtattccgcctggggagtacggtcgcaagattaaaactcaaaggaattgacggggacccgcacaagcagcggagcatgtggtttaattcgaagcaacgcgaagaaccttacctagacttgacatctcctgaattactcgtaactgaggaagtcccttcggggacaggaagacaggtggtgcatggttgtcgtcagctcgtgtcgtgagatgttgggttaagtcccgcaacgagcgcaacccttattgttagttgctactattaagttaagcactctaacgagactgccgcggttaacgtggaggaaggtggggatgacgtcaaatcatcatgccccttatgtctagggctacacacgtgctacaatggctggtacaacgagcagcaatcccgcgagggggagcaaaacttgaaagccagtcccagttcggattgtaggctgaaactcgcctacatgaagttggagttgctagtaatcgcgaatcagcatgtcgcggtgaatacgttcccgggtcttgtacacaccgcccgtcacaccatgagagccggtaacacccgaagcccgtgaggtaaccgtaaggagccagcggtcgaaggtgggattggtgattggggtgaagtcgtaacaaggtagccgtaggagaacctgcggct

SEQ ID NO: 609 - DNA, 1391 bp, Clostridium orbiscindens
  modified_base (16)..(16): a, c, t, g, unknown or other
tcgaacggggtgctcntgacggaggattcgtccaacggattgagttacctagtggcggacgggtgagtaacgcgtgaggaacctgccttggagaggggaataacactccgaaaggagtgctaataccgcatgatgcagttgggtcgcatggctctgactgccaaagatttatcgctctgagatggcctcgcgtctgattagctagtaggcggggtaacggcccacctaggcgacgatcagtagccggactgagaggttgaccggccacattgggactgagacacggcccagactcctacgggaggcagcagtggggaatattgggcaatgggcgcaagcctgacccagcaacgccgcgtgaaggaagaaggctttcgggttgtaaacttcttttgtcggggacgaaacaaatgacggtacccgacgaataagccacggctaactacgtgccagcagccgcggtaatacgtaggtggcaagcgttatccggatttactgggtgtaaagggcgtgtaggcgggattgcaagtcagatgtgaaaactgggggctcaacctccagcctgcatttgaaactgtagttcttgagtgctggagaggcaatcggaattccgtgtgtagcggtgaaatgcgtagatatacggaggaacaccagtggcgaaggcggattgctggacagtaactgacgctgaggcgcgaaagcgtggggagcaaacaggattagataccctggtagtccacgccgtaaacgatggatactaggtgtggggggtctgaccccctccgtgccgcagttaacacaataagtatcccacctggggagtacgatcgcaaggttgaaactcaaaggaattgacgggggcccgcacaagcggtggagtatgtggtttaattcgaagcaacgcgaagaaccttaccaggtgtgtgtaaccggcgagtgaagcagagatgcattaggtgcccttcggggaaagtggagacaggtggtgcatggttgtcgtcagctcgtgtcgtgagatgttgggttaagtcccgcaacgagcgcaacccttattgttagttgctacgcaagagcactctagcgagactgccgttgacaaaacggaggaaggtggggacgacgtcaaatcatcatgccccttatgtcctgggccacacacgtactacaatggtggttaacagagggaggcaataccgcgaggtggagcaaatccctaaaagccatcccagttcggattgcaggctgaaacccgcctgtatgaagttggaatcgctagtaatcgcggatcagcatgccgcggtgaatacgttcccgggccttgtacacaccgcccgtcacaccatgagagtcgggaacacccgaagtccgtagcctaaccgcaaggagggcgc

SEQ ID NO: 610 - DNA, 1342 bp, Clostridium oroticum
cggattgaaagagtgttgcgactgagcggcggacgggtgagtaacgcgtgggtaacctgcctcatacagggggataacagttagaaatgactgctaataccgtataagaccacggtgccgcatggcacagtggtaaaaactccggtggtatgagatggacccgcgtctgattagctagttggtagggtaacggcttaccaaggcgacgatcagtagccgacctgagagggtgaccggccacattgggactgagacacggcccaaactcctacgggaggcagcagtggggaatattgcacaatgggggaaaccctgatgcagcgacgccgcgtgaaggatgaagtatttcggtatgtaaacttctatcagcagggaagaaaatgacggtacctgactaagaagccccggctaactacgtgccagcagccgcggtaatacgggggagcgcggatttactgggtgtaaagggagcgtagacggtgatgcaagttgatgtgaaaacccggggctcaaccccgggactgcattggaaactgtgtgactagagtgtcggagaggtaagtggaattcctagtgtagcggtgaaatgcgtagatattaggaggaacaccagtggcgaaggcggcttactggacgatgactgacgttgaggctcgaaagcgtggggagcaaacaggattagataccctggtagtccacgccgtaaacgatgaatactaggtgtcgggtggcaaagccattcggtgccgcagcaaacgcagtaagtattccacctggggagtacgttcgcaagaatgaaactcaaaggaattgacggggacccgcacaagcggtggagcatgtggtttaattcgaagcaacgcgaagaaccttacctgctcttgacatcccgctgagctgtcaaggaagcggacatgccgttgggggtgtggagacaggtggtgcatggttgtcgtcagctcgtgtcgtgagatgttgggttaagtcccgcaacgagcgcaacccttatctttagtagccagcggtcaggccgggcactctagagagactgccagggataacctggaggaaggtggggatgacgtcaaatcatcatgccccttatgagcagggctacacacgtgctacaatggcgtaaacaaagggaggcaatactgtgaagtggagcaaatcccaaaaataacgtctcagttcggattgtagtctgcaactcgactacatgaagctggaatcgctagtaatcgcgaatcagaatgtcgcggtgaatacgttcccgggtcttgtacacaccgcccgtcacaccatgggagttggtaacgcccgaagtcagtgacccaaccgc

SEQ ID NO: 611 - DNA, 1377 bp, Clostridium paraputrificum
gtcgagcgatgaagttccttcgggaacggattagcggcggacgggtgagtaacacgtgggcaacctgccttatagaggggaatagccttccgaaaggaagattaataccgcataagattgtagcttcgcatgaagcagcaattaaaggagcaatccgctataagatgggcccgcggcgcattagctagttggtgaggtaacggctcaccaaggcgacgatgcgtagccgacctgagagggtgatcggccacattgggactgagacacggcccagactcctacgggaggcagcagtggggaatattgcacaatgggggaaaccctgatgcagcaacgccgcgtgagtgatgacggccttcgggttgtaaagctctgtctttggggacgataatgacggtacccaaggaggaagccacggctaactacgtgccagcagccgcggtaatacgtaggtggcaagcgttgtccggatttactgggcgtaaagggagcgtaggcggatttttaagtgggatgtgaaatacccgggctcaacctgggtgctgcattccaaactggaaatctagagtgcaggaggggaaagtggaattcctagtgtagcggtgaaatgcgtagagattaggaagaacaccagtggcgaaggcgactttctggactgtaactgacgctgaggctcgaaagcgtggggagcaaacaggattagataccctggtagtccacgccgtaaacgatgaatactaggtgtaggggttgtcatgacctctgtgccgccgctaacgcattaagtattccgcctggggagtacggtcgcaagattaaaactcaaaggaattgacgggggcccgcacaagtagcggagcatgtggtttaattcgaagcaacgcgaagaaccttacctagacttgacatctcctgaattaccatgtaatgtgggaagtcccttcggggacaggaagacaggtggtgcatgggtgtcgtcagctcgtgtcgtgagatgttgggttaagtcccgcaacgagcgcaacccttattgttagttgctaccatttagttgagcactctagcgagactgcccgggttaaccgggaggaaggtggggatgacgtcaaatcatcatgccccttatgtctagggctacacacgtgctacaatggccggtacaacgagatgcaataccgtgaggtggagcaaaactataaaaccggtctcagttcggattgtaggctgaaactcgcctacatgaagctggagttactagtaatcgcgaatcagaatgtcgcggtgaatacgttcccgggccttgtacacaccgcccgtcacaccatgagagttggcaatacccaaagttggtgatctaacccgtaagggaggaagcca

SEQ ID NO: 612 - DNA, 1374 bp, Clostridium perfringens
tcgagcgatgaagtttccttcgggaaacggattagcggcggacgggtgagtaacacgtgggtaacctgcctcatagagtggaatagccttccgaaaggaagattaataccgcataatgttgaaagatggcatcatcattcaaccaaaggagcaatccgctatgagatggacccgcggcgcattagctagttggtggggtaacggcctaccaaggcgacgatgcgtagccgacctgagagggtgatcggccacattgggactgagacacggcccagactcctacgggaggcagcagtggggaatattgcacaatgggggaaaccctgatgcagcaacgccgcgtgagtgatgaaggttttcggatcgtaaagctctgtctttggggaagataatgacggtacccaaggaggaagccacggctaactacgtgccagcagccgcggtaatacgtaggtggcgagcgttatccggatttactgggcgtaaagggagcgtaggcggatgattaagtgggatgtgaaatacccgggctcaacttgggtgctgcattccaaactggttatctagagtgcaggagaggagagtggaattcctagtgtagcggtgaaatgcgtagagattaggaagaacaccagtggcgaaggcgactctctggactgtaactgacgctgaggctcgaaagcgtggggagcaaacaggattagataccctggtagtccacgccgtaaacgatgaatactaggtgtgggggtttcaacacctccgtgccgccgctaacgcattaagtattccgcctggggagtacggtcgcaagattaaaactcaaaggaattgacggggacccgcacaagtagcggagcatgtggtttaattcgaagcaacgcgaagaaccttacctacacttgacatcccttgcattactcttaatcgaggaggaccattaggggggatgggaaatagccgggctcaacttgggtcagctcgtgtcgtgagatgttgggttaagtcccgcaacgagcgcaacccttgtcgttagttactaccattaagttgaggactctagcgagactgcctgggttaaccaggaggaaggtggggatgacgtcaaatcatcatgccccttatgtgtagggctacacacgtgctacaatggctggtacagagagatgcaataccgcgaggtggagccaaacttaaaaaccagtctcagttcggattgtaggctgaaactcgcctacatgaagctggagttactagtaatcgcgaatcagaatgtcgcggtgaatacgttcccgggtcttgtacacaccgcccgtcacaccatgagagttggcaatacccgaagtccgtgagctaaccgcaaggaggcagcgg

SEQ ID NO: 613 - DNA, 1523 bp, Clostridium phytofermentans
agagtttgatcctggctcaggatgaacgctggcggcgtgcttaacacatgcaagtcgaacggagtttttaaatggaagtcctcggatggaagtttagaaacttagtggcggacgggtgagtaacgcgtgggtaacctgcctcatacagggggataacagtcggaaacgattgctaaaaccgcataacatagcgaaaccgcatgattttgctatcaaatatttataggtatgagatggacccgcgtctgattagctagttggtggggtaatggcctaccaaggcgacgatcagtagccggcttgagagagtgaccggccacattgggactgagacacggcccaaactcctacgggaggcagcagtggggaatattggacaatgggggaaaccctgatccagcgacgccgcgtgagtgaagaagtatttcggtatgtaaagctctatcagcagggaagataatgacagtacctgactaagaagccccggctaactacgtgccagcagccgcggtaatacgtagggggcaagcgttatccggatttactgggtgtaaagggagcgtaggtggtaggtcaagtcagatgtgaaagcccagggctcaaccctgggactgcatttgaaactggcttactagagtgcaggagaggtaagtggaattcctagtgtagcggtgaaatgcgtagatattaggaggaacaccagtggcgaaggcggcttactggactgtaactgacactgaggctcgaaagcgtggggagcaaacaggattagataccctggtagtccacgccgtaaacgatgaatactagctgtcggggctatcatggcttcggtggcgcagctaacgcaataagtattccacctggggagtacgttcgcaagaatgaaactcaaaggaattgacggggacccgcacaagcggtggagcatgtggtttaattcgaagcaacgcgaagaaccttaccaagtcttgacatccctctgacaaccgagtaacgtcggtcttccttcgggacagaggtgacaggtggtgcatggttgtcgtcagctcgtgtcgtgagatgttgggttaagtcccgcaacgagcgcaacccctatctttagtagccagcagttcggctgggcactctagagagactgccagggataacctggaggaaggcggggatgacgtcaaatcatcatgccccttatgatttgggctacacacgtgctacaatggtgactacaaagagaagcaagcctgcgagggggagcaaatctcaaaaaggtcatcccagttcggattgtactctgcaactcgagtacatgaagctggaatcgctagtaatcgcgaatcagaatgtcgcggtgaatacgttcccgggtcttgtacacaccgcccgtcacaccatgggagtaggtaacgcccgaagtcagtgacccaaccgtaaggagggagctgccgaaggcgggatctataactggggtgaagtcgtaacaaggtagccgtatcggaaggtgcggctggatcacctccttt

SEQ ID NO: 614 - DNA, 1482 bp, Clostridium piliforme
agagtttgatcatggctcaggatgaacgctggcggcgtgcctaacacatgcaagtcgagcggggatataatagcgttaatcgctaatatattctagcggcggacgggtgagtaacgcgtgggtaacctgccctatacactgggataacatcgagaaatcggtgctaataccggataagctaacagtaaggcatcttatagttagaaaaactgaggtggtataggaggggcccgcgtctgattagctagttggtgtggtaaaagcataccaaggcgacgatcagtagccgacctgagagggtgatcggccacattggaactgagacacggtccaaactcctacgggaggcagcagtggggaatattgcacaatggggggaaccctgatgcagcaacgccgcgtgaaggaagaagtatttcggtatgtaaacttctatcgacagggaagaaaaaaatgacggtacctgaataagaagcaccggctaaatacgtgccagcagccgcggtaatacgtatggtgcaagcgttatccggatttactgggtgtaaagggtgagtaggcggttagataagtcatatgtgaaattctggggctcaactccagcgctgcataagaaactatttaactagagtacaggagaggtaagcggaattcctagtgtagcggtgaaatgcgtagatattaggaagaacaccggtggcgaaggcggcttactggactgaaactgacgctgagtcacgaaagcgtggggagcgaacaggattagataccctggtagtccacgctgtaaacgatgagtgctaggtgttgggaagaaattctcggtgccgcagcaaacgcaataagcactccacctggggagtacgaccgcaaggttgaaactcaaaggaattgacggggacccgcacaagcggtggagcatgtggtttaattcgaagcaacgcgaagaaccttacctaaacttgacataccattgacaggctacgtaaagtagctttccttcggggcaatggatacaggtggtgcatggttgtcgtcagctcgtgtcgtgagatgttgggttaagtcccgcaacgagcgcaacccctattcttagtagccagcactttgggtgggcactctaaggagactgccgtggataacacggaggaaggtggggatgacgtcaaatcatcatgccccttatgtttagggctacacacgtgctacaatggctataacaaagtgaagcgagacagtgatgtggagcaaagcacataaaagtagtcccagttcggattgtagtctgcaactcgactacatgaagttggaatcgctagtaatcgcgaatcagaatgtcgcggtgaatacgttcccgggtcttgtacacaccgcccgtcacaccatgggagttggaagcacccgaagcctgtgacctaaccgtaagggaggagcagtcgaaggtgaagccagtgactggggtgaagtcgtaacaaggtaacc

SEQ ID NO: 615 - DNA, 1487 bp, Clostridium putrefaciens
agagtttgatcctggctcaggacgaacgctggcggcgtgcttaacacatgcaagtcgagcgaagttattccttcgggaataacttagcggcggacgggtgagtaacacgtgggtaacctgcctcatagagggggatagccttccgaaaggaagattaataccccataacatagcattatcgcatgataaagttattaaaggagtaatccgctatgagatggacccgcggcgcattagctagttggtgaggtaacggctcaccaaggccacgatgcgtagccgacctgagagggtgatcggccacattgggactgagacacggcccagactcctacgggaggcagcagtggggaatattgcacaatgggcgaaagcctgatgcagcaacgccgcgtgagtgatgaaggccttcgggtcgtaaagctctgtcttcggggacgataatgacggtacccgaggaggaagccacggctaactacgtgccagcagccgcggtaatacgtaggtggcaagcgttgtccggatttactgggcgtaaagggagcgtaggcggatacttaagtgggatgtgaaatacccgggctcaacccgggtgctgcattccaaactgggtatctagagtgtgggagaggaaagtggaattcctagtgtagcggtgaaatgcgtagatattaggaagaacaccagtggcgaaggcgactttctggaccataactgacgctgaggctcgaaagcgtggggagcaaacaggattagataccctggtagtccacgccgtaaacgatggatactaggtgtgggggataccaatcctccgtgccgtcgttaacacactaagtatcccgcctggggagtacgatcgcaagattaaaactcaaaggaattgacgggggcccgcacaagcagcggagcatgtggtttaattcgaagcaacgcgaagaaccttacctagacttgacatctcctgaattacctgtaattagggaagcccttcggggcaggaagacaggtggtgcatggttgtcgtcagctcgtgtcgtgagatgttgggttaagtcccgcaacgagcgcaacccttattgttagttgctaccatttagttgagcactctagcgagactgcctgggttaaccaggaggaaggtggggatgacgtcaaatcatcatgccccttatgtctagggctacacacgtgctacaatggcgagtacaacgagacgcaataccgcgaggtggagcaaaactcaaaaaactcgtcccagttcggattgtaggctgaaactcgcctacatgaagccggagttgctagtaatcgcgaatcagaatgtcgcggtgaatacgttcccgggccttgtacacaccgcccgtcacaccatgagagttggcaatacccgaagtccgtgtgctaacgcgtaagcgaggcagcggccgaaggtagggtcagcgattggggtgaagtcgtaacaaggtagccgtagaagaacctgc

SEQ ID NO: 616 - DNA, 1477 bp, Clostridium quinii
tttatcctgactcagacgaacgcttggcggcgtgcctaacacatgcaagtcgagcgaggagattccttcgggatgatcctagcggcggacgggtgagtaacacgtgggcaacctgcctcatagagaggaatagcctcccgaaagggagattaatacctcataacattgcagtttgcatgggacagcaattaaaggagcaatccgctatgagatgggcccgcggcgcattagctagttggtgaggtaacggctcaccaaggcgacgatgcgtagccgacctgagagggtgatcggccacattgggactgagacacggcccagactcctacgggaggcagcagtggggaatattgcacaatgggggaaaccctgatgcagcaacgccgcgtgagtgatgacggccttcgggttgtaaagctctgtcttcagggacgataatgacggtacctgaggaggaagccacggctaactacgtgccagcagccgcggtaatacgtaggtggcaagcgttgtccggatttactgggcgtaaagggagcgtaggcggacttttaagtgagatgtgaaatacccgggctcaacctgggtgctgcatttcaaactggaagtctagagtgcaggagaggagagtggaattcctagtgtagcggtgaaatgcgtagagattaggaagaacaccagtggcgaaggcgactctctggactgtaactgacgctgaggctcgaaagcgtggggagcaaacaggattagataccctggtagtccacgccgtaaacgatgaatactaggtgtaggggttgtcgatgacctctgtgccgccgtaacgcattaagtattccgcctggggagtacggtcgcaagattaaaactcaaaggaattgacgggggcccgcacaagcagcggagcatgtggtttaattcgaagcaacgcgaagaaccttacctagacttgacatctcctgaattactcttaatcgaggaagtcttcagacagggaagacaggttgtgcatggttgtcgtcagctcgtgtcgtgagatgttgggttaagtcccgcaacgagcgcaacccttattgttagttgctaccatttagttgagcactctagcgagactgcccgggttaaccgggaggaaggtggggatgacgtcaaatcatcatgccccttatgtctagggctacacacgtgctacaatggcaagtacaaagagaagcaagaccgcgaggtggagcaaaactcaaaaacttgtctcagttcggattgtaggctgaaactcgcctacatgaagctggagttgctagtaatcgcgaatcagcatgtcgcggtgaatacgttcccgggccttgtacacaccgcccgtcacaccatgagagttggcaatacccaaagttggtggtctaacctgaaggaggaagccacctaaggtagggtcagcgattggggtgaagtcgtaacaaggtagccgtagagaaccttg

SEQ ID NO: 617 - DNA, 1040 bp, Clostridium ramosum
  modified_base (7)..(9): a, c, t, g, unknown or other
  modified_base (12)..(12): a, c, t, g, unknown or other
  modified_base (18)..(18): a, c, t, g, unknown or other
  modified_base (20)..(20): a, c, t, g, unknown or other
  modified_base (22)..(22): a, c, t, g, unknown or other
  modified_base (27)..(27): a, c, t, g, unknown or other
  modified_base (31)..(31): a, c, t, g, unknown or other
  modified_base (43)..(43): a, c, t, g, unknown or other
gcgtgannngangttttngntntaaantctntataaaggaagnacggcggctacaggaaatggtagccgagtgacggtactttattagaaagccacggctaactacgtgccagcagccgcggtaatacgtaggtggcaagcgttatccggaattattgggcgtaaagagggagcaggcggcagcaagggtctgtggtgaaagcctgaagcttaacttcagtaagccatagaaaccaggcagctagagtgcaggagaggatcgtggaattccatgtgtagcggtgaaatgcgtagatatatggaggaacaccagtggcgaaggcgacgatctggcctgcaactgacgctcagtcccgaaagcgtggggagcaaataggattagataccctagtagtccacgccgtaaacgatgagtactaagtgttggatgtcaaagttcagtgctgcagttaacgcaataagtactccgcctgagtagtacgttcgcaagaatgaaactcaaaggaattgacgggggcccgcacaagcggtggagcatgtggtttaattcgaagcaacgcgaagaaccttaccaggtcttgacatactcataaaggctccagagatggagagatagctatatgagatacaggtggtgcatggttgtcgtcagctcgtgtcgtgagatgttgggttaagtcccgcaacgagcgcaacccttatcgttagttaccatcattaagttggggactctagcgagactgccagtgacaagctggaggaaggcggggatgacgtcaaatcatcatgccccttatgacctgggctacacacgtgctacaatggatggtgcagagggaagcgaagccgcgaggtgaagcaaaacccataaaaccattctcagttcggattgtagtctgcaactcgactacatgaagttggaatcgctagtaatcgcgaatcagcatgtcgcggtgaatacgttctcgggccttgtacacaccgcccgtcacaccacgagagttgataacacccgaagccggtggcctaaccgcaaggaa

SEQ ID NO: 618 - DNA, 1505 bp, Clostridium rectum
gagagtttgatcctggctcaggatgaacgctgacagaatgcttaacacatgcaagtctagcttgatccttcgggtgatggtggcggacgggtgagtaacgcgtaaagaacttgccctgcagtctgggacaacatttggaaacgaatgctaataccggatattatgtgagtttcgcatgaaattcatatgaaagctatatgcgctgcaggagagctttgcgtcctattagctagttggtgaggtaacggctcaccaaggcgatgataggtagccggcctgagagggtgaacggccacaaggggactgagacacggcccttactcctacgggaggcagcagtggggaatattggacaatggaccaaaagtctgatccagcaattctgtgtgcacgatgaagttttcggaatgtaaagtgctttcagttgggacgaagtaagtgacggtaccaacagaagaagcgacggctaaatacgtgccagcagccgcggtaatacgtatgtgcaagcgttatccggatttattgggcgtaaagcgcgtcgtaggcggtttggtaagtctgatgtgaaaatgcggggctcaactccgtattgcgttggaaactgtccaaactagagtactggagaggtgggcggaactacaagtgtagaggtgaaattcgtagatatttgtaggaatgccgatggggaagccagcccactggacagatactgacgctaaagcgcgaaagcgtgggtagcaaacaggattagataccctggcctggtagtccacgccgtaaacgatgattactaggtgttgggggtcgaacctcagcgcccaagctaacgcgataagtaatccgcctggggagtacgtacgcaagtatgaaactcaaaggaattgacggggacccgcacaagcggtggagcatgtggtttaattcgacgcaacgcgaggaaccttaccagcgtttgacatcctaagaaattagcagagatgcttttgtgccttcgggggaacttagtgacaggtggtgcatggctgtcgtcagctcgtgtcgtgagatgttgggttaagtcccgcaacgagcgcaacccctttcgtatgttgccatcattaagttgggcactcatgcgatactgcctgcgatcagcaggaggaaggtggggatgacgtcaagtcatcatgccccttatacgctgggctacacacgtgctacaatgggtagtacagagagtcgcaaacctgcgagggggagctaatctcagaaaactattctcagttcggattgtactctgcaactcgagtacatgaagttggaatcgctagtaatcgcaaatcagctatgttgcggtgaatacgttctcgggtcttgtacacaccgcccgtcacaccacgagagttggttgcacctgaagtagcaggcctaaccgcaaggagggatgctccgagggtgtgattagcgattggggtgaagtcgtaacaaggtatccgtacgggaacgtgcggctggatcacctcctt

SEQ ID NO: 619 - DNA, 1326 bp, Clostridium saccharogumia
gagtttgatcctggctcaggatgaacgctggcggcgtgcctaatacatgcaagtcgaacgagtggcgaacgggtgagtaagacataagtaacctgccctttacagggggataactattggaaacgatagctaagaccgcatagtaaaactggtagaggatggacttatggcgcattagctggttggtgaggtaacggctcaccaaggcgacgatgcgtagccgacctgagagggtgaccggccacactgggactgagacacggcccagactcctacgggaggcagcagtagggaattttcggcaatggggggaaccctgaccgagcaacgccgcgtgaaggaggaaggtcttcggactgtaaacttctgttataaaggaagatgacggtactttatgaggaagccacggctaactacgtgccagcagccgcggtaatacgtaggtggcaagcgttatccggaattattgggcgtaaagagggagcaggcggcagcaagggtctgtggtgaaagactgaagcttaacttcagtaagccatagaaaccgggcagctagagtgcaggagaggatcgtggaattccatgtgtagcggtgaaatgcgtagatatatggaggaacaccagtggcgaaggcgacgatctggcctgactgacgctcagtcccgaaagcgtggggagcaaataggattagataccctagtagtccacgccgtaaacgatgagtactaagtgttgggatctcagtgctgcagttaacgcagtaagtactccgcctgagtagtacgttcgcaagaatgaaactcaaaggaattgacgggggcccgcacaagcggtggagcatgtggtttaattcgaagcaacgcgaagaaccttaccaggtcttgacatatacaggtggtgcatggttgtcgtcagctcgtgtcgtgagatgttgggttaagtcccgcaacgagcgcaacccttatcgttagttaccatcatggggactctagcgagactgccagtgacaagctggaggaaggcggggatgacgtcaaatcatcatgccccttatgacctgggctacacacgtgctacaatggatggcagagggaagcgaagccgcgaggtggagcgaaacccagccattctcagttcggatgtagtctgcaactcgactacagaagttggaatcgctagtaatcgcgaatcagcatgtcgcggtgaatacgttctcgggccttgtacacaccgcccgtcacaccatgagagttgataacacccgaagccggtgcctagggagctgtctaaggtgggattgatgattggggtgaagtcgtaacaagg

SEQ ID NO: 620 - DNA, 1519 bp, Clostridium saccharolyticum
agagttcgatcctggctcaggatgaacgctggcggcgtgcttaacacatgcaagtcgagcgaagcacttttaaggaagttttcggatggaattaaaagtgactgagcggcggacgggtgagtaacgcgtgggtaacctgcctcatacagggggataacagttggaaacgactgctaataccgcataagcacacagtgccgcatggtacggtgtgaaaaactccggtggtatgagatggacccgcgtctgattaggtagttggtgaggtaacggcccaccaagccgacgatcagtagccgacctgagagggtgaccggccacattgggactgagacacggcccaaactcctacgggaggcagcagtggggaatattggacaatgggggaaaccctgatccagcgacgccgcgtgagtgaagaagtatttcggtatgtaaagctctatcagcagggaagaaaatgacggtacctgactaagaagccccggctaactacgtgccagcagccgcggtaatacgtagggggcaagcgttatccggatttactgggtgtaaagggagcgtagacggcactgcaagtctggagtgaaagcccggggctcaaccccgggactgctttggaaactgtggtgctggagtgcaggagaggtaagtggaattcctagtgtagcggtgaaatgcgtagatattaggaggaacaccagtggcgaaggcggcttactggactgtaactgacgttgaggctcgaaagcgtggggagcaaacaggattagataccctggtagtccacgccgtaaacgatgaatactaggtgttggggagcaaagctcttcggtgccgccgctaacgcaataagtattccacctggggagtacgttcgcaagaatgaaactcaaaggaattgacggggacccgcacaagcggtggagcatgtggtttaattcgaagcaacgcgaagaaccttaccaagtcttgacatcggaatgaccggtccgtaacggggccttcccttcggggcattccagacaggtggtgcatggttgtcgtcagctcgtgtcgtgagatgttgggttaagtcccgcaacgagcgcaacccttatccttagtagccagcagttcggctgggcactctggggagactgccagggataacctggaggaaggtggggatgacgtcaaatcatcatgccccttatgatttgggctacacacgtgctacaatggcgtaaacaaagggaagcaaaggagcgatctggagcaaaccccaaaaataacgtctcagttcggattgtagtctgcaactcgactacatgaagctggaatcgctagtaatcgcggatcagaatgccgcggtgaatacgttcccgggtcttgtacacaccgcccgtcacaccatgggagttggtaacgcccgaagtcagtgacccaaccgtaaggagggagctgccgaaggcgggactgataactggggtgaagtcgtaacaaggtagccgtatcggaaggtgcggctggatcacct

SEQ ID NO: 621 - DNA, 1519 bp, Clostridium sardiniense
tttaaattgagagtttgatcctggctcaggacgaacgctggcggcgtgcctaacacatgcaagtcgagcgatgaagtttccttcgggaaacggattagcggcggacgggtgagtaacacgtgggtaacctgcctcatagaggggaatagccttccgaaaggaagattaataccgcataacattgcagtttcgcatgaaacagcaattaaaggagcaatccgctatgagatggacccgcggcgcattagctagttggtaaggtaatggcttaccaaggcgacgatgcgtagccgacctgagagggtgatcggccacattgggactgagacacggcccagactcctacgggaggcagcagtggggaatattgcacaatgggggaaaccctgatgcagcaacgccgcgtgagtgatgacggtcttcggattgtaaagctctgtctttggggacgataatgacggtacccaaggaggaagccacggctaactacgtgccagcagccgcggtaatacgtaggtggcaagcgttgtccggatttactgggcgtaaagggagcgtaggcggatttttaagtgggatgtgaaatacccgggctcaacctgggtgctgcattccaaactgggaatctagagtgcaggaggggagagtggaattcctagtgtagcggtgaaatgcgtagagattaggaagaacaccagtggcgaaggcgactctctggactgtaactgacgctgaggctcgaaagcgtggggagcaaacaggattagataccctggtagtccacgccgtaaacgatgaatactaggtgtaggggtttcgatacctctgtgccgccgctaacgcattaagtattccgcctggggagtacggtcgcaagatcaaaactcaaaggaattgacgggggcccgcacaagtagcggagcatgtggtttaattcgaagcaacgcgaagaaccttacctagacttgacatcttctgcattacccttaatcggggaagtcctttcggggacagaatgacaggtggtgcatggttgtcgtcagctcgtgtcgtgagatgttgggttaagtcccgcaacgagcgcaacccctattgttagttgctaccattaagttgagcactctagcgagactgcccgggttaaccgggaggaaggtggggatgacgtcaaatcatcatgccccttatgtctagggctacacacgtgctacaatggcaagtacagagagatgcaataccgtgaggtggagctaaacttcaaaacttgtctcagttcggattgtaggctgaaactcgcctacatgaagctggagttactagtaatcgcgaatcagcatgtcgcggtgaatacgttcccgggccttgtacacaccgcccgtcacaccatgagagttggcaatacccaaagttcgtgagctaacgcgtaagcgaggcagcgacctaaggtagggtcagcgattggggtgaagtcgtaacaaggtagccgtaggagaacctgcggctggatcacctcctttct

SEQ ID NO: 622 - DNA, 1470 bp, Clostridium sartagoforme
ggctcaggacgaacgctggcggcgtgcctaacacatgcaagtcgagcgaggagattcccttcggggatgaacctagcggcggacgggtgagtaacacgtgggcaacctgccttatagaggggaatagccttccgaaaggaagattaataccgcataacattacattttcgcatgaagaagtaattaaaggagtaatccgctataagatgggcccgcggcgcattagctagttggtgaggtaacggctcaccaaggcgacgatgcgtagccgacctgagagggtgatcggccacattgggactgagacacggcccagactcctacgggaggcagcagtggggaatattgcacaatgggggaaaccctgatgcagcaacgccgcgtgagtgatgaaggtcttcggatcgtaaagctctgtcttcagggacgataatgacggtacctgaggaggaagccacggctaactacgtgccagcagccgcggtaatacgtaggtggcgagcgttgtccggatttactgggcgtaaagggagcgtaggcggatttttaagtgagatgtgaaatacccgggctcaacttgggtgctgcatttcaaactggaagtctagagtgcaggagaggagagtggaattcctagtgtagcggtgaaatgcgtagagattaggaggaacaccagtggcgaaggcgactctctggactgtaactgacgctgaggctcgaaagcgtggggagcaaacaggattagataccctggtagtccacgccgtaaacgatgaatactaggtgtaggggttgtcatgacctctgtgccgccgcaaacgcattaagtattccgcctggggagtacggtcgcaagattaaaactcaaaggaattgacgggggcccgcacaagcagcggagcatgtggtttaattcgaagcaacgcgaagaaccttacctagacttgacatctcctgaattactcttaatcgaggaagtcccttcggggacaggaagacaggtggtgcatggttgtcgtcagctcgtgtcgtgagatgttgggttaagtcccgcaacgagcgcaacccttattgttagttgctaccattaagttgagcactctagcaagactgcccgggttaaccgggaggaaggtggggatgacgtcaaatcatcatgccccttatgtctagggctacacacgtgctacaatggcaagtacaaaaagatgcaataccgcaaggtggagctaaacttaaaaacttgtctcagttcggattgtaggctgaaactcgcctacatgaagctggagttgctagtaatcgcgaatcagaatgtcgcggtgaatacgttcccgggccttgtacacaccgcccgtcacaccatgagagttggcaatacccaaagttcgtgagctaacccgtaagggaggcagcgacctaaggtagggtcagcgaatggggtgaagtcgtaacaaggtagccgtagga

SEQ ID NO: 623 - DNA, 1529 bp, Clostridium scindens
gagagtttgatcctggctcaggatgaacgctggcggcgtgcctaacacatgcaagtcgaacgaagcgcctggccccgacttcttcggaacgaggagccttgcgactgagtggcggacgggtgagtaacgcgtgggcaacctgccttgcactgggggataacagccagaaatggctgctaataccgcataagaccgaagcgccgcatggcgcggcggccaaagccccggcggtgcaagatgggcccgcgtctgattaggtagttggcggggtaacggcccaccaagccgacgatcagtagccgacctgagagggtgaccggccacattgggactgagacacggcccagactcctacgggaggcagcagtggggaatattgcacaatgggggaaaccctgatgcagcgacgccgcgtgaaggatgaagtatttcggtatgtaaacttctatcagcagggaagaagatgacggtacctgactaagaagccccggctaactacgtgccagcagccgcggtaatacgtagggggcaagcgttatccggatttactgggtgtaaagggagcgtagacggcgatgcaagccagatgtgaaagcccggggctcaaccccgggactgcatttggaactgcgtggctggagtgtcggagaggcaggcggaattcctagtgtagcggtgaaatgcgtagatattaggaggaacaccagtggcgaaggcggcctgctggacgatgactgacgttgaggctcgaaagcgtggggagcaaacaggattagataccctggtagtccacgccgtaaacgatgactactaggtgtcgggtggcaaggccattcggtgccgcagcaaacgcaataagtagtccacctggggagtacgttcgcaagaatgaaactcaaaggaattgacggggacccgcacaagcggtggagcatgtggtttaattcgaagcaacgcgaagaaccttacctgatcttgacatcccgatgccaaagcgcgtaacgcgctctttcttcggaacatcggtgacaggtggtgcatggttgtcgtcagctcgtgtcgtgagatgttgggttaagtcccgcaacgagcgcaacccctatcttcagtagccagcattttggatgggcactctggagagactgccagggagaacctggaggaaggtggggatgacgtcaaatcatcatgccccttatgaccagggctacacacgtgctacaatggcgtaaacaaagggaggcgaacccgcgagggtgggcaaatcccaaaaataacgtctcagttcggattgtagtctgcaactcgactacatgaagttggaatcgctagtaatcgcgaatcagaatgtcgcggtgaatacgttcccgggtcttgtacacaccgcccgtcacaccatgggagtcagtaacgcccgaagccggtgacccaacccgtaagggagggagccgtcgaaggtgggaccgataactggggtgaagtcgtaacaaggtagccgtatcggaaggtgcggctggatcacctccttc

SEQ ID NO: 624 - DNA, 1507 bp, Clostridium septicum
agagtttgatcatggctcaggacgaacgctggcggcgtgcctaacacatgcaagtcgagcgaggggagtttcttcggaaacaaacctagcggcggacgggtgagtaacacgtgggcaacctgccttgtagaggggaatagcctcccgaaagggagattaataccgcataacattgcagcttcgcatggagcagcaattaaaggagtaatccgctacaagatgggcccgcggcgcattagctagttggtgaggtaacggctcaccaaggcgacgatgcgtagccgacctgagagggtgatcggccacattgggactgagacacggcccagactcctacgggaggcagcagtggggaatattgcacaatgggggaaaccctgatgcagcaacgccgcgtgagtgatgaaggttttcggatcgtaaagctctgtcttcagggacgataatgacggtacctgaggaggaagccacggctaactacgtgccagcagccgcggtaatacgtaggtggcgagcgttgtccggatttactgggcgtaaagggagcgtaggcggacttttaagtgagatgtgaaatacccgggctcaacctgggggctgcatttcaaactggaagtctagagtgcaggagaggagagtggaattcctagtgtagcggtgaaatgcgtagagattaggaagaacaccagtggcgaaggcgactctctggactgtaactgacgctgaggctcgaaagcgtggggagcaaacaggattagataccctggtagtccacgccgtaaacgatggatactaggtgtgggaggtatcaactccttccgtgccgccgttaacacattaagtatcccgcctggggagtacggtcgcaagattaaaactcaaaggaattgacgggggcccgcacaagcagcggagcatgtggtttaattcgaagcaacgcgaagaaccttacctagacttgacatctcctgcattactcttaatcgaggaagtcccttcggggacaggatgacaggtggtgcatggttgtcgtcagctcgtgtcgtgagatgttgggttaagtcccgcaacgagcgcaacccttattgttagttgctaccatttagttgagcactctagcgagactgcccgggttaaccgggaggaaggtggggatgacgtcaaatcatcatgccccttatgtctagggctacacacgtgctacaatggcaagtacaacgagatgcaataccgygaggtggagctaaactataaaacttgtctcagttcggattgtaggctgaaactcgcctacatgaagctggagttgctagtaatcgcgaatcagcatgtcgcggtgaatacgttcccgggccttgtacacaccgcccgtcacaccatgagagttggcaatacccaaagttcgtgagctaaccgcaaggaggcagcgacctaaggtagggtcagcgattggggtgaagtcgtaacaaggtagccgtaggagaacctgcggctggatcacctcctt

SEQ ID NO: 625 - DNA, 1364 bp, Clostridium sordellii
  modified_base (12)..(12): a, c, t, g, unknown or other
gtcgagcgatcncttcggagagagcggcggacgggtgagtaacgcgtgggtaacctgccctgtacacacggataacataccgaaaggtatactaatacgggataacatatgaaagtcgcatggcttttgtatcaaagctccggcggtacaggatggacccgcgtctgattagctagttggtaaggtaatggcttaccaaggcaacgatcagtagccgacctgagagggtgatcggccacactggaactgagacacggtccagactcctacgggaggcagcagtggggaatattgcacaatgggcgaaagcctgatgcagcaacgccgcgtgagcgatgaaggccttcgggtcgtaaagctctgtcctcaaggaagataatgacggtacttgaggaggaagccccggctaactacgtgccagcagccgcggtaatacgtagggggctagcgttatccggaattactgggcgtaaagggtgcgtaggtggttttttaagtcagaagtgaaaggctacggctcaaccgtagtaagcttttgaaactagagaacttgagtgcaggagaggagagtagaattcctagtgtagcggtgaaatgcgtagatattaggaggaataccagtagcgaaggcggctctctggactgtaactgacactgaggcacgaaagcgtggggagcaaacaggattagataccctggtagtccacgccgtaaacgatgagtactaggtgtcgggggttacccccctcggtgccgcagctaacgcattaagtactccgcctgggaagtacgctcgcaagagtgaaactcaaaggaattgacggggacccgcacaagtagcggagcatgtggtttaattcgaagcaacgcgaagaaccttacctaagcttgacatcccactgacctctccctaatcggagatttcccttcggggacagtggtgacaggtggagcatggaagtcgtcagctcgtgtcgtgagatgttgggattagtcccgcaacgagcgcaacccttgcctttagttgccagcattaagttgggcactctagagggactgccgaggataactcggaggaaggtggggatgacgtcaaatcatcatgccccttatgcttagggctacacacgtgctacaatgggtggtacagagggttgccaagccgcgaggtggagctaatcccttaaagccattctcagttcggattgtaggctgaaactcgcctacatgaagctggagttactagtaatcgcagatcagaatgctgcggtgaatgcgttcccgggtcttgtacacaccgcccgtcacaccatggaagttgggggcgcccgaagccggttagctaaccttttaggaagcggccg

SEQ ID NO: 626 - DNA, 1378 bp, Clostridium sp.
  7_2_43FAA
tcgagcgagaggagttccttcgggaacaaatctagcggcggacgggtgagtaacacgtgggcaacctgccttgtagaggggaatagccttccgaaaggaagattaataccgcataatattacattttcgcatgaagaagtaattaaaggagcaatccgctacaagatgggcccgcggcgcattagctagttggtgaggtaacggctcaccaaggcgacgatgcgtagccgacctgagagggtgatcggccacattgggactgagacacggcccagactcctacgggaggcagcagtggggaatattgcacaatgggggaaaccctgatgcagcaacgccgcgtgagtgatgaaggtcttcggatcgtaaagctctgtcttcagggacgataatgacggtacctgaggaggaagccacggctaactacgtgccagcagccgcggtaatacgtaggtggcgagcgttgtccggatttactgggcgtaaagggagcgtaggcggatttttaagtgagatgtgaaatacccgggctcaacttgggtgctgcatttcaaactggaagtctagagtgcaggagaggagagtggaattcctagtgtagcggtgaaatgcgtagagattaggaagaacaccagtggcgaaggcgactctctggactgtaactgacgctgaggctcgaaagcgtggggagcaaacaggattagataccctggtagtccacgccgtaaacgatgaatactaggtgtaggggttgtcatgacctctgtgccgccgcaaacgcattaagtattccgcctggggagtacggtcgcaagattaaaactcaaaggaattgacgggggcccgcacaagcagcggaccatgtggtttaattcgaagcaacgcgaagaaccttacctagacttgacatctcctgcattactcttaatcgaggaagtcctttcggggacaggatgacaggtgctgcatgttaaactggaagtctagagtgcaggagtggggtgaggacctccaagtagcgcaacccttattgttagttgctaccatttagttgagcactctagcgagactgcccgggttaaccgggaggaaggtggggatgacgtcaaatcatcatgccccttatgtctagggctacacacgtgctacaatggcaagtacaaagagatgcgataccgcgaggtggagctaaactataaaacttgtctcagttcggattgtaggctgaaactcgcctacatgaagctggagttgctagtaatcgcgaatcagaatgtcgcggtgaatacgttcccgggccttgtacacaccgcccgtcacaccatgagagttggcaatacccaaagttcgtgagctaacccgtaagggaggcagcgac

SEQ ID NO: 627 - DNA, 1390 bp, Clostridium sp.
  D5
  modified_base (1252)..(1252): a, c, t, g, unknown or other
  modified_base (1302)..(1302): a, c, t, g, unknown or other
tcgagcgaagcgctttacttagatttcttcggattgaagagtgttgcgactgagcggcggacgggtgagtaacgcgtgggtaacctgcctcatacagggggataacagttagaaatgactgctaataccgcataagaccacagtaccgcatggtacagtgggaaaaactccggtggtatgagatggacccgcgtctgattagctagttggtaaggtaacggcttaccaaggcgacgatcagtagccgacctgagagggtgaccggccacattgggactgagacacggcccaaactcctacgggaggcagcagtggggaatattgcacaatgggggaaaccctgatgcagcgacgccgcgtgaaggatgaagtatttcggtatgtaaacttctatcagcagggaagaaaatgacggtacctgactaagaagccccggctaactacgtgccagcagccgcggtaatacgtagggggcaagcgttatccggatttactgggtgtaaagggagcgtagacggttatgtaagtctgatgtgaaaacccggggctcaaccccgggactgcattggaaactatgtaactagagtgtcggagaggtaagtggaattcctagtgtagcggtgaaatgcgtagatattaggaggaacaccagtggcgaaggcggcttactggacgatgactgacgttgaggctcgaaagcgtggggagcaaacaggattagataccctggtagtccacgccgtaaacgatgcatactaggtgtcgggtggcaaagccattcggtgccgcagcaaacgcaataagtatgccacctggggagtacgttcgcaagaatgaaactcaaaggaattgacggggacccgcacaagcggtggagcatgtggtttatttcaaagcaacgcgaagaatcttacctgctcttgacatccccctgaccggcgcgtaatggtgcctttccttcgggacaggggagacaggtggtgcatggttgtcgtcagctcgtgtcgtgagatgttgggttaagtcccgcaacgagcgcaacccttatctttagtagccagcggttcggccgggcactctagagagactgccagggataacctggaggaaggtggggatgacgtcaaatcatcatgccccttatgagcagggttacacacgtgctacaatggcgtaaacaaagggaggcaatcccgcgaggttgagcaaatcccaaaaataacgtttcacttcggatcgtagtgtgcaactngattacacgaagctggcattcatagtaatcgggaatcagaatgtcgcggngaatacgttcccgggtcttgtacacaccgcccgtcacaccatgggagttggtaacgcccgaagtcagtgacccaaccgtaaggaggga

SEQ ID NO: 628 - DNA, 1381 bp, Clostridium sp.
  HGF2
  modified_base (15)..(15): a, c, t, g, unknown or other
tcgaacgaagtttcnaggaagcttgcttccaaagagacttagtggcgaacgggtgagtaacacgtaggtaacctgcccatgtgtccgggataactgctggaaacggtagctaaaaccggataggtatacggagcgcatgctctgtatattaaagcgcccatcaaggcgtgaacatggatggacctgcggcgcattagctagttggtgaggtaacggcccaccaaggcgatgatgcgtagccggcctgagagggtaaacggccacattgggactgagacacggcccaaactcctacgggaggcagcagtagggaattttcgtcaatgggggaaaccctgaacgagcaatgccgcgtgagtgaagaaggtcttcggatcgtaaagctctgttgtaagtgaagaacggctcatagaggaaatgctatgggagtgacggtagcttaccagaaagccacggctaactacgtgccagcagccgcggtaatacgtaggtggcaagcgttatccggaatcattgggcgtaaagggtgcgtaggtggcgtactaagtctgtagtaaaaggcaatggctcaaccattgtaagctatggaaactggtatgctggagtgcagaagagggcgatggaattccatgtgtagcggtaaaatgcgtagatatatggaggaacaccagtggcgaaggcggtcgcctggtctgtaactgacactgaggcacgaaagcgtggggagcaaataggattagataccctagtagtccacgccgtaaacgatgagaactaagtgttggaggaattcagtgctgcagttaacgcaataagttctccgcctggggagtatgcacgcaagtgtgaaactcaaaggaattgacgggggcccgcacaagcggtggagtatgtggtttaattcgaagcaacgcgaaaaccttaccaggccttgacatggaaaccctagagatagggggataattatggatcacacaggtggtgcatggttgtcgtcagctcgtgtcgtgagatgttgggttaagtcccgcaacgagcgcaacccttgtcgcatgttaccagcatcaagttggggactcatgcgagactgccggtgacaaaccggaggaaggtggggatgacgtcaaatcatcatgccccttatggcctgggctacacacgtactacaatggcgaccacaaagagcagcgacttggtgacaagaagcgaatctcataaaggtcgtctcagttcggattgaagtctgcaactcgacttcatgaagtcggaatcgctagtaatcgcagatcagcatgctgcggtgaatacgttctcgggccttgtacacaccgcccgtcaaaccatgggagtcagtaatacccgaagccggtggcataaccgt

SEQ ID NO: 629 - DNA, 1274 bp, Clostridium sp.
  HPB-46
agtcgagcgggaaacttcggtttccagcggcggacgggtgagtaacacgtgggcaacctgcctcacaatgagggatagccttccgaaaggaagattaatacctcataacacaagagaaacgcatgtttctcttgccaaagaatttcgttgtgagatgggcccgcggcgcattagcttgttggtgaggtaacggctcaccaaggctgcgatgcgtagccgacctgagagggtgatcggccacattggaactgagacacggtccagactcctacgggaggcagcagtggggaatattgcacaatggaggaaactctgatgcagcaacgccgcgtgagtgatgaaggtcttcggattgtaaagctctgtcttctgggacgataatgacggcaccagaggaggaagccacggctaactacgtgccagcagccgcggtaatacgtaggtggcaagcgttgtccggatttactgggcgtaaaggatgtgtaggcggatatttaagtgagatgtgaaatccccaggctcaacttgggggctgcatttcaaactggatatctagagtgcaggagaggaaagcggaattcctagtgtagcggtgaaatgcgtagagattaggaagaacatcagtggcgaaggcggctttctggactgtaactgacgctgaggcatgaaagcgtggggagcaaacaggattagataccctggtagtccacgccgtaaacgatgaatactaggtgtaggaggtatcgactccttctgtgccgcagttaacacaataagtattccgcctggggagtacggtcgcaagattaaaactcaaaggaattgacgggggcccgcacaagcagcggagcatgtggtttaattcgaagcaacgcgaagaaccttacccagacttgacatctcctgaattaatcgtaattgatgaaatcccttcggggacaggaagacaggtggtgcatggttgtcgtcagctcgtgtcgtgagatgttgggttaagtcccgcaacgagcgcaacccttatcattagttgctaacattaagttgagcactctagtgagactgcccgggttaaccgggaggaaggtggggatgacgtcaaatcatcatgccccttatgtctggggctacacacgtgctacaatggtgggaacaaagagatgcaataccgcaaggtggagccaaacttcaagacccatcccagttcggattgtaggctgaaactcgcctacatgaagctggagtgtagtaatcgcgaatcagagtgtagcggtgaa

SEQ ID NO: 630 - DNA, 1358 bp, Clostridium sp.
  JC122
cgatgaagctccttcgggagtgaattagcggcggacgggtgagtaacacgtgggtaacctgcctcatagaggggaatagccttccgaaagggagattaataccgcataacatagcactaccgcatggtagagttatcaaaggagcaatccgctatgagatggacccgcggcgcattagctagttggtgaggtaacggctcaccaaggcgacgatgcgtagccgacctgagagggtgatcggccacattggaactgagacacggtccagactcctacgggaggcagcagtggggaatattgcgcaatgggggaaaccctgacgcagcaacgccgcgtgagtgaagaaggccttagggttgtaaagctctgtcatatgggaagataatgacggtaccataagaggaagccacggctaactacgtgccagcagccgcggtaatacgtaggtggcgagcgttgtccggatttactgggcgtaaaggatgcgtaggcggatatttaagtgggatgtgaaatccccgagcttaactcgggggctgcattccaaactggatatctagagtgtcggaggggaaagtggaattcctagtgtagcggtgaaatgcgtagagattaggaagaacaccagtggcgaaggcgactttctggacgataactgacgctgaggcatgaaagcgtggggagcaaacaggattagataccctggtagtccacgccgtaaacgatgaatactaggtgtaggaggtatcgactccttctgtgccgcagttaacacattaagtattccgcctggggagtacgatcgcaagattaaaactcaaaggaattgacgggggcccgcacaagcagcggagcatgtggtttaattcgaagcaacgcgaagaaccttacctagacttgacatctcctgcattactcttaacagaggaagtccttcgggacaggatgacaggtggtgcatggttgtcgtcagctcgtgtcgtgagatgttgggttaagtcccgcaacgagcgcaacccttatcattagttgctaccattaagttgagcactctagtgagactgcccgggttaaccgggaggaaggtggggatgacgtcaaatcatcatgccccttatgtctagggctacacacgtgctacaatggtaggtacaacaagatgcaataccgtgaggtggagctaaactcaaaaacctatcccagttcggattgtaggctgaaactcgcctacatgaagccggagttgctagtaatcgcgaatcagcatgtcgcggtgaatacgttcccgggccttgtacacaccgcccgtcacaccatgagagccgataacacccgaagtccgtgaggtaaccgtaagg

SEQ ID NO: 631 - DNA, 1345 bp, Clostridium sp.
  L2-50
cttgcactgatccgatcgagtggcggacgggtgagtaacgcgtgggtaacctgcctcatacaggggaataacagttggaaacggctgctaaaaccgcataagcgcacagtatcgcatgatacagtgtgaaaaactccggtggtatgagatggacccgcgtctgattagctagttggtgaggtaacggcccaccaaggcaacgatcagtagccggcctgagagggtgaacggccacattgggactgagacacggcccaaactcctacgggaggcagcagtggggaatattgcacaatgggggaaaccctgatgcagcgacgccgcgtgagtgatgaagtatttcggtatgtaaagctctatcagcagggaagataatgacggtacctgactaagaagcaccggctaaatacgtgccagcagccgcggtaatacgtatggtgcaagcgttatccggatttactgggtgtaaagggtgcgtaggtggtgagacaagtctgaagtgaaaatccggggcttaaccccggaactgctttggaaactgcctgactagagtacaggagaggtaagtggaattcctagtgtagcggtgaaatgcgtagatattaggaggaacaccagtggcgaaggcgacttactggactgctactgacactgaggcacgaaagcgtggggagcaaacaggattagataccctggtagtccacgccgtaaacgatgaatactaggtgtcggggcccaaagggcttcggtgccgcagggacgcaataagtattccacctggggagtacgttcgcaagaatgaaactcaaaggaattgacggggacccgcacaagcggtggagcatgtggtttaattcgaagcaacgcgaagaaccttaccaagtcttgacatcctgctgaccgttccttaaccggaattttccttcgggacagcagagacaggtggggcatggttgtcgtcagctcgtgtcgtgagatgttgggttaagtcccgcaacgagcgcaacccctatttccagtagccagcagtcagatgggcactctggagagactgccggggataacccggaggaaggtggggatgacgtcaaatcatcatgccccttatgatttgggctacacacgtgctacaatggcagttacaaagagaagcgaaactgtgaagtggagcaaacctcaaaaaggctgtctcagttcggattgtagtctgcaactcgactacatgaagctggaatcgctagtaatcgcagatcagaatgctgcggtgaatacgttcccgggtcttgtacacaccgcccgtcacaccatgggagtcggaaacgcccgaagtcagtgacccaaccgc

SEQ ID NO: 632 - DNA, 1464 bp, Clostridium sp.
  LMG 16094
gacgaacgctggcggcgtgcctaacacatgcaagtcgagcgaggggagttcttcggaacaaacctagcggcggacgggtgagtaacacgtgggcaacctgcctcaaagaggggaatagcctcccgaaagggagattaataccgcataaagttattttttcgcatgaagagataaccaaaggagcaatccgctttgagatgggcccgcggcgcattagctagttggtgaggtaacggctcaccaaggcgacgatgcgtagccgacctgagagggtgatcggccacattggaactgagacacggtccagactcctacgggaggcagcagtggggaatattgcgcaatgggggaaaccctgacgcagcaacgccgcgtgagcgatgaaggtcttcggattgtaaagctctgtcttttgggacgataatgacggtaccaaaggaggaagccacggctaactacgtgccagcagccgcggtaatacgtaggtggcaagcgttgtccggatttactgggcgtaaagagtatgtaggcggacatttaagtcagatgtgaaattcccgggcttaacctgggagctgcatttgatactgggtgtctagagtgcaggagaggaaagtggaattcctagtgtagcggtgaaatgcgtagagattaggaagaacaccagtggcgaaggcgactttctggactgtaactgacgctgagatacgaaagcgtggggagcaaacaggattagataccctggtagtccacgccgtaaacgatgaatactaggtgtcggagggtaccaccttcggtgccgcagcaaacgcaataagtattccgcctggggagtacggtcgcaagattaaaactcaaaggaattgacggggacccgcacaagcagcggagcatgtggtttaattcgaagcaacgcgaagaaccttacctagacttgacatctcctgaattactcgtaacagaggaagcccttcggggcaggaagacaggtggtgcatggttgtcgtcagctcgtgtcgtgagatgttgggttaagtcccgcaacgagcgcaacccctattgttagttgctaccattaagttgagcactctagcaagactgcctgggttaaccaggaggaaggtggggatgacgtcaaatcatcatgscccttatgtctagggctacacacgtgctacaatggtcggtacaaaaagatgcaaacccgtgagggggagctaaacttaaaaaccgatcccagttcggattgtaggctgaaactcgcctacatgaagttggagttgctagtaatcgcgaatcagcatgtcgcggtgaatacgttcccgggtcttgtacacaccgcccgtcacaccatgagagccggtaacacccgaagcccgtgaggtaaccgwaaggagccagcggtcgaaggtgggattggtgattggggtgaagtcgtaacaaggtagccgtaggagaacctgc

SEQ ID NO: 633 - DNA, 1045 bp, Clostridium sp.
  M62/1
  modified_base (967)..(968): a, c, t, g, unknown or other
  modified_base (977)..(977): a, c, t, g, unknown or other
  modified_base (984)..(985): a, c, t, g, unknown or other
  modified_base (1010)..(1010): a, c, t, g, unknown or other
  modified_base (1014)..(1015): a, c, t, g, unknown or other
aacgaagcggtttagcggaagttttcggatggaagttaaactgactgagtggcggacgggtgagtaacgcgtgggtaacctgcctcacacagggggacaacagctagaaatggctgctaataccgcataagcgcacagcttcgcatgaagcagtgtgaaaaactccggtggtgtgagatggacccgcgtctgattagctggttggtgaggtaacggctcaccaaggcgacgatcagtagccgacctgagagggtgaccggccacattgggactgagacacggcccaaactcctacgggaggcagcagtggggaatattgcacaatgggggaaaccctgatgcagcgacgccgcgtgagtgaagaagtatttcggtatgtaaagctctatcagcagggaagagaatgacggtacctgactaagaagccccggctaactacgtgccagcagccgcggtaatacgtagggggcaagcgttatccggatttactgggtgtaaagggagcgtagacggcttagcaagtctgaagtgaaagcccggggctcaaccccgggactgctttggaaactgttaagctggagtgctggagaggtaagcggaattcctagtgtagcggtgaaatgcgtagatattaggaggaacaccagtggcgaaggcggcttactggacagtaactgacgttgaggctcgaaagcgtggggagcaaacaggattagataccctggtagtccacgccgtaaacgatgaatactaggtgttggtgggcaaagcccatcggtgccgtcgcaaacgcaataagtattccacctggggagtacgttcgcaagaatgaaactcaaaggaattgacggggacccgcacaagcggtggagcatgtggtttaattcgaagcaacgcgaagaaccttaccaagtcttgacatcccactgaccggacagtaatgtgtccttctcttcggagcagtggnnacaggtggngcatggnngtcgtcagctcgtgtcgtgagatgntggnnaagtcccgcaacgagcgcaacccttatcct

SEQ ID NO: 634 - DNA, 935 bp, Clostridium sp.
  MLG055
  modified_base (776)..(776): a, c, t, g, unknown or other
  modified_base (890)..(891): a, c, t, g, unknown or other
  modified_base (893)..(893): a, c, t, g, unknown or other
  modified_base (895)..(895): a, c, t, g, unknown or other
  modified_base (910)..(912): a, c, t, g, unknown or other
acttagtggcgaacgggtgagtaacacgtagataacctgcctgtatgaccgggataacagttggaaacgactgctaataccggataggcagagaggaggcatctcttctctgttaaagttgggatacaacgcaaacagatggatctgcggtgcattagctagttggtgaggtaacggcccaccaaggcgatgatgcatagccggcctgagagggcgaacggccacattgggactgagacacggcccaaactcctacgggaggcagcagtagggaattttcggcaatgggggaaaccctgaccgagcaatgccgcgtgagtgaagacggccttcgggttgtaaagctctgttgtaagggaagaacggcatagagagggaatgctctatgagtgacggtaccttaccagaaagccacggctaactacgtgccagcagccgcggtaatacgtaggtggcaagcgttatccggaattattgggcgtaaagggtgcgtaggcggcgagataagtctgaggtaaaagcccgtggctcaaccacggtaagccttggaaactgtctggctggagtgcaggagaggacaatggaattccatgtgtagcggtaaaatgcgtagatatatggaggaacaccagtggcgaaggcggttgtctggcctgtaactgacgctgaagcacgaaagcgtggggagcaaataggattagataccctagtagtccacgccgtaaacgatgagaactaagtgttggggaaactcagtgctgcagttaacgcaatangttctccgcctgggggagtatgcacgcaagtgtgaaactcaaaggaattgacgggggcccgcacaagcggtggagtatgtggtttaattcgacgcaacgcgaagaaccttaccnngncntgacatggtatcaannncctagagatagggagatagttat

SEQ ID NO: 635 - DNA, 1364 bp, Clostridium sp.
  MT4 E
catgcacgtcgagcgactcttctggagagagcggcggacgggagagcacgcgagggtacctgccctgtcacacggataacactaccgaaaggtatactaatacggggactaacatactgaaagtcgcatggcttttgtatcaaagctccggcggtacaggatggacccgcgtctgattagctagttggtaaggtaatggcttaccaaggcaacgatcagtagccgaccttgagaagggtgaatcgggccactactggaaatgaagacacgggtccaagactcctactggggaggcagcagtggggaatattgcacaatgggcgaaagcctgatgcagcaacgccgcgtgagcggatgaaggccttcgggtcgtaaagctctgtcctcaaggaagataatgacgggtactttgaggaggaagccccgggctaactacgtgccagcagccgcgggtaatacggtagggggctagcgttatccgggaaattactgggcgtaaagggtgcggtaaggtggtttttttaagtcagaagtgaaaggctacggctcaaccggtagtaagctttttgaaactagagaactttgagtgcaggagaggagagtagaattcctagtgtagcggtgaaatgcgtaaatttaggaggaataccagtagcgaaggcggcttctctggacttgtaactgacactgaggccgaaagcgggggagcaacaggattagatccctggtagtcccgccgtaaacgatgagtactagggtgtcgggggttacccccctcggtgccgcagctaacgcattaagtactccgcctgggaagtacgctcgcaagagtaaactcaaaggaattgaccgggacccgcacaaagtagcggagcatgtggtttaattcgaagcaaacgcgaagaaccttacctaagcttgacatcccactgacctctccctaaatcggagatttcccttcggggccagtggtgacaggtggtgcatggttgtcgtcagctcgtgtcgtgagatgttgggttaagtcccgcaacgagcgcaacccttgcctttagttgccagcattaagttgggcactctagagggactgccgaggataactcggaggaaggtggggatgacgtcaaatcatcatgccccttatgcttagggctacaccaccgtgctacaatgggtggtacagagggttgccaagccgcgaaggtggagctaatcccttaaagccattctcagttcggattgtaggctgaaactcgcctacatgaagctggagttactagtaatcgcaatcagaatgctgcggtgatgcgttcccgggtcttgtacacaccgcccgtcacaccattggaagttggggcgccaga

SEQ ID NO: 636 - DNA, 1205 bp, Clostridium sp.
  NMBHI-1
aaagggagattaataccgcataatgtatgagaatcgcatgatttttgtaccaaaggagcaatccgctatgagatggacccgcggcgcattagctagttggtgaggtaaaggctcaccaaggcgacgatgcgtagccgacctgagagggtgatcggccacattggaactgagacacggtccagactcctacgggaggcagcagtggggaatattgcgcaatgggggaaaccctgacgcagcaacgccgcgtgaatgaagaaggccttagggttgtaaagttctgtcatatgggaagataatgacggtaccatatgaggaagccacggctaactacgtgccagcagccgcggtaatacgtaggtggcaagcgttgtccggatttactgggcgtaaaggatgcgtaggcggacatttaagtcagatgtgaaatacccgggctcaacttgggtgctgcatttgaaactgggtgtctagagtgcaggagaggaaagcggaattcctagtgtagcggtgaaatgcgtagagattaggaagaacaccagtggcgaaggcggctttctggactgtaactgacgctgaggcatgaaagcgtggggagcaaacaggattagataccctggtagtccacgccgtaaacgatgaatactaggtgtaggaggtatcgaccccttctgtgccgcagttaacacaataagtattccgcctggggagtacgatcgcaagattaaaactcaaaggaattgacgggggcccgcacaagcagcggagcatgtggtttaattcgaagcaacgcgaagaaccttacctagacttgacatcccctgaattacctgtaatgagggaagcccttcggggcagggagacaggtggtgcatggttgtcgtcagctcgtgtcgtgagatgttgggttaagtcccgcaacgagcgcaacccttatcattagttgctaccattaagttgagcactctagtgagactgcccgggttaaccgggaggaaggtggggatgacgtcaaatcatcatgccccttatgtctagggctacacacgtgctacaatggttggtacaataagatgcaataccgcgaggtggagctaaacttataaaaccaatcccagttcggattgtaggctgaaactcgcctacatgaagccgggagttgctagtaatcgcgaatcagcatgtcgcggtgaatacgttcccgg

SEQ ID NO: 637 - DNA, 1389 bp, Clostridium sp.
  NML 04A032
tcgacggggtgcctatgatagaggattcgtccaattgattaggctacctagtggcggacgggtgagtaacgcgtgagtaacctgccttggagtggggaataacagtccgaaaggactgctaataccgcatgatgcagcgaggtcgcatggccttgctgccaaagatttatcgctctgagatggactcgcgtctgattagctggttggcggggtaacggcccaccaaggcgacgatcagtagccggactgagaggttggccggccacattgggactgagacacggcccagactcctacgggaggcagcagtggggaatattgggcaatgggcgcaagcctgacccagcaacgccgcgtgaaggaagaaggctctcgggttgtaaacttcttttatcagggacgaaagaaatgacggtacctgatgaataagccacggctaactacgtgccagcagccgcggtaatacgtaggtggcaagcgttatccggatttactgggtgtaaagggcgtgtaggcgggaaagcaagtcaggcgtgaaaactatgggctcaacccatagcctgcgtttgaaactgtttttcttgagtgtcggagaggcaatcggaattccgtgtgtagcggtgaaatgcgtagatatacggaggaacaccagtggcgaaggcggattgctggacgataactgacgctgaggcgcgaaagcgtggggagcaaacaggattagataccctggtagtccacgccgtaaacgatggatactaggtgtggggggtctgaccccctccgtgccgcagttaacacaataagtatcccacctggggagtacgatcgcaaggttgaaactcaaaggaattgacgggggcccgcacaagcggtggagtatgtggtttaattcgaagcaacgcgaagaaccttaccagggcttgacatcgtactaacgaagcagacatgcattagatgcccttcggggaaagtatagacaggtggtgcatggttgtcgtcagctcgtgtcgtgagatgttgggttaagtcccgcaacgagcgcaacccctattgttagttgctacgcaagagcactctagcgagactgccgttgacaaaacggaggaaggtggggacgacgtcaaatcatcatgccccttatgtcctgggccacacacgtactacaatggcggtcaacagagggaggcaataccgcgaggtggagcaaatccctaaaagccgtcccagttcggattgcaggctgaaacccgcctgcatgaagttggaatcgctagtaatcgcggatcagcatgccgcggtgaatacgttcccgggccttgtacacaccgcccgtcacaccatgagagtcgggaacacccgaagtccgtagcctaaccgcaaggggggcgc

SEQ ID NO: 638 - DNA, 1031 bp, Clostridium sp.
  SS2/1
  modified_base (16)..(16): a, c, t, g, unknown or other
  modified_base (26)..(27): a, c, t, g, unknown or other
cgtgagtgaagaagtnttctcggtanntaaagctctatcagcagggaagaaaatgacggtacctgactaagaagccccggctaactacgtgccagcagccgcggtaatacgtagggggcaagcgttatccggaattactgggtgtaaagggtgcgtaggtggtatggcaagtcagaagtgaaaacccagggcttaactctgggactgcttttgaaactgtcagactagagtgcaggagaggtaagcggaattcctagtgtagcggtgaaatgcgtagatattaggaggaacatcagtggcgaaggcggcttactggactgaaactgacactgaggcacgaaagcgtggggagcaaacaggattagataccctggtagtccacgccgtaaacgatgaatactaggtgtcggggccgtagaggcttcggtgccgcagccaacgcagtaagtattccacctggggagtacgttcgcaagaatgaaactcaaaggaattgacggggacccgcacaagcggtggagcatgtggtttaattcgaagcaacgcgaagaaccttacctggtcttgacatccttctgaccggtccttaaccggacttttccttcgggacaggagtgacaggtggtgcatggttgtcgtcagctcgtgtcgtgagatgttgggttaagtcccgcaacgagcgcaacccctatctttagtagccagcatataaggtgggcactctagagagactgccagggataacctggaggaaggtggggacgacgtcaaatcatcatgccccttatgaccagggctacacacgtgctacaatggcgtaaacagagggaagcagcctcgtgagagtgagcaaatcccaaaaataacgtctcagttcggattgtagtctgcaactcgactacatgaagctggaatcgctagtaatcgcgaatcagaatgtcgcggtgaatacgttcccgggtcttgtacacaccgcccgtcacaccatgggagtcagtaacgcccgaagtcagtgacccaaccgtaaggag

SEQ ID NO: 639 - DNA, 1375 bp, Clostridium sp.
  SY8519
tttatggagtttgatcctggctcaggatgaacgctggcggcgtgcctaacacatgcaagtcgaacgagtggcggacgggtgagtaacgcgtggataacctgcctcaaacagggggataacagccggaaacggctgctaataccgcataagaaaaagtggtttgagatggatccgcgtctgattagttagttggcggggtaacggcccaccaaggcgacgatcagtagccggcctgagagggtgaacggccacattgggactgagacacggcccagactcctacgggaggcagcagtggggaatattgcacaatgggggaaaccctgatgcagcaacgccgcgtgagcgaagaagtatttcggtatgtaaagctctatcagcagggaagatgacggtacctgactaagaagctccggctaaatacgtgccagcagccgcggtaatacgtatggagcaagcgttatccggatttactgggtgtaaagggagcgcaggcggtggcgcaagtctgatgtgaaaacccggggcccaaccccgggactgcattggaaactgcgtgacttgagtgtcggaggggtaagtggaattcctagtgtagcggtgaaatgcgtagatattaggaggaacaccagtggcgaaggcggcttactggacgaactgacgctgaggctcgaaagcgtggggagcaaacaggattagataccctggtagtccacgccgtaaacgatgaatactaggtgttggcatgtcagtgccgcagcaaacgcattaagtattccacctggggagtacgttcgcaagaatgaaactcaaaggaattgacggggacccgcacaagcggtggagcatgtggtttaattcgaagcaacgcgaagaaccttaccaggccttgacatcgacaggtggtgcatggttgtcgtcagctcgtgtcgtgagatgttgggttaagtcccgcaacgagcgcaacccttgtgtatagtagccagcggccgggcactctatacagactgccagggacaacctggaggaaggcggggatgacgtcaaatcatcatgccccttatggcctgggcgacacacgtgctacaatggcgtacagagggaggcaaagccgcgaggtggagcgaatcccaaaacgtctcagttcggatgcaggctgcaacccgcctgcagaagctggaatcgctagtaatcgcagatcagcatgctgcggtgaatacgttcccgggtcttgtacacaccgcccgtcacaccatgggagtcggaaatgcccgaagccggtacccagggagccgtcgaaggcaggtctgataactggggtgaagtcgtaacaaggtagccgtatcggaaggtgcggctggatcacctcctttct

SEQ ID NO: 640 - DNA, 1267 bp, Clostridium sp.
  TM-40
acatgcaagtcggacgagtggcgaacgggtgagtaagacataagcaacctgcccctgtgagggggataactgctggaaacggcagctaagaccgcatagtaaattagcacagggatgggcttatgacgcattagccagctggtgaggtaacggctcaccagggcgacgatgcgtagccggcctgagagggtggacggccacactgggactgagacacggcccagactcctacgggaggcagcagtagggaattttcggcaatgggcgaaagcctgaccgagcaacgccgcgtgaaggaagaagtcattcgtgatgtaaacttctgttatgaaggaagatgacggtacttcatgaggaagccacggctaactacgtgccagcagccgcggtaatacgtaggtggcgagcgttatccggaatcattgggcgtaaagagggagcaggcggcagtgcaggtctgcggtgaaagaccggagctaaacttcggtaagccgtggaaaccgcacagctagagagcatcagaggatcgcggaattccatgtgtagcggtgaaatgcgtagatatatggaggaacaccagtggcgaaggcggcggtctggggtggctgacgctcagtcccgaaagcgtggggagcaaataggattagataccctagtagtccacgccgtaaacgatgagtgctaagtgttggggcctcagtgctggagttaacgcaataagcactccgcctgagtagtacgttcgcaagaatgaaactcaaaggaattgacgggggcccgcacaagcggtggagcatgtggtttaattcgaagcaacgcgaagaaccttaccaggtcttgacatgcacaggtggtgcatggttgtcgtcagctcgtgtcgtgagatgttgggttaagtcccgcaacgagcgcaacccctgttgccagttgccagcatggggactctggcgagactgcctctgcaaggaggaggaaggcggggatgacgtcaaatcatcatgccccttatgacctgggctacacacgtgctacaatggacggcagagggaggcgaagccgcgaggtggagcgaaacccagccgttcacagttcggatgcagtctgcaactcgactgcagaagctggaatcgctagtaatcgcgaatcagcatgtcgcggtgaatacgttctcgggccttgtacacaccgcccgtcacaccatgagagttggtaacacccgaagccggtgcccagggagctgtctaaggtgggactgatgattggggtg

SEQ ID NO: 641 - DNA, 1320 bp, Clostridium sp.
  YIT 12069
gacgaacgctggcggcgtgcctaacacatgcaagtcgaacgagtggcggacgggtgagtaacgcgtgagcaacctgcctcaaagagggggataacgtctggaaacggacgctaataccgcatgaccaaagccgctttgagatgggctcgcgtctgattagctagttggtggggtaaaggcctaccaaggcgacgatcagtagccggactgagaggttgaacggccacattgggactgagacacggcccagactcctacgggaggcagcagtgggggatattgcacaatgggggaaaccctgatgcagcaacgccgcgtgaaggaagacggttttcggattgtaaacttctgttcttagtgacgatgacggtagctaaggagaaagctccggctaactacgtgccagcagccgcggtaatacgtagggagcgagcgttgtccggaattactgggtgtaaagggagcgtaggcgggagatcaagtcagatgtgaaaactatgggctcaacccataacctgcatttgaaactgttcttcttgagtgaagtagaggcaggcggaattccgagtgtagcggtgaaatgcgtagatattcggaggaacaccagtggcgaaggcggcctgctgggcttactgacgctgaggctcgaaagcatggggagcaaacaggattagataccctggtagtccatgccgtaaacgatgattactaggtgtggggtattccgtgccggagttaacacaataagtaatccacctggggagtacggccgcaaggttgaaactcaaaggaattgacgggggcccgcacaagcagtggagtatgtggtttaattcgaagcaacgcgaagaaccttaccaggtcttgacatcgacaggtggtgcatggttgtcgtcagctcgtgtcgtgagatgttgggttaagtcccgcaacgagcgcaacccttgtcattagttgctacagcactctaatgagactgccgttgacaaaacggaggaaggtggggacgacgtcaaatcatcatgccccttatgacctgggctacacacgtactacaatggccgtcagagggaagcaatactgtgaagtggagcaaacccctacggtcccagttcagatgcaggctgcaacccgcctgcagaagtcggaattgctagtaatcgcggatcagcatgccgcggtgaatacgttcccgggccttgtacacaccgcccgtcacaccatgggagccggtaatacccgaagtcggtgtctaggacgccgccgaaggtaggattggcgactggggtgaagtcgtaacaaggtagccgtatcggaagg

SEQ ID NO: 642 - DNA, 1319 bp, Clostridium sp.
  YIT 12070
gacgaacgctgtcggcgcgcctaacacatgcaagtcgaacgagtggcggacgggtgagtaacgcgtgagtaacctgcctttcagagggggataacgtctggaaacggacgctaataccgcataaccaaagccgctgaaagatggactcgcgtccaattagctagttggtgaggtaacggcccaccaaggcgacgattggtagccggactgagaggttgaacggccacattgggactgagacacggcccagactcctacgggaggcagcagtggggaatattgcacaatgggggaaaccctgatgcagcgacgccgagtgagggaagaaggttttcggattgtaaacctctgtccttggtgaagatgacggtaaccaaggaggaagctacggctaactacgtgccagcagccgcggtaatacgtaggtagcgagcgttgtccggaattactgggtgtaaagggagcgtaggcgggattgcaagttgaatgttaaatctatgggctcaacccatagccgcgttcaaaactgcagttcttgagtgaagtagaggcaggcggaattcctagtgtagcggtgaaatgcgtaaatattaggaggaacaccagtggcgaaggcggcctgctgggcttactgacgctgaggctcgaaagcgtgggtagcaaacaggattagataccctggtagtccacgctgtaaacgatgattactaggtgtgggggcttccgtgccggagttaacacaataagtaatccacctggggagtacgaccgcaaggttgaaactcaaaggaattgacgggggcccgcacaagcagtggagtatgtggtttaattcgaagcaacgcgaagaaccttaccaggtcttgacatcgacaggtggtgcatggttgtcgtcagctcgtgtcgtgagatgttgggttaagtcccgcaacgagcgcaacccttacgtttagttgctacagcactctagacggactgccgttgacaaaacggaggaaggtggggatgacgtcaaatcatcatgccccttatgacctgggctacacacgtactacaatggctatcagagggaagcaagatggtgacatggagcaaacccctatagtctcagttcggatgcaggctgcaacccgcctgcagaagccggaattgctagtaatcgcggatcagcatgccgcggtgaatacgttcccgggccttgtacacaccgcccgtcacaccatgagagttggcaacacccgaagccgatgtctaggacgtcgtcgaaggtggggttgatgattggggtgaagtcgtaacaaggtagccgtatcggaagg

SEQ ID NO: 643 - DNA, 1522 bp, Clostridium sphenoides
  modified_base (1)..(7): a, c, t, g, unknown or other
  modified_base (1455)..(1455): a, c, t, g, unknown or other
  modified_base (1513)..(1514): a, c, t, g, unknown or other
nnnnnnngagagtttgatcctggctcaggacgaacgctggcggcgtgcttaacacatgcaagtcgagcgaagcgattcaaatgaagtttcggacggattttgaattgacttagcggcggacgggtgagtaacgcgtgggtaacctgcctcatacagggggataacagtcggaaacgactgctaataccgcataacacacagtgccgcatggtacggtgtgaaaaactccggtggtatgagatggacccgcgtctgattaggtagttggtgaggtaacggcccaccaagccgacgatcagtagccgacctgagagggtgaccggccacattgggactgagacacggcccaaactcctacgggaggcagcagtggggaatattggacaatgggggaaaccctgatccagcgacgccgcgtgagtgaagaagtatttcggtatgtaaagctctatcagcagggaagaaaatgacggtacctgactaagaagccccggctaactacgtgccagcagccgcggtaatacgtagggggcaagcgttatccggatttactgggtgtaaagggagcgtagacggcactgcaagtctggagtgaaagcccggggctcaaccccggactgctttggaaactgtggtgctagagtgcaggagaggtaagtggaattcctagtgtagcggtgaaatgcgtagatattaggaggaacaccagtggcgaaggcggcttactggactgtaactgacgttcgaggctcgaaagcgtggggagcaaacaggattagataccctggtagtccacgccgtaaacgatgaatactaggtgttggggagcaaagctcttcggtgccgccggtaacgcaataagtattccacctggggagtacgttcgcaagaatgaaactcaaaggaattgacggggaccgcacaagcggtggagcatgtggtttaattcgaagcaacgcgaagaccttaccaagtcttgacatcggaatgaccgggatgtaacgatcccttcccttcggggcatccagacaggtggtgcatggttgtcgtcagctcgtgtcgtgagatgttgggttaagtcccgcaacgagcgcaacccttatccttagtagccagcaagtcaagctgggcactctggggagactgccagggataacctggaggaaggtggggatgacgtcaaatcatcatgccccttatgatttgggctacacacgtgctacaatggcgtaaacaaagggaagcaaaggagcgatctggagcaaaccccaaaaataacgtctcagttcggattgtagtctgcaactcgactacatgaagctggaatcgctagtaatcgcggatcagaatgccgcggtgaatacgttcccgggtcttgtacacaccgcccgtcacaccatgggagttggtaacgcccgaagtcagtgacccaaccgtaaggagggagctgccgangggactgataactggggtgaagtcgtaacaaggtagccgtatcggaaggtgcggctgnntcacctcc

SEQ ID NO: 644 - DNA, 1367 bp, Clostridium spiroforme
  modified_base (41)..(42): a, c, t, g, unknown or other
agcaatgctcgagtggcgaacgggtgagtaatacataagtnncctgccctagacagggggataactgctggaaacggcagctaagaccgcataggtatggacactgcatggtgaccatattaaaagtgccaaggcactggtagaggatggacttatggcgcattagctggttggtgaggtaacggctcaccaaggcgacgatgcgtagccgacctgagagggtgaccggccacactgggactgagacacggcccagactcctacgggaggcagcagtagggaattttcggcaatggggggaaccctgaccgagcaacgccgcgtgaaggaagaaggaattcgttctgtaaacttctgttataaaggaagaacggcggatatagggaatgatatccgagtgacggtactttatgagaaagccacggctaactacgtgccagcagccgcggtaatacgtaggtggcgagcgttatccggaattattgggcgtaaagagggagcaggcggcggcagaggtctgtggtgaaagactgaagcttaacttcagtaagccatagaaaccgggctgctagagtgcaggagaggatcgtggaattccatgtgtagcggtgaaatgcgtagatatatggaggaacaccagtggcgaaggcgacggtctggcctgtaactgacgctcattcccgaaagcgtggggagcaaataggattagataccctagtagtccacgccgtaaacgatgagtactaagtgttgggagtcaaatttcagtgctgcagttaacgcaataagtactccgcctgagtagtacgttcgcaagaatgaaactcaaaggaattgacgggggcccgcacaagcggtggagcatgtggtttaattcgaagcaacgcgaagagcgttaccaggtcttgacatccggatgaagacctcataaatgagggcttcagtaagccatagaaaccgggctgctggagtccagcagctcgtgtcgtgagatgttgggttaagtcccgcaacgagcgcaacccttgtcgctagttaccatcattaagttggggactctagcgagactgccagtgacaagctggaggaaggcggggatgacgtcaaatcatcatgccccttatgacctgggctacacacgtgctacaatggatggagcagagggaagcgaagccgcgaggtgaagcaaaacccataaaaccattctcagttcggattgtagtctgcaactcgactacatgaagttggaatcgctagtaatcgcgaatcagcatgtcgcggtgaatacgttctcgggccttgtacacaccgcccgtcacaccatgagagttgataacacccgaagccggtggcctaaccgcaaggag

SEQ ID NO: 645 - DNA, 1516 bp, Clostridium sporogenes
ttaaaattgagagtttgatcctggctcaggacgaacgctggcggcgtgcttaacacatgcaagtcgagcgatgaagcttccttcgggaagtggattagcggcggacgggtgagtaacacgtgggtaacctgcctcaaagtgggggatagccttccgaaaggaagattaataccgcataacataagagaatcgcatgattttcttatcaaagatttattgctttgagatggacccgcggcgcattagctagttggtaaggtaacggcttaccaaggcaacgatgcgtagccgacctgagagggtgatcggccacattggaactgagacacggtccagactcctacgggaggcagcagtggggaatattgcgcaatgggggaaaccctgacgcagcaacgccgcgtgggtgatgaaggtcttcggattgtaaagccctgttttctgggacgataatgacggtaccagaggaggaagccacggctaactacgtgccagcagccgcggtaatacgtaggtggcgagcgttgtccggatttactgggcgtaaagggtgcgtaggcggatgtttaagtgggatgtgaaatccccgggcttaacctgggggctgcattccaaactggatatctagagtgcaggagaggaaagcggaattcctagtgtagcggtgaaatgcgtagagattaggaagaacaccagtggcgaaggcggctttctggactgtaactgacgctgaggcacgaaagcgtgggtagcaaacaggattagataccctggtagtccacgccgtaaacgatggatactaggtgtagggggtatcaactccccctgtgccgcagttaacacaataagtatcccgcctggggagtacggtcgcaagattaaaactcaaaggaattgacgggggcccgcacaagcagcggagcatgtggtttaattcgaagcaacgcgaagaaccttacctggacttgacatcccttgcatagcctagagataggtgaagcccttcggggcaaggagacaggtggtgcatggttgtcgtcagctcgtgtcgtgagatgttaggttaagtcctgcaacgagcgcaacccttgttattagttgctaccattaagttgagcactctaatgagactgcctgggtaaccaggaggaaggtggggatgacgtcaaatcatcatgccccttatgtccagggctacacacgtgctacaatggtaggtacaataagacgcaagaccgtgaggtggagcaaaacttataaaacctatctcagttcggattgtaggctgcaactcgcctacatgaagctggagttgctagtaatcgcgaatcagaatgtcgcggtgaatacgttcccgggccttgtacacaccgcccgtcacaccatgagagctggtaacacccgaagtccgtgaggtaaccgtaaggagccagcggccgaaggtgggattagtgattggggtgaagtcgtaacaaggtagccgtaggagaacctgcggctggatcacctcctttct

SEQ ID NO: 646 - DNA, 1400 bp, Clostridium sporosphaeroides
  modified_base (1)..(2): a, c, t, g, unknown or other
  modified_base (832)..(832): a, c, t, g, unknown or other
  modified_base (836)..(836): a, c, t, g, unknown or other
  modified_base (862)..(862): a, c, t, g, unknown or other
  modified_base (922)..(922): a, c, t, g, unknown or other
  modified_base (926)..(926): a, c, t, g, unknown or other
  modified_base (1141)..(1141): a, c, t, g, unknown or other
  modified_base (1169)..(1169): a, c, t, g, unknown or other
  modified_base (1272)..(1274): a, c, t, g, unknown or other
  modified_base (1278)..(1278): a, c, t, g, unknown or other
  modified_base (1293)..(1293): a, c, t, g, unknown or other
  modified_base (1375)..(1375): a, c, t, g, unknown or other
  modified_base (1380)..(1381): a, c, t, g, unknown or other
nntgaacttagcttagtggcggacgggtgagtaacgcgtgagtawcctgcctttcrgagggggatamcgttcctgaaaacaacgctaataccgcataatatattggtgtcgcatggcaccggtatcaaaggagcaatccgctgcaagatggactcgcgtccgatyagccagtkgatkgggtaaaggcccaccaaagcgacgatcggtagccgggttgagagactgaacggccacattgggactgagacacggcccagactcctacgggaggcagcagtgggggatattgcacaatggaggaaactctgatgcagcaatgccgcgtgagggaagacggtcttcggattgtaaacctctgtccttggtgaagataatgacggtagccaaggaggaagctccggctaactacgtgccagcagccgcggtaatacgtagggagcaagcgttgtccggatttactgggtgtaaagggtgcgtaggcggctctttaagtcgggcgtgaaagctgtgggcttaacccacaaattgcgttcgaaactggagggcttgagtgaagtagaggtaggcggaattcccggtgtagcggtgaaatgcgtagagatcgggaggaacaccagtggcgaaggcggcctactgggctttaactgacgctgaggcacgaaagcatgggtagcaaacaggattagataccctggtagtccatgccgtaaacgatgattactaggtgtggggggtctgaccccttccgtgccggagttaacacaataagtaatccacctggggagtacggccgcaaggttgaaactcaaaggaattgacgggggcccgcacnagcngtggagtatgtggtttaattcgaagnaacgcgaagaaccttaccaggtgttgacatccaactaacgaggcagagatgcattaggtngctncggggaaagttgagacaggtggtccatggttgtcgtcagctcgtgtcgtgagatgttgggttaagtcccgcaacgagcgcaacccttgtgattagttstacgcaagagcactctaatcagactgccgttgacaaaacggaggaaggtggggacgacgtcaaatcatcatgccccttatgacctgggctacacacgtactacaatggtcgccaacngagggaagccaagccgcgaggtggagcnaacccccaaaagcgatctcagttcggattgtaggctgcaacccgcctacatgaagttggaattgctagtaatcgcggatcagcatgccgcggcgaatacgttnnngggncttgtacacaccgcncgtcacaccatgggagccggtaatacccgaagccaatagtctaaccgcaaggaggacgttgtcgaaggtaggattggcgacnggggnnaagtcgtaacaaggtaacc

SEQ ID NO: 647 - DNA, 1518 bp, Clostridium stercorarium
tgatcctggctcaggacgaacgctggcggcgtgcctaacacatgcaagtcgaacgggatccgtgttacggaggtctttggaccgaagtggcatggtgagagtggcggacgggcgagtaacgcgtgagcaacctgccctatgctgggggataacaccgggaaaccggtgctaataccgcataagaccacagtgacgcatgtcacagtggtaaaagctgaggcggcataggatgggctcgcgtccgattagctagttggtagggtaacggcctaccaaggcgacgatcggtagccggactgagaggttggccggccgcattgggactgagacacggcccagactcctacgggaggcagcagtggggaatattgcgcaatgggggaaaccctgacgcagcgacgccgcgtggaggaagaaggcctttgggttgtaaactcctttgatcggggacgaagatgacggtacccgaagaacaagccacggctaactacgtgccagcagccgcggtaatacgtaggtggcgagcgttgtccggaattactgggtgtaaagggcgtgtaggcggggtgccaagtcaggtgtgaaataccggggcttaacctcgggggtgcatctgaaactggtgctcttgagtgccggagaggaaagcggaattcccagtgtagcggtgaaatgcgtagatattgggaggaacaccagtggcgaaggcggctttctggacggtaactgacgctgaggcgcgaaagcgtggggagcaaacaggattagataccctggtagtccacgctgtaaacgatggatactaggtgtaggaggtatcgaccccttctgtgccgtagttaacacaataagtatcccacctggggagtacggccgcaaggctgaaactcaaaggaattgacgggggcccgcacaagcagtggagcatgtggtttaattcgaagcaacgcgaagaaccttaccagggcttgacatccccctgacggatgtagagatacatcttctccgcaaggagcaggggagacaggtggtgcatggttgtcgtcagctcgtgtcgtgagatgttgggttaagtcccgcaacgagcgcaacccttgtcgttagttgccagcagtaagatgggcactctaacgagactgccggcgagaagtcggaggaaggtggggatgacgtcaaatcatcatgccccttatgtcctgggctacacacgtgctacaatggcgactacagagggaagcaaatccgcgaggaggagcaaatcccgaaaggtcgtcccagttcggattgcaggctgcaactcgcctgcatgaagccggaattgctagtaatggcaggtcagcatctgccgtgaatacgttcccgggctttgtacacaccgcccgtcacaccatgagagctggcaacacccgaagccggtagcctaaccgagaggggggcgccgtcgaaggtggggtcagtgattggggtgaagtcgtaacaaggtagccgtatcggaaggtgcggctggatcacctcctt

SEQ ID NO: 648 - DNA, 1437 bp, Clostridium sticklandii
  modified_base (47)..(49): a, c, t, g, unknown or other
  modified_base (71)..(71): a, c, t, g, unknown or other
  modified_base (90)..(90): a, c, t, g, unknown or other
  modified_base (169)..(169): a, c, t, g, unknown or other
  modified_base (309)..(309): a, c, t, g, unknown or other
  modified_base (339)..(339): a, c, t, g, unknown or other
  modified_base (346)..(346): a, c, t, g, unknown or other
  modified_base (361)..(361): a, c, t, g, unknown or other
  modified_base (426)..(426): a, c, t, g, unknown or other
  modified_base (457)..(457): a, c, t, g, unknown or other
  modified_base (480)..(480): a, c, t, g, unknown or other
  modified_base (494)..(494): a, c, t, g, unknown or other
  modified_base (511)..(511): a, c, t, g, unknown or other
  modified_base (520)..(520): a, c, t, g, unknown or other
  modified_base (568)..(569): a, c, t, g, unknown or other
  modified_base (808)..(808): a, c, t, g, unknown or other
  modified_base (811)..(811): a, c, t, g, unknown or other
  modified_base (857)..(857): a, c, t, g, unknown or other
  modified_base (1040)..(1040): a, c, t, g, unknown or other
  modified_base (1058)..(1058): a, c, t, g, unknown or other
  modified_base (1065)..(1065): a, c, t, g, unknown or other
  modified_base (1117)..(1117): a, c, t, g, unknown or other
  modified_base (1143)..(1144): a, c, t, g, unknown or other
  modified_base (1173)..(1173): a, c, t, g, unknown or other
  modified_base (1246)..(1246): a, c, t, g, unknown or other
  modified_base (1308)..(1308): a, c, t, g, unknown or other
  modified_base (1342)..(1342): a, c, t, g, unknown or other
tatttgagagtttgatcctggctcaggatgaacgctggcggcgtgcnnnacacatgcaagtcgaaaatgcnagcggcggacgggtgcgtnacacgtgggtaacctgcccctatcactgggataacacactgaaaagtgtgctaataccagataacataagcttttggcntcattagcttatcaaagaatttcggatagggatgggcccgcgtctgattagctagttggtgaggtaacggctcaccaaggcaacgatcagtagccgacctgagagggtgatcggccacactggaactgagacacggtccngactcctacgggaggcagcagtggggaatnttgcacnatgggcgaaagcctnatgcagcaacgccgcgtgagcgatgaaggccttcgggtcgtaaagctctgtcctatgggaagatnatgacggtaccataggaggaagccccggctnactacgtgccagcagccgcggtnatacgtagggggcnagcgttatccggaattnctgggcgtnaagggtgcgtaggcggtttatcaagtcaggggtgaaaggctacggctnnaccgtagtgagcctctgaaactggtgaacttgagtgtaggagaggaaagtggaattcccagtgtagcggtgaaatgcgtagatattgggaggaacaccagtggcgaaggcgactttctggactacaactgacgctgaggcacgaaagcgtggggagcaaacaggattagataccctggtagtccacgctgtaaacgatgagtactaggtgtcggctgtcaaaggtcggtgccggcgttnacncattaagtactccgcctggggagtacgctcgcaagagtgaaactcnaaggaattgacggggacccgcacaagtagcggagcatgtggtttaattcgaagcaacgcgaagaaccttacctaggcttgacatccctttgcaaagyccttaaccggrctcctyttsttcgsaaracaaaggtgacaggtggtgcatggttgtcgtcagctcgtgtcgtgagatgttgggttnagtcccgcaacgagcgcnacccctntttttagttgccatcagttaggctgggcactctagaaagactgccgaggacnactcggaggaaggtggggatgacgtnnaatcatcatgccccttatgcttagggctncacacgtgctacaatggctgttacaaagggctgcgagaccgcgaggtggagccaatcccagaaaaacagtctnagttcggattgtaggctgaaactcgcctacatgaagccggagttactagtaatcgcagatcngaatgctgcggtgaatgcgttcccgggtcttgtncacaccgcccgtcacaccatggaagttgggggcacccaaagttagttatccaaccttacgggggaggctacctaaggtgaattcaatgactgggg

SEQ ID NO: 649 - DNA, 1447 bp, Clostridium straminisolvens
  modified_base (56)..(56): a, c, t, g, unknown or other
gacgaacgctggcggcgtgcctaacacatgcaagtcgagcggagatatattgaagntttatcggatatatatcttagcggcggacgggtgagtaacgcgtgggtaacctgcctcatacagggggataacacagggaaacttgtgctaataccgcataacataacgaggcggcatcgctttgttatcaaaggagcaatccggtatgagatgggcccgcgtccgattagctagttggtgaggtaacggctcaccaaggcgacgatcggtagccgaactgagaggttgatcggccacattgggactgagacacggcccagactcctacgggaggcagcagtggggaatattgcgcaatgggggaaaccctgacgcagcaacgccgcgtgaaggaagaaggccttcgggttgtaaacttctttgattggggacgaagaaagtgactgtacccaaaaaacaagccacggctaactacgtgccagcagccgcggtaatacgtaggtggcaagcgttgtccggaattactgggtgtaaagggcgtgtaggcggggatgcaagtcagatgtgaaattccggggcttaaccccggcgctgcatctgaaactgtatctcttgagtgctggagaggaaagcggaattcctagtgtagcggtgaaatgcgtagatattaggaggaacaccagtggcgaaggcggctttctggacagtaactgacgctgaggcgcgaaagcgtggggagcaaacaggattagataccctggtagtccacgccgtaaacgatggatactaggtgtaggaggtatcgaccccttctgtgccggagttaacacaataagtatcccacctggggagtacggccgcaaggttgaaactcaaaggaattgacgggggcccgcacaagcagtggagtatgtggtttaattcgaagcaacgcgaagaaccttaccagggcttgacatcccttgaaagtcctagagataggatttctcttcggagcaaggagacaggtggtgcatggttgtcgtcagctcgtgtcgtgagatgttgggttaagtcccgcaacgagcgcaacccctgttgttagttgccatcattaagttgggcactctagcgagactgccggtgacaaatcggaggaaggtggggacgacgtcaaatcatcatgccccttatgtcctgggctacacacgtactacaatggctgttacaaagggaagctaagccgcgaggtggagcaaatccccaaaggcagccccagttcagattgcaggctgaaactcgcctgcatgaagtcggaattgctagtaatggcaggtcagcatactgccgtgaatacgttcccgggccttgtacacaccgcccgtcacaccatgagagtctgcaacacccgaagtcagtagtctaaccgcaaggaggacgctgccgaaggtggggccgatgattggggtga

SEQ ID NO: 650 - DNA, 1504 bp, Clostridium subterminale
agagggttgatcatggctcaggacgaacgctggcggcgtgcctaacacatgcaagtcgagcgatgaagcccttcggggtgaattagcggcggacgggtgagtaacacgtgggtaacctgccttatagagggggatagccttccgaaaggaagattaataccgcataatatgtttttatcgcatggtagaaacatcaaaggagcaatccgctataagatggacccgcggcgcattagctagttggtgaggtaacggcccaccaaggcgacgatgcgtagccgacctgagagggtgatcggccacattggaactgagacacggtccagactcctacgggaggcagcagtggggaatattgcgcaatgggggaaaccctgacgcagcaacgccgcgtgaatgaagaaggccttagggttgtaaagttctgttttctgggacgataatgacggtaccagaggaggaagccagggctaactacgtgccagcagccgcggtaatacgtaggtggcaagcgttgtccggatttactgggcgtaaaggatgcgtaggcggatgtttaagtgagatgtgaaatacccgagctcaacttgggtgctgcatttcaaactggatatctagagtgcaggagaggaaagcggaattcctagtgtagcggtgaaatgcgtagagattaggaagaacaccagtggcgaaggcggctttctggactgtaactgacgctgaggcatgaaagcgtggggagcaaacaggattagataccctggtagtccacgccgtaaacgatgaatactaggtgtaggaggtatcgactccttctgtgccgcagttaacacaataagtattccgcctggggagtacgatcgcaagattaaaactcaaaggaattgacgggggcccgcacaagcagcggagcatgtggtttaattcgaagcaacgcgaagaaccttacctagacttgacatctcctgaattacccttaatcggggaagcccttcggggcaggaagacaggtggtgcatggttgtcgtcagctcgtgtcgtgagatgttgggttaagtcccgcaacgagcgcaacccttatcattagttgctaccattaagttgagcactctagtgagactgccacggttaacgtggaggaaggtggggatgacgtcaaatcatcatgccccttatgtctagggctacacacgtgctacaatggtgaatacaaatagatgcaataccgcgaggtggagccaaactataaaattcatcccagttcggattgtagtctgaaactcgactacatgaagccggagttgctagtaatcgcgaatcagcatgtcgcggtgaatacgttcccgggccttgtacacaccgcccgtcacaccatgagagctggtaacacccgaagtccgtgaggtaaccgtaaggagccagcggccgaaggtgggattagtgattggggtgaagtcgtaacaaggtagccgtaggagaacctgcggttggatcaccttcctta

SEQ ID NO: 651 - DNA, 1504 bp, Clostridium sulfidigenes
tgagtttgatcctggctcaggacgaacgctggcggcgtgcctaacacatgcaagtcgagcgatgaagcccttcggggtgaattagcggcggacgggtgagtaacacgtgggtaacctgccttatagagggggatagccttccgaaaggaagattaataccgcatgaaatgtttttatcgcatggtagaaacatcaaaggagtaatccgctataagatggacccgcggcgcattagctagttggtgaggtaacggcccaccaaggcgacgatgcgtagccgacctgagagggtgatcggccacattggaactgagacacggtccagactcctacgggaggcagcagtggggaatattgcgcaatgggggaaaccctgacgcagcaacgccgcgtgaatgaagaaggccttagggttgtaaagttctgttttctgggacgataatgacggtaccagaggaggaagccacggctaactacgtgccagcagccgcggtaatacgtaggtggcaagcgttgtccggatttactgggcgtaaaggatgcgtaggcggatgtttaagtgagatgtgaaatacccgagctcaacttgggtgctgcatttcaaactggatatctagagtgcaggagaggaaagcggaattcctagtgtagcggtgaaatgcgtagagattaggaagaacaccagtggcgaaggcggctttctggactgtaactgacgctgaggcatgaaagcgtggggagcaaacaggattagataccctggtagtccacgccgtaaacgatgaatactaggtgtaggaggtatcgactccttctgtgccgcagttaacacaataagtattccgcctggggagtacgatcgcaagattaaaactcaaaggaattgacgggggcccgcacaagcagcggagcatgtggtttaattcgaagcaacgcgaagaaccttacctagacttgacatctcctgaattacccttaaccggggaaagcttcggggcaggaagacaggtggtgcatggttgtcgtcagctcgtgtcgtgagatgttgggttaagtcccgcaacgagcgcaacccttatcattagttgctaccattaagttgagcactctagtgagactgccacggttaacgtggaggaaggtggggatgacgtcaaatcatcatgccccttatgtctagggctacacacgtgctacaatggtgaatacaaatagatgcaataccgcgaggtggagccaaactataaaattcatcccagttcggattgtagtctgaaactcgactacatgaagccggagttgctagtaatcgcgaatcagcatgtcgcggtgaatacgttcccgggccttgtacacaccgcccgtcacaccatgagagctggtaacacccgaagtccgtgaggtaaccgtaaggagccagcggccgaaggtgggattagtgattggggtgaagtcgtaacaaggtagccgtaggagaacctgcggctggatcacctcctttcta

SEQ ID NO: 652 - DNA, 1384 bp, Clostridium symbiosum
gaacgaagcgatttaacggaagttttcggatggaagttgaattgactgagtggcggacgggtgagtaacgcgtgggtaacctgccttgtactgggggacaacagttagaaatgactgctaataccgcataagcgcacagtatcgcatgatacagtgtgaaaaactccggtggtacaagatggacccgcgtctgattagctagttggtaaggtaacggcttaccaaggcgacgatcagtagccgacctgagagggtgaccggccacattgggactgagacacggcccaaactcctacgggaggcagcagtggggaatattgcacaatgggcgaaagcctgatgcagcgacgccgcgtgagtgaagaagtatttcggtatgtaaagctctatcagcagggaagaaaatgacggtacctgactaagaagccccggctaactacgtgccagcagccgcggtaatacgtagggggcaagcgttatccggatttactgggtgtaaagggagcgtagacggtaaagcaagtctgaagtgaaagcccgcggctcaactgcgggactgctttggaaactgtttaactggagtgtcggagaggtaagtggaattcctagtgtagcggtgaaatgcgtagatattaggaggaacaccagtggcgaaggcgacttactggacgataactgacgttgaggctcgaaagcgtggggagcaaacaggattagataccctggtagtccacgccgtaaacgatgaatactaggtgttggggagcaaagctcttcggtgccgtcgcaaacgcagtaagtattccacctggggagtacgttcgcaagaatgaaactcaaaggaattgacggggacccgcacaagcggtggagcatgtggtttaattcgaagcaacgcgaagaaccttaccaggtcttgacatcgatccgacgggggagtaacgtccccttcccttcggggcggagaagaaaggtggtgcatggagtgtcggagctcgtgtcgtgagatgttgggttaagtcccgcaacgagcgcaacccttattctaagtagccagcggttcggccgggaactcttgggagactgccagggataacctggaggaaggtggggatgacgtcaaatcatcatgccccttatgatctgggctacacacgtgctacaatggcgtaaacaaagagaagcaagaccgcgaggtggagcaaatctcaaaaataacgtctcagttcggactgcaggctgcaactcgcctgcacgaagctggaatcgctagtaatcgcgaatcagaatgtcgcggtgaatacgttcccgggtcttgtacacaccgcccgtcacaccatgggagtcagtaacgcccgaagtcagtgacccaaccgcaaggagg

SEQ ID NO: 653 - DNA, 1378 bp, Clostridium tertium
gtcgagcgagaggagttccttcgggaacaaatctagcggcggacgggtgagtaacacgtgggcaacctgccttgtagaggggaatagccttccgaaaggaagattaataccgcataacattacattttcgcatgaagaagtaattaaaggagcaatccgctacaagatgggcccgcggcgcattagctagttggtgaggtaacggctcaccaaggcgacgatgcgtagccgacctgagagggtgatcggccacattgggactgagacacggcccagactcctacgggaggcagcagtggggaatattgcacaatgggggaaaccctgatgcagcaacgccgcgtgagtgatgaaggttttcggatcgtaaagctctgtcttcagggacgataatgacggtacctgaggaggaagccacggctaactacgtgccagcagccgcggtaatacgtaggtggcgagcgttgtccggatttactgggcgtaaagggagcgtaggcggatttttaagtgagatgtgaaatacccgggctcaacttgggtgctgcatttcaaactggaagtctagagtgcaggagaggagagtggaattcctagtgtagcggtgaaatgcgtagagattaggaagaacaccagtggcgaaggcgactctctggactgtaactgacgctgaggctcgaaagcgtggggagcaaacaggattagataccctggtagtccacgccgtaaacgatgaatactaggtgtaggggttgtcatgacctctgtgccgccgcaaacgcattaagtattccgcctggggagtacggtcgcaagattaaaactcaaaggaattgacgggggcccgcacaagcagcggagcatgtggtttaattcgaagcaacgcgaagaaccttacctagacttgacatctcctgcattactcttaatcgaggaagtcccttcggggacaggatgacaggtggtgcatgggcgtcgtcagctcgtgtcgtgagatgttgggttaagtcccgcaacgagcgcaacccttattgttagttgctaccatttagttgagcactctagcgagactgcccgggttaaccgggaggaaggtggggatgacgtcaaatcatcatgccccttatgtctagggctacacacgtgctacaatggcaagtacaaagagatgcgataccgcgaggtggagctaaactataaaacttgtctcagttcggattgtaggctgaaactcgcctacatgaagctggagttgctagtaatcgcgaatcagaatgtcgcggtgaatacgttcccgggccttgtacacaccgcccgtcacaccatgagagttggcaatacccaaagttcgtgagctaacccgtaagggaggcagcga

SEQ ID NO: 654 - DNA, 1515 bp, Clostridium tetani
taaattgagagtttgatcctggctcaggacgaacgctggcggcgtgcttaacacatgcaagtcgagcgatgaagcttccttcgggaagtggattagcggcggacgggtgagtaacacgtgggcaacctgcctcaaagaggggaatagccctccgaaaggaggattaataccgcataaagttaaggtttcgcatgaaactttaaccaaaggagtaatctgctttgagatgggcccgcgccccattagctagttggtaaggtaatggcttaccaaggcgacgatgggtagccgacctgagagggtgatcggccacattggaactgagacacggtccagactcctacgggaggcagcagtggggaatattgcgcaatgggggaaaccctgacgcagcaacgccgcgtgggtgatgaaggttttcggatcgtaaaaccctgttttctgggacgataatgacggtaccagatgaggaagccacggctaactacgtgccagcagccgcggtaatacgtaggtggcaagcgttgtccggatttactgggcgtaaagggtgcgtaggcggatgcttaagtgagatgtgaaatacctaagcttaacttaggggctgcatttcaaactgggcatctagagtacaggagagggaaacggaattcctagtgtagcggtgaaatgcgtagagattaggaagaacaccagtggcgaaggcggtttcctggactgtaactgacgctgaggcacgaaagcgtgggtagcaaacaggattagataccctggtagtccacgccgtaaacgatgaatactaggtgtaggagggtccaaccttctgtgccgcagttaacacattaagtattccgcctggggagtacggtcgcaagactaaaactcaaaggaattgacgggggcccgcacaagcagcggagcatgtggtttaattcgaagcaacgcgaagaaccttacctagacttgacataccctgaattactcgtaactgaggaagtcccttcggggacagggatacaggtggtgcatggttgtcgtcagctcgtgtcgtgagatgttgggttaagtcccgcaacgagcgcaacccttattattagttgctaccattaagttgagcactctaatgagactgcctgggtgaaccaggaggaaggtggggatgacgtcaaatcatcatgccccttatgtctagggctacacacgtgctacaatggtcggtacagagagacgcaagaccgcgaggtggagcaaatctcaaaaaccgatcccagttcggattgcaggctgaaactcgcctgcatgaagccggagttgctagtaatcgcaaatcagaatgttgcggtgaatacgttcccgggccttgtacacaccgcccgtcacaccatgagagttggcaacacccgaagtccgtgaggtaaccgtaaggagccagcggccgaaggtggggttaatgattggggtgaagtcgtaacaaggtagccgtaggagaacctgcggctggatcacctcctttct

SEQ ID NO: 655 - DNA, 1521 bp, Clostridium thermocellum
agagtttgatcctggctcaggacgaacgctggcggcgtgcctaacacatgcaagtcgagcggggatatacggaaggtttaccggaagtatatcctagcggcggacgggtgagtaacgcgtgggtaacctacctcatacagggggataacacagggaaacctgtgctaataccgcataatataacggggcggcatcgtcctgttatcaaaggagaaatccggtatgagatgggcccgcgtccgattagctggttggtgaggtaacggctcaccaaggcgacgatcggtagccgaactgagaggttggtcggccacattgggactgagacacggcccagactcctacgggaggcagcagtggggaatattgcgcaatgggggaaaccctgacgcagcaacgccgcgtgaaggaagaaggccttcgggttgtaaacttctttgattggggacgaaggaagtgacggtacccaaagaacaagccacggctaactacgtgccagcagccgcggtaatacgtaggtggcgagcgttgtccggaattactgggtgtaaagggcgcgtaggcggggatgcaagtcagatgtgaaattccggggcttaaccccggcgctgcatctgaaactgtatctcttgagtgctggagaggaaagcggaattcctagtgtagcggtgaaatgcgtagatattaggaggaacaccagtggcgaaggcggctttctggacagtaactgacgctgaggcgcgaaagcgtggggagcaaacaggattagataccctggtagtccacgccgtaaacgatggatactaggtgtaggaggtatcgaccccttctgtgccggagttaacacaataagtatcccacctggggagtacggccgcaaggttgaaactcaaaggaattgacgggggcccgcacaagcagtggagtatgtggtttaattcgaagcaacgcgaagaaccttaccagggcttgacatccctctgacagctctagagatagggcttcccttcggggcagaggagacaggtggtgcatggttgtcgtcagctcgtgtcgtgagatgttgggttaagtcccgcaacgagcgcaacccttgtcgttagttgccagcacgttaaggtgggcactctagcgagactgccggcgacaagtcggaggaaggtggggacgacgtcaaatcatcatgccccttatgtcctgggctacacacgtactacaatggctgctacaaagggaagcgataccgcgaggtggagcaaatccccaaaagcagtcccagttcggattgcaggctgaaactcgcctgcatgaagtcggaattgctagtaatggcaggtcagcatactgccgtgaatacgttcccgggccttgtacacaccgcccgtcacaccatgagagtctgcaacacccgaagtcagtagtctaaccgtaaggagggcgctgccgaaggtggggcagatgattggggtgaagtcgtaacaaggtagccgtatcggaaggtgcggctggatcacctccttt

SEQ ID NO: 656 - DNA, 1360 bp, Clostridium tyrobutyricum
agcgatgaaaccccttcgggggtggattagcggcggacgggtgagtaacacgtgggtaacctgcctcaaagtgggggatagccttccgaaaggaagattaataccgcataaagccaagtttcacatggaatttggatgaaaggagtaattcgctttgagatggacccgcggcgcattagttagttggtggggtaatggcctaccaagacagcgatgcgtagccgacctgagagggtgatcggccacattggaactgagatacggtccagactcctacgggaggcagcagtggggaatattgcacaatgggcgaaagcctgatgcagcaacgccgcgtgagtgatgaaggtcttcggattgtaaagctctgtcttttgggacgataatgacggtaccaaaggaggaagccacggctaactacgtgccagcagccgcggtaatacgtaggtggcgagcgttgtccggatttactgggcgtaaagggtgcgtaggcggatgtttaagtgagatgtgaaatacccgggcttaacttgggtgctgcatttcaaactggatatctagagtgcaggagaggagaatggaattcctagtgtagcggtgaaatgcgtagagattaggaagaacaccagtggcgaaggcgattctctggactgtaactgacgctgaggcacgaaagcgtgggtagcaaacaggattagataccctggtagtccacgccgtaaacgatgagtactaggtgtaggaggtatcgaccccttctgtgccgcagtaaacacattaagtactccgcctgggaagtacgatcgcaagattaaaactcaaaggaattgacgggggcccgcacaagcagcggagcatgtggtttaattcgaagcaacgcgaagaaccttacctggacttgacatcccctgaataacctagagataggcgaagcccttcggggcagggagacaggtggtgcatggttgtcgtcagctcgtgtcgtgagatgttaggttaagtcctgcaacgagcgcaacccttattgttagttgctaacattcagttgagcactctaacgagactgccgcggttaacgcggaggaaggtggggatgacgtcaaatcatcatgccccttatgtccagggcaacacacgtgctacaatgggcagaacaaagagaagcaataccgcgaggtggagccaaactcaaaaactgctctcagttcggattgcaggctgaaactcgcctgcatgaagctggagttgctagtaatcgcgaatcagcatgtcgcggtgaatacgttcccgggccttgtacacaccgcccgtcacaccatgagagctggcaacacccgaagtccgtagtctaacgtaagag

SEQ ID NO: 657 - DNA, 1482 bp, Clostridium viride
  modified_base (746)..(746): a, c, t, g, unknown or other
gatgaacgctggcggcgtgcttaacacatgcaagtcgaacggagccatctggaacaagttttcggacaagggaaagatgtgcttagtggcggacgggtgagtaacgcgtgagtaacctgccttggagtggggaataacacatcgaaaggtgtgctaataccgcatgatgcaacgggatcgcatggttctgttgccaaagatttatcgctctgagatggactcgcgtctgattagctagttggtgaggtaatggctcaccaaggcgacgatcagtagccggactgagaggttgaccggccacattgggactgagacacggcccagactcctacgggaggcagcagtggggaatattgggcaatgggcgcaagcctgacccagcaacgccgcgtgaaggaagaaggccctcgggttgtaaacttcttttattcgagacgaaacaaatgacggtaccgaatgaataagccacggctaactacgtgccagcagccgcggtaatacgtaggtggcaagcgttatccggatttactgggtgtaaagggcgtgtaggcgggactgcaagtcagatgtgaaattccagggctcaactctggacctgcatttgaaactgtagttcttgagtgatggagaggcaggcggaattccgagtgtagcggtgaaatgcgtagatattcggaggaacaccagtggcgaaggcggcctgctggacattaactgacgctgaggcgcgaaagcgtggggagcanacaggattagataccctggtagtccacgctgtaaacgatggatactaggtgtggggggactgaccccttccgtgccgcagttaacacaataagtatcccacctggggagtacgatcgcaaggttgaaactcaaaggaattgacgggggcccgcacaagcggtggagtatgtggtttaattcgaagcaacgcgaagaaccttaccagggcttgacatccctctgaccggtctagagataggccctccctcggggcagaggtgacaggtggtgcatggttgtcgtcagctcgtgtcgtgagatgttgggttaagtcccgcaacgagcgcaacccctattgttagttgctacgcaagagcactctagcgagactgccgttgacaaaacggaggaaggtggggacgacgtcaaatcatcatgccccttatgtcctgggctacacacgtactacaatggcgcttaacagagggaggcaataccgcgaggtggagcaaacccctaaaaggcgtcccagttcggattgcaggctgaaacccgcctgtatgaagttggaatcgctagtaatcgcggatcagcatgccgcggtgaatacgttcccgggtcttgtacacaccgcccgtcacaccatgagagtcgggaacacccgaagtccgtagcctaacagcaatgagggcgcggccgaaggtgggttcgataattggggtgaagtcgtaacaaggtagccgtatcggaaggtgc

SEQ ID NO: 658 - DNA, 1441 bp, Clostridium xylanolyticum
  modified_base (830)..(830): a, c, t, g, unknown or other
  modified_base (1001)..(1001): a, c, t, g, unknown or other
  modified_base (1386)..(1386): a, c, t, g, unknown or other
gatcctggctcaggatgaacgctggcggcgtgcttaacacatgcaagtcgagcgaagcattttaaaggaagttttcggatggaatttagaatgacttagcggcggacgggtgagtaacgcgtgggtaacctgcctcatacagggggataacagttagaaatgactgctaataccgcataagcgcacagtgctgcatagtacagtgtgaaaaactccggtggtatgagatggacccgcgtctgattaggtagttggtgaggtaacggcccaccaagccgacgatcagtagccgacctgagagggtgaccggccacattgggactgagacacggcccaaactcctacgggaggcagcagtggggaatattggacaatgggggaaaccctgatccagcgacgccgcgtgagtgaagaagtatttcggtatgtaaagctctatcagcagggaagaaaatgacggtacctgactaagaagccccggctaactacgtgccagcagccgcggtaatacgtagggggcaagcgttatccggatttactgggtgtaaagggagcgtagacggctctgcaagtctggagtgaaagcccggggctcaaccccgggactgctttggaaactgtggagctagagtgcaggagaggtaagtggaattcctagtgtagcggtgaaatgcgtagatattaggaggaacaccagtggcgaaggcggcttactggactgtaactgacgttgaggctcgaaagcgtggggagcaaacaggattagataccctggtagtccacgccgtaaacgatgaatactaggtgttggggagcaaagctcttcggtnccgccgctaacgcaataagtattccacctggggagtacgttcgcaagaatgaaactcaaaggaattgacggggacccgcacaagcggtggagcatgtggtttaattcgaagcaacgcgaagaaccttaccaagtcttgacatcggaatgaccgtctcgtaacggagacctnccttcggggcattccagacaggtggtgcatggttgtcgtcagctcgtgtcgtgagatgttgggttaagtcccgcaacgagcgcaacccttatccttagtagccagcatgtwatggtgggcactctggggagactgccagggataacctggaggaaggtggggatgacgtcaaatcatcatgccccttatgatttgggctacacacgtgctacaatggcgtaaacaaagggaagcaaaggagcgatctggagcaaatcccaaaaataacgtctcagttcggattgtagtctgcaactcgactacatgaagctggaatcgctagtaatcgcagatcagaatgctgcggtgaatacgttcccgggtcttgtacacaccgcccgtcacnccatgggagttggtaacgcccgaagtcagtgacccaaccgtaaggagggagctgc

SEQ ID NO: 659 - DNA, 1357 bp, Collinsella aerofaciens
  modified_base (766)..(766): a, c, t, g, unknown or other
acggcacccctctccggagggaagcgagtggcgaacggctgagtaacacgtggagaacctgccccctcccccgggatagccgcccgaaaggacgggtaataccggatacccccgggcgccgcatggcgcccgggctaaagccccgacgggaggggatggctccgcggcccatcaggtagacggcggggtgacggcccaccgtgccgacaacgggtagccgggttgagagaccgaccggccagattgggactgagacacggcccagactcctacgggaggcagcagtggggaatcttgcgcaatggggggaaccctgacgcagcgacgccgcgtgcgggacggaggccttcgggtcgtaaaccgctttcagcagggaagagtcaagactgtacctgcagaagaagccccggctaactacgtgccagcagccgcggtaatacgtagggggcgagcgttatccggattcattgggcgtaaagcgcgcgtaggcggcccggcaggccgggggtcgaagcggggggctcaaccccccgaagcccccggaacctccgcggcttgggtccggtaggggagggtggaacacccggtgtagcggtggaatgcgcagatatcgggtggaacaccggtggcgaaggcggccctctgggccgagaccgacgctgaggcgcgaaagctgggggagcgaacaggattagataccctggtagtcccagccgtaaacgatggacgctgggtgtggggggacgatccccccgtgccgcagccnacgcattaagcgtcccgcctggggagtacggccgcaaggctaaaactcaaaggaattgacgggggcccgcacaagcagcggagcatgtggcttaattcgaagcaacgcgaagaaccttacggcgcatccccccgaggcccacggggggtccgccgcgtgggtcagaggagcgcatacgggaggtgcatggttgtcgtcagctcgtgtcgtgagatgttgggttaagtcccgcaacgagcgcaacccccgccgcgtgttgccatcgggtgatgccgggaacccacgcgggaccgccgccgtcaaggcggaggagggcggggacgacgtcaagtcatcatgccccttatgccctgggctgcacacgtgctacaatggccggtacagagggatgccaccccgcgagggggagcggatcccggaaagccggccccagttcggattgggggctgcaacccgcccccatgaagtcggagttgctagtaatcgcggatcagcatgccgcggtgaatgcgttcccgggccttgtacacaccgcccgtcacaccacccgagtcgtctgcacccgaagtcgccggcccaaccgcaaggggg

SEQ ID NO: 660 - DNA, 1340 bp, Collinsella intestinalis
gaacggcacccaccctcgggtggaagcgagtggcgaacggctgagtaacacgtggagaacccgccccctcctccgggatagcctcgggaaaccgtgggtaataccggatgaccccgcagggccgcatggccccgcgggcaaagcccagacgggaggggatggctccgcggcccatcaggtagacggcggggtgacggcccaccgtgccgacgacgggtagccgggttgagagaccgaccggccagattgggactgagacacggcccagactcctacgggaggcagcagtggggaatcttgcgcaatggggggaaccctgacgcagcgacgccgcgtgcgggacgaaggccctcgggtcgtaaaccgctttcagcaggatgagacaagacggtacctgcagaagaagccccggctaactacgtgccagcagccgcggtaatacgtagggggcgagcgttatccggattcattgggcgtaaagcgcgcgtaggcggcccggcaggcagggggtcaaatggcggggctcaaccccgtcccgccccctgaaccgccgggctcgggtccggtaggggagggtggaacacccggtgtagcggtggaatgcgcagatatcgggtggaacaccggtggcgaaggcggccctctgggccgagaccgacgctgaggcgcgaaagctgggggagcgaacaggattagataccctggtagtcccagccgtaaacgatggacgctaggtgtggggggacgatccctccgtgccgcagccaacgcattaagcgtcccgcctggggagtacggccgcaaggctaaaactcaaaggaattgacgggggcccgcacaagcagcggagcatgtggcttaattcgaagcaacgcgaagaaccttaccagggcttgacatgaccgtgaagccggggagacccggtggccgagaggagcggtcacaggtggtgcatggctgtcgtcagctcgtgtcgtgagatgtttggataacggcggcgaaggccgcaacccccgccgcatgttgccagcacctcgggtgggcacccatgcgggaccgccggagtcaatccggaggagggcggggacgacgtcaagtcatcatgccccttatgccctgggctgcacacgtgctacaatggccggtacagcgggatgcgatggcgcgagccggagcggatccctgaaagccggccccagttcggattgggggctgcaacccgcccccatgaagtcggagttgctagtaatcgcggatcagcatgccgcggtgaatgcgttcccgggccttgtacacaccgcccgtcacaccacccgagtcgtctgcacccgaagtcgccg

SEQ ID NO: 661 - DNA, 1264 bp, Collinsella stercoris
  modified_base (1223)..(1224): a, c, t, g, unknown or other
gccccctcctccgggatagcctcgggaaaccgtgggtaataccggatgaccccggcaggccgcatggccggccgggcaaagcccagacgggaggggatggctccgcggcccatcaggtagacggcggggtgacggcccaccgtgccgacgacgggtagccgggttgagagaccgaccggccagattgggactgagacacggcccacactcctacgggaggcagcagtggggaatcttgcgcaatggggggaaccctgacgcagcgacgccgcgtgcgggacgaaggccctcgggtcgtaaaccgctttcagcggaacaaacgtgcagaagaagccccggctaactacgtgccagcagccgcggtatacgtagggggcgagcgttatccggattcattgggcgtaaagcgcgcgtagcggcccggcaggcagggggtcaaatggcggggctcaaccccgtcccgccccctgaaccgccgggctcggtccggtaggggagggtggaacacccggtgtacggtggaatgcgcagatatcgggtggaacaccggtggcgaagcggcctctgggccgaaccgacgctgagcgcgaaagctgggggagcgaacaggattaaataccctggtagtcccagccgtaaacgatggacgctaggtgtgggaggggaacccttccgtgccgcagcccacgcattaggcgtcccgcctggggagtacggccgcaaggctaaaactccaaggaattgactgggggccctcaaagcagcggagcatgtggcttaattcgaagcaacgcgaagaaccttaccagggcttgacatgcgcgtgaagccggggagacccggtggccgagaggagcgcgcacaggtggtgcatggctgtcgtcagctcgtgtcgtgagatgtttggttaagtccagcaacgagcgcaacccccgccgcatgttgccagcacctcgggtgggcacccatgcgggaccgccggagtcaatccggaggagggcggggacgacgtcaagtcatcatgccccttatgccctgggctgcacacgtgctacaatggccggtacagcgggatgcgatggcgcgagccggagcggatccctgaaagccggccccagttcggattgggggctgcaacccgcccccatgaagtcggagttgctagtaatcgcggatcagcatgccgcggtgaatgcgttcccgggccttgtacacaccgcccnncacaccacccgagtcgtctgcacccgaagtcgccggccca

SEQ ID NO: 662 - DNA, 1356 bp, Collinsella tanakaei
tcatggctcaggatgaacgctggcggcgcgcctaacacatgcaagtcgaacgagtggcgaacggctgagtaacacgtggagaacctgccccctcctcggggatagccgcgggaaaccgcgggtaacacccgacgaccaaatgagggaggggatggctccgcggcccatcaggtagacggcggggtaacggcccaccgtgccgacaacgggtagccgggttgagagaccgaccggccagattgggactgagacacggcccagactcctacgggaggcagcagtggggaatcttgcgcaatgggggcaaccctgacgcagcgacgccgcgtgcgggacgaaggccttcgggtcgtaaaccgctttcagcagggacgaagacggtacctgcagaagaagccccggctaactacgtgccagcagccgcggtaatacgtagggggcgagcgttatccggattcattgggcgtaaagcgcgcgtaggcggccgcgtaggcggggggtcaaatcccggggctcaaccccggtccgccccccgaaccccgcggctcgggtccggtaggggagggtggaattcccggtgtagcggtggaatgcgcagatatcgggaggaacaccggtggcgaaggcggccctctgggccgaccgacgctgaggcgcgaaagctgggggagcgaacaggattagataccctggtagtcccagccgtaaacgatggacgctaggtgtgggggcctccgtgccgcagccaacgcattaagcgtcccgcctggggagtacggccgcaaggctaaaactcaaaggaattgacgggggcccgcacaagcagcggagcatgtggcttaattcgaagcaacgcgaagaaccttaccagggcttgacatgcacaggtggtgcatggctgtcgtcagctcgtgtcgtgagatgttgggttaagtcccgcaacgagcgcaacccccgccgcatgttgccagcagctgggcacccatgcgggaccgccggcgtcaagccggaggagggcggggacgacgtcaagtcatcatgccccttatgccctgggctgcacacgtgctacaatggccggcagcgggatgcgatggcgcgagccggagcggatccctcccggccccagttcggatgggggctgcaacccgcccccagaagtcggagttgctagtaatcgcggatcagcatgccgcggtgaatgcgttcccgggccttgtacacaccgcccgtcacaccacccgagtcgtctgcacccgaagccgccgcccagggaggcgtcgaaggtgtggagggtgaggggggtgaagtcgtaacaaggtagccgtacgggaacgtgcggctggatcacctcct

SEQ ID NO: 663 - DNA, 1505 bp, Comamonadaceae bacterium NML000135
attgaacgctggcggcatgctttacacatgcaagtcgaacggtaacatgggtgcttgcacctgatgacgagtggcgaacgggtgagtaatacatcggaacatgcccaattgtgggggatagctcggcgaaagccggattaataccgcataagatctacggatgaaagcaggggaccttcgggccttgcgcgattggagtggccgatggcagattaggtagttggtggggtaaaggcctaccaagcctgcgatctgtagctggtctgagaggacgaccagccacactgggactgagacacggcccagactcctacgggaggcagcagtggggaattttggacaatgggcgcaagcctgatccagcaatgccgcgtgcaggacgaaggccttcgggttgtaaactgcttttgtgcagaacgaaaaatctctggttaatacctggggatcatgacggtactgcaagaataagcaccggctaactacgtgccagcagccgcggtaatacgtagggtgcgagcgttaatcggaattactgggcgtaaagcgtgcgcaggcggcgatgcaagaccgatgtgaaatccccgggctcaacctgggaactgcattagtgactgcattgctggagtgcggcagagggggatggaattccgcgtgtagcagtgaaatgcgtagatatgcggaggaacaccgatggcgaaggcaatcccctgggcctgcactgacgctcatgcacgaaagcgtggggagcaaacaggattagataccctggtagtccacgccctaaacgatgtcaactggttgttggggattcatttcttcagtaacgaagctaacgcgtgaagttgaccgcctggggagtacggtcgcaagactaaaactcaaaggaattgacggggacccgcacaagcggtggatgatgtggtttaattcgatgcaacgcgaaaaaccttacccacctttgacatgtacggaacttgccagagatggcttggtgctcgaaagagagccgtaacacaggtgctgcatggctgtcgtcagctcgtgtcgtgagatgttgggttaagtcccgcaacgagcgcaacccttgtcattagttgccatcatttagttgggcactctaatgagactgccggtgataaaccggaggaaggtggggatgacgtcaagtcctcatggcccttataggtggggctacacacgtcatacaatggccggtacaaagggcagccaacccgcgagggggagccaatcccataaagccggtcgtagtccggatcgcagtctgcaactcgactgcgtgaagtcggaatcgctagtaatcgtggatcagcatgtcacggtgaatacgttcccgggtcttgtacacaccgcccgtcacaccatgggagcgggttctgccagaagtaggtagcttaaccgtaaggagggcgcttaccacggcagggctcgtgactggggtgaagtcgtaacaaggtagccgtaccggaaggtgcggctggatcacc

SEQ ID NO: 664 - DNA, 1450 bp, Comamonadaceae bacterium NML790751
tacacatgcaagtcgaacggtaacatgggtgcttgcacctgatgacgagtggcgaacgggtgagtaatacatcggaacatgcccaattgtgggggatagctcggcgaaagccggattaataccgcataagatctacggatgaaagcaggggaccttcgggccttgcgcgattggagtggccgatggcagattaggtagttggtggggtaaaggcctaccaagcctgcgatctgtagctggtctgagaggacgaccagccacactgggactgagacacggcccagactcctacgggaggcagcagtggggaattttggacaatgggcgcaagcctgatccagcaatgccgcgtgcaggacgaaggccttcgggttgtaaactgcttttgtacagaacgaaaagtctctggttaatacctggggaacatgacggtactgtaagaataagcaccggctaactacgtgccagcagccgcggtaatacgtagggtgcgagcgttaatcggaattactgggcgtaaagcgtgcgcaggcggcgatgcaagaccgatgtgaaatccccgggctcaacctgggaactgcattagtgactgcattgctggagtgcggcagagggggatggaattccgcgtgtagcagtgaaatgcgtagatatgcggaggaacaccgatggcgaaggcaatcccctgggcctgcactgacgctcatgcacgaaagcgtggggagcaaacaggattagataccctggtagtccacgccctaaacgatgtcaactggttgttggggattcatttcttcagtaacgaagctaacgcgtgaagttgaccgcctggggagtacggtcgcaagactaaaactcaaaggaattgacggggacccgcacaagcggtggatgatgtggtttaattcgatgcaacgcgaaaaaccttacccacctttgacatgtacggaacttgccagagatggcttggtgctcgaaagagagccgtaacacaggtgctgcatggctgtcgtcagctcgtgtcgtgagatgttgggttaagtcccgcaacgagcgcaacccttgtcattagttgccatcatttagttgggcactctaatgagactgccggtgataaaccggaggaaggtggggatgacgtcaagtcctcatggcccttataggtggggctacacacgtcatacaatggccggtacaaagggcagccaacccgcgagggggagccaatcccataaagccggtcgtagtccggatcgcagtctgcaactcgactgcgtgaagtcggaatcgctagtaatcgtggatcagcatgtcacggtgaatacgttcccgggtcttgtacacaccgcccgtcacaccatgggagcgggttctgccagaagtaggtagtcttaaccgtaaggagggcgcttaccacggcagggctcgtgactggggtgaagtcgtaaca

SEQ ID NO: 665 - DNA, 1485 bp, Comamonadaceae bacterium NML910035
aacgctggcggcatgctttacacatgcaagtcgaacggtaacatgggtgcttgcacctgatgacgagtggcgaacgggtgagtaatacatcggaacatgcccaattgtgggggatagctcggcgaaagccggattaataccgcataagatctacggatgaaagcaggggaccttcgggccttgcgcgattggagtggccgatggcagattaggtagttggtggggtaaaggcctaccaagcctgcgatctgtagctggtctgagaggacgaccagccacactgggactgagacacggcccagactcctacgggaggcagcagtggggaattttggacaatgggcgcaagcctgatccagcaatgccgcgtgcaggacgaaggccttcgggttgtaaactgcttttgtacagaacgaaaagtctctggttaatacctggggatcatgacggtactgtaagaataagcaccggctaactacgtgccagcagccgcggtaatacgtagggtgcgagcgttaatcggaattactgggcgtaaagcgtgcgcaggcggcgatgcaagaccgatgtgaaatccccgggctcaacctgggaactgcattagtgactgcattgctggagtgcggcagagggggatggaattccgcgtgtagcagtgaaatgcgtagatatgcggaggaacaccgatggcgaaggcaatcccctgggcctgcactgacgctcatgcacgaaagcgtggggagcaaacaggattagataccctggtagtccacgccctaaacgatgtcaactggttgttggggattcatttcttcagtaacgaagctaacgcgtgaagttgaccgcctggggagtacggtcgcaagactaaaactcaaaggaattgacggggacccgcacaagcggtggatgatgtggtttaattcgatgcaacgcgaaaaaccttacccacctttgacatgtacggaacttgccagagatggcttggtgctcgaaagagagccgtaacacaggtgctgcatggctgtcgtcagctcgtgtcgtgagatgttgggttaagtcccgcaacgagcgcaacccttgtcattagttgccatcattaagttgggcactctaatgagactgccggtgataaaccggaggaaggtggggatgacgtcaagtcctcatggcccttataggtggggctacacacgtcatacaatggccggtacaaagggcaggcaacccgcgagggggagcaaatcccataaagccggtcgtagtccggatcgcagtctgcaactcgactgcgtgaagtcggaatcgctagtaatcgtggatcagcatgtcacggtgaatacgttcccgggtcttgtacacaccgcccgtcacaccatgggagcgggttctgccagaagtaggtagcttaaccgtaaggagggcgcttaccacggcagggctcgtgactggggtgaagtcgtaacaaggtagccgtaccggaag

SEQ ID NO: 666 - DNA, 1480 bp, Comamonadaceae bacterium NML910036
attgaacgctggcggcatgctttacacatgcaagtcgaacggtaacatgggtgcttgcacctgatgacgagtggcgaacgggtgagtaatacatcggaacatgcccaattgtgggggatagctcggcgaaagccggattaataccgcataagatctacggatgaaagcaggggaccttcgggccttgcgcgattggagtggccgatggcagattaggtagttggtggggtaaaggcctaccaagcctgcgatctgtagctggtctgagaggacggccagccacactgggactgagacacggcccagactcctacgggaggcagcagtggggaattttggacaatgggcgcaagcctgatccagcaatgccgcgtgcaggacgaaggccttcgggttgtaaactgcttttgtacagaacgaaaagtctctggttaatacctggggatcatgacggtactgtaagaataagcaccggctaactacgtgccagcagccgcggtaatacgtagggtgcgagcgttaatcggaattactgggcgtaaagcgtgcgcaggcggcgatgcaagaccgatgtgaaatccccgggctcaacctgggaactgcattagtgactgcattgctggagtgcggcagagggggatggaattccgcgtgtagcagtgaaatgcgtagatatgcggaggaacaccgatggcgaaggcaatcccctgggcctgcactgacgctcatgcacgaaagcgtggggagcaaacaggattagataccctggtagtccacgccctaaacgatgtcaactggttgttggggattcatttcttcagtaacgaagctaacgcgtgaagttgaccgcctggggagtacggtcgcaagactaaaactcaaaggaattgacggggacccgcacaagcggtggatgatgtggtttaattcgatgcaacgcgaaaaaccttacccacctttgacatgtacggaacttgccagagatggcttggtgctcgaaagagagccgtaacacaggtgctgcatggctgtcgtcagctcgtgtcgtgagatgttgggttaagtcccgcaacgagcgcaacccttgtcattagttgccatcattaagttgggcactctaatgagactgccggtgataaaccggaggaaggtggggatgacgtcaagtcctcatggcccttataggtggggctacacacgtcatacaatggccggtacaaagggcagccaacccgcgagggggagcaaatcccataaagccggtcgtagtccggatcgcagtctgcaactcgactgcgtgaagtcggaatcgctagtaatcgtggatcagcatgtcacggtgaatacgttcccgggtcttgtacacaccgcccgtcacaccatgggagcgggttctgccagaagtaggtagcttaaccgtaaggagggcgcttaccacggcagggctcgtgactggggtgaagtcgtaacaaggtagccg

SEQ ID NO: 667 - DNA, 1499 bp, Comamonadaceae bacterium oral taxon F47
agagtttgatcctggctcagattgaacgctggcggcatgctttacacatgcaagtcgaacggcagcggagaggtgcttgcacttctgccggcgagtggcgaacgggtgagtaatgtatcggaacgtgcccagtagtgggggataactactcgaaagagtggctaataccgcatgagatctctggatgaaagcgggggaccgtaaggcctcgcgctactggagcggccgatatcagattaggtagttggtggggtaaaggcctaccaagcctgcgatctgtagctggtttgagaggacgaccagccacactgggactgagacacggcccagactcctacgggaggcagcagtggggaattttggacaatgggcgcaagcctgatccagcaatgccgcgtgcaggacgaaggccttcgggttgtaaactgcttttgtacagaacgaaaagctcttctctaatacaggggggtaatgacggtactgtaagaataagcgccggctaactacgtgccagcagccgcggtaatacgtagggtgcgagcgttaatcggaattactgggcgtaaagcgtgcgcaggcggttttgtaagacagaggtgaaatccccgggcttaacctgggaactgcctttgtgactgcaaggcttgagtgcggcagagggggatggaattccgcgtgtagcagtgaaatgcgtagatatgcggaggaacaccgatggcgaaggcagtcccctgggcctgcactgacgctcatgcacgaaagcgtggggagcaaacaggattagataccctggtagtccacgccctaaacgatgtcaactggttgttggaatttattttttcagtaacgttgctaacgcgtgaagttgaccgcctggggagtacggccgcaaggttgaaactcaaaggaattgacggggacccgcacaagcggtggatgatgtggtttaattcgatgcaacgcgaaaaaccttacccacctttgacatggcaggaagtttccagagatggattcgtgctcgcaagagagcctgcacacaggtgctgcatggctgtcgtcagctcgtgtcgtgagatgttgggttaagtcccgcaacgagcgcaacccttgccattagttgctacgaaagggcactctaatgggactgccggtgacaaaccggaggaaggtggggatgacgtcaagtcctcatggcccttataggtggggctacacacgtcatacaatggccggtacaaagggtagccaacccgcgagggggagccaatcccgcaaagccggtcgtagtccggatcgcagtctgcaactcgactgcgtgaagtcggaatcgctagtaatcgtggatcagcatgtcacggtgaatacgttcccgggtcttgtacacaccgcccgtcacaccatgggagcgggttctgccagaagtggttagcctaaccgcaaggagggcgatcaccacggcagggttcgtgactggggtgaagtcgtaacaaggtagccgt

SEQ ID NO: 668 - DNA, 1521 bp, Comamonas sp.
  NSP5
agagtttgatcctggctcagattgaacgctggcggcatgctttacacatgcaagtcgaacggtaacaggccgcaaggtgctgacgagtggcgaacgggtgagtaacacatcggaacgtgcccagttgtgggggataactactcgaaagagtagctaataccgcatgagaacttaggttgaaagcaggggaccgcaagaccttgcgcaaacagagcggccgatggcagattaggtagttggtgggataaaggcttaccaagccgacgatctgtagctggtctgagaggacgaccagccacactgggactgagacacggcccagactcctacgggaggcagcagtggggaatttgggacaatgggcgcaagcctgatccagcaatgccgcgtgcaggatgaaggccttcgggttgtaaactgctttggtacggaacgaaaaagctctggttaatacctggggcccatgacggtaccgtaagaataagcaccggctaactacgtgccagcagccgcggtaatacgtagggtgcaagcgttaatcggaattactgggcgtaaagcgtgcgcaggcggttatgtaagacagaggtgaaatccccgggctcaacctgggaactgcctttgtgactgcatagctggagtgcggcagagggggatggaattccgcgtgtagcagtgaaatgcgtagatatgcggaggaacaccgatggcgaaggcaatcccctgggcctgcactgacgctcatgcacgaaagcgtggggagcaaacaggattagataccctggtagtccacgccctaaacgatgtcaactggttgttgggtattcactttctcagtaacgaagctaacgcgtgaagttgaccccctggggagtacggccccaaggttaaaactcaaaggaattgacggggacccgcacaagcggtggatgatgtggtttaattcgatgcaacgcgaaaaaccttacccacctttgacatgtacggaaccctttagagatagaggggtgctcgaaagagaaccgtaacacaggtgctgcatggctgtcgtcagctcgtgtcgtgagatgttgggttaagtcccgcaacgagcgcaacccttgccattagttgctacgaaagggcactctaatgggactgccggtgacaaaccggaggaaggtggggatgacgtcaagtcctcatggcccttataggtggggctacacacgtcatacaatggccggtacaaagggtagccaacccgcgaggtggagctaatcccataaagccggtcgtagtccggatcgcagtctgcaactcgactgcgtgaagtcggaatcgctagtaatcgtggatcagaatgtcacggtgaatacgttcccgggtcttgtacacaccgaccgtcacaccatgggagcgggttctgccagaagtaggtagcctaaccgtaaggagggcgcttaccacggcggggttcgtgactggggtgaagtcgtaacaaggtagccgtatcggaaggtgcggctggatcacctcctt

SEQ ID NO: 669 - DNA, 1464 bp, Conchiformibius kuhniae
attgaacgctggcggcatgctttacacatgcaagtcggacggcagcrsggaggagcttgcttctykgsyggcgagtggcgaacgggtgagtaacgcattggaacgtaccggatagagggggataacttgccgaaaggtaagctaataccgcatacgccttgagagggaaagcgggggactctttgagcctcgcgctatccgagcggccaatgtctgattagctagttggtggggtaaaagcctaccaaggcgacgatcagtagcgggtctgagaggatgatccgccacactgggactgagacacggcccagactcctacgggaggcagcagtggggaattttggacaatgggcgcaagcctgatccagccatgccgcgtgtctgaagaaggccttcgggttgtaaaggacttttgtacgggaagaaaagggtggtgctaatatcgctgcctcatgacggtaccgtaagaataagcaccggctaactacgtgccagcagccgcggtaatacgtagggtgcgagcgttaatcggaattactgggcgtaaagcgggcgcagacggttacttaagcaagatgtgaaatccccgagcttaacttgggaactgcgttttgaactgggtagctagagtgtgtcagaggggggtagaattccacgtgtagcagtgaaatgcgtagagatgtggaggaataccgatggcgaaggcagccccctgggataacactgacgttcatgcccgaaagcgtgggtagcaaacaggattagataccctggtagtccacgccctaaacgatgtcgattagctgttggggtacttgataccttagtagcgtagctaacgcgtgaaatcgaccgcctggggagtacggtcgcaagattaaaactcaaaggaattgacggggacccgcacaagcggtggatgatgtggattaattcgatgcaacgcgaagaaccttacctggtcttgacatgtacggaagagcttagagataggcttgtgccttcgggaaccgtaacacaggtgctgcatggctgtcgtcagctcgtgtcgtgagatgttgggttaagtcccgcaacgagcgcaacccttgtcatcagttgccatcattaagttgggcactctgatgagactgccggtgacaaaccggaggaaggtggggatgacgtcaagtcctcatggcccttatgaccagggcttcacacgtcatacaatggtcggtacaaagggtagccaagccgcgaggcggagccaatcccagaaaaccgatcgtagtccggattgcactctgcaactcgagtgcatgaagtcggaatcgctagtaatcgcaggtcagcatactgcggtgaatacgttcccgggtcttgtacacaccgcccgtcacaccatgggagtgggggataccagaattgggtagggtaaccatttggagcccgcttaacacggtatgcttcatgactggggtg

SEQ ID NO: 670 - DNA, 1486 bp, Coprobacillus cateniformis
agagtttgatcctggctcaggatgaacgctggcggcgtgcctaatacatgcaagtcgaacgcactgattttatcagtgagtggcgaacgggtgagtaatacataagtaacctgccctcatgagggggataactattagaaatgatagctaagaccgcataggtgaaggggtcgcatgaccgcttcattaaatacccgtatggatagcaggaggatggacttatggcgcattagctggttggtgaggtaacggctcaccaaggcgacgatgcgtagccgacctgagagggtggacggccacactgggactgagacacggcccagactctacgggaggcagcagtagggaattttcggcaatgggggaaaccctgaccgagcaacgccccgtgaggcaagaagtatttcggtatgtaaacctctgttataaaggaagaacggtatgaataggaaatgattcataagtgacggtactttatgagaaagccacggctaactacgtgccagcagccgcggtaatacgtaggtggcgaccgttatccggaatcattggccgtaaagagggagcaggcggcaatagaggtctgcggtgaaagcctgaagctaaacttcagtaagccgtggaaaccaaatagctagagtgcagtagaggatcgtggaattccatgtgtagcggtgaaatgcgtagatatatggaggaacaccagtggcgaaggcgacgatctgggctgcaactgacgctcagtcccgaaaccgtggggagcaaataggattagataccctagtagtccaacgccgtaaacgatgagtactaagtgttgggggtcaaacctcagtgctgcagttaacgcaataagtactacgcctgagtagtacgttcgcaagaatgaaactcaaaggaattgacgggggcccgcacaaaaggtggagcatgtggtttaattcgaagcaacgcgaagaaccttaccaggtcttgacatacctctaaaggctctagagatagagagatagctataggggatacaggtggtgcatggttgtcgtcagctcgtgtcgtgagatgttgggttaagtcccgcaacgagcgcaacccttgtcgctagttaccatcattaagttggggactctagcgagactgcctctgcaaggaggaggaaggcggggatgacgtcaaatcatcatgccccttatgacctgggctacacacgtgctacaatggacggatcaaagggaagcgaagccgcgaggtggagcgaaacccaaaaacccgttctcagttcggactgcagtctgcaactcgactgcacgaagttggaatcgctagtaatcgcgaatcagaatgtcgcggtgaatacgttctcgggccttgtacacaccgcccgtcacaccatgagagttggtaacacccgaagccggtggcttaaccgcaaggagagagctgtctaaggtgggactgatgattagggtgaagtcgtaacaaggtaacc

SEQ ID NO: 671 - DNA, 977 bp, Coprobacillus sp.
  29_1
  modified_base (30)..(30): a, c, t, g, unknown or other
attcataagtgacggtactttatgagaaanccacggctaactacgtgccagcagccgcggtaatacgtaggtggcgagcgttatccggaatcattgggcgtaaagagggagcaggcggcaatagaggtctgcggtgaaagcctgaagctaaacttcagtaagccgtggaaaccaaatagctagagtgcagtagaggatcgtggaattccatgtgtagcggtgaaatgcgtagatatatggaggaacaccagtggcgaaggcgacgatctgggctgcaactgacgctcagtcccgaaagcgtggggagcaaataggattagataccctagtagtccacgccgtaaacgatgagtactaagtgttgggggtcaaacctcagtgctgcagttaacgcaataagtactccgcctgagtagtacgttcgcaagaatgaaactcaaaggaattgacgggggcccgcacaagcggtggagcatgtggtttaattcgaagcaacgcgaagaaccttaccaggtcttgacatacctctaaaggctctagagatagagagatagctataggggatacaggtggtgcatggttgtcgtcagctcgtgtcgtgagatgttgggttaagtcccgcaacgagcgcaacccttgtcgctagttaccatcattaagttggggactctagcgagactgcctctgcaaggaggaggaaggcggggatgacgtcaaatcatcatgccccttatgacctgggctacacacgtgctacaatggacggatcaaagggaagcgaagccgcgaggtggagcgaaacccaaaaacccgttctcagttcggactgcagtctgcaactcgactgcacgaagttggaatcgctagtaatcgcgaatcagaatgtcgcggtgaatacgttctcgggccttgtacacaccgcccgtcacaccatgagagttggtaacacccgaagccggtggcttaaccgcaaggag

SEQ ID NO: 672 - DNA, 1383 bp, Coprobacillus sp.
  D7
  modified_base (7)..(8): a, c, t, g, unknown or other
cagtcgnncgcgagcacttgtgctcgagtggcgaacgggtgagtaatacataagtaacctgccctagacagggggataactattggaaacgatagctaagaccgcataggtacggacactgcatggtgaccgtattaaaagtgcctcaaagcactggtagaggatggacttatggcgcattagctggttggcggggtaacggcccaccaaggcgacgatgcgtagccgacctgagagggtgaccggccacactgggactgagacacggcccagactcctacgggaggcagcagtagggaattttcggcaatgggggaaaccctgaccgagcaacgccgcgtgaaggaagaaggttttcggattgtaaacttctgttataaaggaagaacggcggctacaggaaatggtagccgagtgaggtactttattagaaagccacggctaactacgtgccagcagccgcggtaatacgtaggtggcaagcgttatccggaattattgggcgtaaagagggagcaggcggcagcaagggtctgtggtgaaagcctgaagcttaacttcagtaagccatagaaaccaggcagctagagtgcaggagaggatcgtggaattccatgtgtagcggtgaaatgcgtagatatatggaggaacaccagtggcgaaggcgacgatctggcctgcaactgacgctcagtcccgaaagcgtggggagcaaataggattagataccctagtagtccacgccgtaaacgatgagtactaagtgttggatgtcaaagttcagtgctgcagttaacgcaataagtactccgcctgagtagtacgttcgcaagaatgaaactcaaaggaattgacgggggcccgcacaagcggtggagcatgtggtttaattcgaagcaacgcgaagaaccttaccaggtcttgacatactcataaaggctccagagatggagagatagctatatgagatacaggtggtgcatggttgtcgtcagctcgtgtcgtgagatgttgggttaagtcccgcaacgagcgcaacccttatcgttagttaccatcattaagttggggactctagcgagactgccagtgacaagctggaggaaggcggggatgacgtcaaatcatcatgccccttatgacctgggctacacacgtgctacaatggatggtgcagagggaagcgaagccgcgaggtgaagcaaaacccataaaaccattctcagttcggattgtagtctgcaactcgactacatgaagttggaatcgctagtaatcgcgaatcagcatgtcgcggtgaatacgttctcgggccttgtacacaccgcccgtcacaccacgagagttgataacacccgaagccggtggcctaaccgcaaggaa

SEQ ID NO: 673 - DNA, 989 bp, Coprococcus catus
  modified_base (743)..(743): a, c, t, g, unknown or other
  modified_base (947)..(947): a, c, t, g, unknown or other
  modified_base (965)..(965): a, c, t, g, unknown or other
gatgaagagcttgcttttcaaagttagtggcggacgggtgagtaacgcgtgggtaacctgcctcatacaggggaatagcagctggaaacggctgataaaaccgcataagcgcacagtgccgcatggcacagtgtgaaaaactccggtggtatgagatggacccgcgtctgattagcttgttggcggggtaacggcccaccaaggcgacgatcagtagccggcctgagagggtgatcggccacattgggactgagacacggcccaaactcctacgggaggcagcagtggggaatattgcacaatgggggaaaccctgatgcagcgacgccgcgtgaaggaagaagtatctcggtatgtaaacttctatcagcagggaagataatgacggtacctgactaagaagccccggctaactacgtgccagcagccgcggtaatacgtagggggcaagcgttatccggatttactgggtgtaaagggagcgtaggcggcggagcaagtcagaagtgaaagcccggggctcaaccccgggacggcttttgaaactgccctgcttgatttcaggagaggtaagcggaattcctagtgtagcggtgaaatgcgtagatattaggaggaacaccagtggcgaaggcggcttactggactgacaatgacgctgaggctcgaaagcgtggggagcaaacaggattagataccctggtagtccacgccgtaaacgatgaatactaggtgtcggggcntcataagagcttcggtgccgcagcaaacgcaataagtattccacctggggagtacgttcgcaagaatgaaactcaaaggaattgacggggacccgcacaagcggtggagcatgtggtttaattcgaagcaacgcgaagaaccttaccaggccttgacatcccggtgaccgacccgtaatggggtcttctctacggagcactggngacaggtggtgcatggtngtcgtcagctcgtgtcgtgagatg

SEQ ID NO: 674 - DNA, 1370 bp, Coprococcus comes
gattcttcggatgaagaggtttgtgactgagtggcggacgggtgagtaacgcgtgggtaacctgcctcatacagggggataacagttagaaatgactgctaataccgcataagaccacggagccgcatggctccgtgggaaaaactccggtggtatgagatggacccgcgtctgattaggtagttggtggggtaacggcctaccaagccaacgatcagtagccgacctgagagggtgaccggccacattgggactgagacacggcccaaactcctacgggaggcagcagtggggaatattgcacaatgggggaaaccctgatgcagcgacgccgcgtgagcgaagaagtatttcggtatgtaaagctctatcagcaggaagaaaatgacggtacctgactaagaagcaccggctaaatacgtgccagcagccgcggtaatacgtatggtgcaagcgttatccggatttactgggtgtaaagggagcgtagacggctgtgtaagtctgaagtgaaagcccggggctcaaccccgggactgctttggaaactatgcagctagagtgtcggagaggtaagtggaattcccagtgtagcggtgaaatgcgtagatattgggaggaacaccagtggcgaaggcggcttactggacgatgactgacgttgaggctcgaaagcgtggggagcaaacaggattagataccctggtagtccacgccgtaaacgatgactactaggtgtcggggagcaaagctcttcggtgccgcagcaaacgcaataagtagtccacctggggagtacgttcgcaagaatgaaactcaaaggaattgacggggacccgcacaagcggtggagcatgtggtttaattcgaagcaacgcgaagaaccttacctgctcttgacatcccggtgaccggcgtgtaatgacgccttttcttcggaacaccggtgacaggtggtgcatggttgtcgtcagctcgtgtcgtgagatgttgggttaagtcccgcaacgagcgcaacccttatcttcagtagccagcaattcggatgggcactctggagagactgccagggataacctggaggaaggtggggatgacgtcaaatcatcatgccccttatgagcagggctacacacgtgctacaatggcgtaaacaaagggaagcgagcctgcgagggtaagcaaatctcaaaaataacgtctcagttcggattgtagtctgcaactcgactacatgaagctggaatcgctagtaatcgcgaatcagcatgtcgcggtgaatacgttcccgggtcttgtacacaccgcccgtcacaccatgggagttggtaacgcccgaagtcagtgacccaaccgtaaggagggagctg

SEQ ID NO: 675 - DNA, 1440 bp, Coprococcus eutactus
gatgaacgctggcggcgtgcttaacacatgcaagtcgaacgattgaagctggagcttgctccggccgatttagtggcggacgggtgagtaacgcgtgggtaacctgcctcatacagggggatagcagttggaaacgactggtaaaaccgcataagcgcacrgtatcgcatgatacagtgtgaaaacactccggtggtatgagatggacccgcgtctgattagctagttggtgaggtaacggcccaccaaggcgacgatcagtagccggcctgagagggtgaacggccacattgggactgagacacggcccaaactcctacgggaggcagcagtggggaatattgcacaatgggggaaaccctgatgcagcgacgccgcgtgagtgaagaagtatttcggtatgtaaagctctatcagcagggaagataatgacggtacctgactaagaagcaccggctaaatacgtgccagcagccgcggtaatacgtatggtgcaagcgttatccggatttactgggtgtaaagggtgcgtaggtggcaaggcaagtctgaagtgaaaatccggggctcaaccccggaactgctttggaaactgtttagctagagtacaggagaggtaagtggaattcctagtgtagcggtgaaatgcgtagatattaggaggaacaccagtggcgaaggcgacttactggactgctactgacactgaggcacgaaagcgtggggagcaaacaggattagataccctggtagtccacgccgtaaacgatgaatactaggtgttgggttccaaagggactcggtgccgtcgcaaacgcattaagtattccacctggggagtacgttcgcaagaatgaaactcaaaggaattgacggggacccgcacaagcggtggagcatgtggtttaattcgaagcaacgcgaaaaaccttaccaagtcttgacatcctgatgacggttccttaaccggaacttctcttcggagcatcagagacaggtggtgcatggttgtcgtcagctcgtgtcgtgagatgttgggttaagtcccgcaacgagcgcaacccctatttccagtagccagcagtaagatgggcactctggagagactgccggggataacccggaggaaggtggggatgacgtcaaatcatcatgccccttatgatttgggctacacacgtgctacaatggcagttacaaagagaagcraacctgtgaaggcgagcaaacctcaaaaaggctgtctcagttcggattgtagtctgcaactcgactacatgaagctggaatcgctagtaatcgcagatcagcatgctgcggtgaatacgttcccgggtcttgtacacaccgcccgtcacaccatgggagtcggtaacgcccgaagtcagtgacccaaccgcaaggagggagctgccgaaggcaggatcgataactggggtg

SEQ ID NO: 676 - DNA, 1440 bp, Coprococcus sp.
  ART55/1
gatgaacgctggcggcgtgcttaacacatgcaagtcgaacgattgaagctggagcttgctccggccgatttagtggcggacgggtgagtaacgcgtgggtaacctgcctcatacagggggatagcagttggaaacgactggtaaaaccgcataagcgcacggtrtcgcatgayacagtgtgaaaacactccggtggtatgagatggacccgcgtctgattagctagttggtgaggtaacggcccaccaaggcgacgatcagtagccggcctgagagggtgaacggccacattgggactgagacacggcccaaactcctacgggaggcagcagtggggaatattgcacaatgggggaaaccctgatgcagcgacgccgcgtgagtgatgaagtatttcggtatgtaaagctctatcagcagggaagataatgacggtacctgactaagaagcaccggctaaatacgtgccagcagccgcggtaatacgtatggtgcaagcgttatccggatttactgggtgtaaagggtgcgtaggtggcaaggcaagtctgaagtgaaaatccggggctcaaccccggaactgctttggaaactgtttagctagagtacaggagaggtaagtggaattcctagtgtagcggtgaaatgcgtagatattaggaggaacaccagtggcgaaggcgacttactggactgctactgacactgaggcacgaaagcgtggggagcaaacaggattagataccctggtagtccacgccgtaaacgatgaatactaggtgttgggttccaaaggaactcggtgccgtcgcaaacgcattaagtattccacctggggagtacgttcgcaagaatgaaactcaaaggaattgacggggacccgcacaagcggtggagcatgtggtttaattcgaagcaacgcgaaaaaccttaccaagtcttgacatcctgatgacggttccttaaccggaacttttcttcggaacatcagagacaggtggtgcatggttgtcgtcagctcgtgtcgtgagatgttgggttaagtcccgcaacgagcgcaacccctatttccagtagccagcagtaagatgggcactctggagagactgccggggataacccggaggaaggtggggatgacgtcaaatcatcatgccccttatgatttgggctacacacgtgctacaatggcagttacaaagagaagcaaacctgtgaaggcgagcaaacctcaaaaaggctgtctcagttcggattgtagtctgcaactcgactacatgaagctggaatcgctagtaatcgcagatcagcatgctgcggtgaatacgttcccgggtcttgtacacaccgcccgtcacaccatgggagtcggtaacgcccgaagtcagtgacccaaccgcaaggagggagctgccgaaggcaggatcgataactggggtg

SEQ ID NO: 677 - DNA, 1370 bp, Coriobacteriaceae bacterium BV3Ac1
acatgcaagtcgaacgattaaagcaccttcgggtgtgtatagagtggcgaacggctgagtaacacgtgggcaacctgcccttcagttcggaatagctacgggaaaccgtgggtaataccggatgatccacctccctcgcatgaaggaggtggcaaagatttatcgctgaaggatgggcccgcggcctgttagcttgttggtgaggtaacggctcaccaaggcagtaatgggtagccgggttgagagaccgaccggccagattgggactgagacacggcccagactcctacgggaggcagcagtggggaatcttgcgcaatgggcgaaagcctgacgcagcgatgccgcgtgcgggatgaaggccttcgggtcgtaaaccgctttcagcagggacgaggccgcaaggtgacggtacctgcagaagaagccccggctaactacgtgccagcagccgcggtaatacgtagggggcgagcgttatccggattcattgggcgtaaagcgcgcgtaggcggcctgttaggtcaagagttaaatccgggggctcaacccccgtccgctcctgataccggcaggcttgagtctggtaggggaaggcggaattccaagtgtagcggtggaatgcgcagatatttggaagaacaccggtggcgaaggcggccttctgggccacgactgacgctgaggcgcgaaagctaggggagcaaacaggattagataccctggtagtcctagccgtaaacgatggacactaggtgtggggggaacatccctccgtgccgcagctaacgcattaagtgtcccgcctggggagtacggccgcaaggctaaaactcaaaggaattgacgggggcccgcacaagcagcggagcatgtggcttaattcgaagcaacgcgaagaaccttaccagggcttgacatataggtgaagcggtggaaacaccgtagccgaaaggagcctatacaggtggtgcatggctgtcgtcagctcgtgtcgtgagatgttgggttaagtcccgcaacgagcgcaacccccgtcgtatgttgccagcggttcggccgggcacccatacgagaccgccggcgtcaagccggaggaaggtggggacgacgtcaagtcatcatgccccttatgtcctgggctgcacacgtgctacaatggccggcacaatgggctgccaagtcgcaagaccgagcgaatccctaaagccggccccagttcggattggaggctgcaacccgcctccatgaagtcggagttgctagtaatcgcggatcagcacgccgcggtgaatgcgttcccgggccttgtacacaccgcccgtcacaccacccgagtcgtctgcacccgaagtcgccggcccaacctt

SEQ ID NO: 678 - DNA, 1491 bp, Coriobacteriaceae bacterium JC110
agagtttgatcctggctcaggatgaacgctggcggcgtgcctaacacatgcaagtcgaacgatgaaaccgcccccgggcggacatgaagtggcgaacgggtgagtaacacgtgaccgacctgccccccgcccagggacagccccccgaaagggggattaatacctggtactccgggagcggcgcatgccgcccccgggaaagctctcgcggcgggggatggggtcgcggcccatcaggtagacggcggggcagaggcccaccgtgccgacgacgggtagccgggttgagagaccgaccggccacattgggactgagatacggcccagactcctacgggaggcagcagtggggaattttgcgcaatgggggcaaccctgacgcagcaacgccgcgtgcgggacgaaggcgtccgcgtcgtaaaccgctttcagcggggaacacctaacgagggtacccgcagaagaagccccggctaaatacgtgccagcagccgcggtaatacgtatggggcgagcgttatccggattcattgggcgtaaagcgcgcgtaggcggagcgctaagcgggacctctaacccgagggctcaacccccggccgggtcccgaactggcgctctcgagtgcggtaggggagagcggaattcccggtgtagcggtggaatgcgcagatatcgggaagaacaccgacggcgaaggcagctctctgggccgaaactgacgctgaggcgcgaaagctgggggagcgaacaggattagataccctggtagtcccagccgtaaacgatgggcgctaggtgtgggggatgagatcccccgtgccgcagccaacgcattaagcgccccgcctggggagtacggccgcaaggctaaaactcaaaggaattgacgggggcccgcacaagcagcggagcatgtggcttaattcgaagcaacgcgaagaaccttaccagggcttgacatgcaggtgaagcggcggagacgccgtggccgagaggagcctgcacaggtggtgcatggctgtcgtcagctcgtgtcgtgagatgttgggttaagtcccgcaacgagcgcaacccctgccccgtgttgccagcattcagttggggactcgcgggggactgccggcgtcaagccggaggaaggtggggacgacgtcaagtcatcatgccccttatgccctgggccgcacacgtgctacaatggccggtacagagggttgcgaccccgcgagggggagcggatcccgcaaagccggccccagttcggatcggaggctgcaacccgcctccgtgaagccggagttgctagtaatcgcggatcagcacgccgcggtgaatacgttcccgggccttgtacacaccgcccgtcacaccacccgagtcgtctgcacccgaagccgccggccgaaccctttcaggggcggaggcgtcgaaggtgtggagggtgaggggggtgaagtcgtaacaaggtagccgtaccggaaggtgcggctg

SEQ ID NO: 679 - DNA, 1464 bp, Coriobacteriaceae bacterium phI
gatcctggctcaggatgaacgctggcggcgcgcctaacacatgcaagtcgagcggcaccctgcttcggcaggaagcgagcggcgaacggctgagtaacacgtgaccaacctgccctgcgcacggggacagccgcgggaaaccgcgggtgatacccggtggccccggggggacgcatgtccccagcgggcatagctccggcggcgcgggatggggtcgcggcccatcaggtagttggtagggtgacggcctaccaagccgactacgggtagccgggttgagagaccgaccggccagattgggactgagacacggcccagactcctacgggaggcagcagtggggaatcttgcgcaatggggggaaccctgacgcagcgacgccgcgtgcgggatggaggccttcgggtcgtgaaccgctttcagcagggacgagactgacggtacctgcagaagaagccccggctaactacgtgccagcagccgcggtaatacgtagggggcgagcgttatccggattcattgggcgtaaagcgcgcgtaggcggccgcgcaggcggggggtcaaatcccggggctcaaccccgggccgccccccgaaccgcgcggcttgggtccggcaggggagggtggaacgcccggtgtagcggtggaatgcgcagatatcgggcggaacaccggtggcgaaggcggccctctgggccggcaccgacgctgaggcgcgagagccgggggagcgaacaggattagataccctggtagtcccggccgtaaacgatggacgctaggtgtggggacgttggagtctccgtgtgccgcagccaacgcattaagcgtcccgcctggggagtacggccgcaaggctaaaactcaaaggaattgacgggggcccgcacaagcagcggagcatgtggcttaattcgaagcaacgcgaagaaccttacccgcgcttgacatggcggtgaagcggcggagacgccgtggccgagaggagccgccacaggtggtgcatggctgtcgtcagctcgtgtcgtgagatgttgggttaagtcccgcaacgagcgcaacccccgccgcgtgttgccatcgggtgatgccgggaacccacgcgggaccgccgccgccaaggcggaggagggcggggacgacgtcaagtcatcatgccccttatgcgcggggctgcacacgtgctacaatggcaggtacagagggttgccaccccgcgagggggagcggatcccgaaagcctgccccagttcggaccgggggctgcaacccgcccccgcgaagtcggagttgctagtaatcgcggatcagcatgccgcggtgaatgcgttcccgggccttgtacacaccgcccgtcacaccacccgagtcgtctgcacccgaagccgccggcccaacctcgtgagggaggcgtcgaaggtgtggagggcgaggggggtgaagtcgtaacaaggtagccgta

SEQ ID NO: 680 - DNA, 1497 bp, Gordonibacter pamelaeae
agagtttgatcctggctcaggatgaacgctggcggcgtgcctaacacatgcaagtcgaacgattaagacggctccggccgtgaatagagtggcgaacgggtgagtaacacgtgaccaacctgccccctaccccgggataacgcaaggaaacctgcgctaataccggatactccttcccctgctcctgcaggggtcgggaaagcccagacggtaggggatggggtcgcggcccattaggtagacggcggggcaacggcccaccgtgcctgcgatgggtagccgggttgagagaccgaccggccacattgggactgagatacggcccagactcctacgggaggcagcagtggggaattttgcgcaatggggggaaccctgacgcagcaacgccgcgtgcgggatgaaggccttcgggttgtaaaccgctttcagcagggaagatagtgacggtacctgcagaagaagccccggctaactacgtgccagcagccgcggtaatacgtagggggcgagcgttatccggattcattgggcgtaaagcgcgcgtaggcggcccgtcaagcggaacctctaacccgagggctcaacccccggtcgggttccgaactggcaggctcgagtttggtagaggaagatggaattcccggtgtagcggtggaatgcgcagatatcgggaagaacaccgatggcgaaggcagtcttctgggccatcaactgacgctgaggcgcgaaagctgggggagcgaacaggattagataccctggtagtcccagccgtaaacgatgggtgctaggtgtggggggatcatccctccgtgccgcagccaacgcattaagcaccccgcctggggagtacggccgcaaggctaaaactcaaaggaattgacgggggcccgcacaagcagcggagcatgtggcttaattcgaagcaacgcgaagaaccttaccagggcttgacatgctagtgaagccggggaaacccggtggccgagaggagctagcgcaggtggtgcatggctgtcgtcagctcgtgtcgtgagatgttgggttaagtcccgcaacgagcgcaacccctatcgtatgttgccagcattgagttggggactcatacgagactgccggcgtcaagccggaggaaggtggggacgacgtcaagtcatcatgccctttatgccctgggctgcacacgtgctacaatggccggtacaacgggccgcgacctggcgacaggaagcgaatccctcaaagccggccccagttcggatcggaggctgcaacccgcctccgtgaagtcggagttgctagtaatcgcggatcagcatgccgcggtgaatacgttcccgggccttgtacacaccgcccgtcacaccacccgagtcgtctgcacccgaagccgccggccgaacccgcaaggggcggaggcgtcgaaggtgtggagggtaaggggggtgaagtcgtaacaaggtagccgtaccggaaggtgcggctggatcacct

SEQ ID NO: 681 - DNA, 1522 bp, Corynebacterium accolens
tttttgtggagagtttgatcctggctcaggacgaacgctggcggcgtgcttaacacatgcaagtcgaacggaaaggccctgcttgcagggtactcgagtggcgaacgggtgagtaacacgtgggtgatctgccctgcacttcgggataagcttgggaaactgggtctaataccggataggaaccatctttagtgtggtggttggaaagttttttcggtgtaggatgagctcgcggcctatcagcttgttggtggggtaatggcctaccaaggcggcgacgggtagccggcctgagagggtgtacggccacattgggactgagatacggcccagactcctacgggaggcagcagtggggaatattgcacaatgggcgcaagcctgatgcagcgacgccgcgtgggggatgaaggccttcgggttgtaaactcctttcgctagggacgaagctttttgtgacggtacctagataagaagcaccggctaactacgtgccagcagccgcggtaatacgtagggtgcgagcgttgtccggaattactgggcgtaaagggctcgtaggtggtttgtcgcgtcgtctgtgaaattctggggcttaactccgggcgtgcaggcgatacgggcataacttgagtgctgtaggggtaactggaattcctggtgtagcggtgaaatgcgcagatatcaggaggaacaccgatggcgaaggcaggttactgggcagttactgacgctgaggagcgaaagcatgggtagcgaacaggattagataccctggtagtccatgccgtaaacggtgggcgctaggtgtgagggtctttctacgactttcgtgccgtagctaacgcattaagcgccccgcctggggagtacggccgcaaggctaaaactcaaaggaattgacgggggcccgcacaagcggcggagcatgtggattaattcgatgcaacgcgaagaaccttacctgggcttgacatacaccagatcgctgcagagatgtagtttccctttgtggttggtgtacaggtggtgcatggttgtcgtcagctcgtgtcgtgagatgttgggttaagtcccgcaacgagcgcaacccttgtcttatgttgccagcatttggttggggactcatgagagactgccggggttaactcggaggaaggtggggatgacgtcaaatcatcatgccccttatgtccagggcttcacacatgctacaatggtcggtacaacgcgctgcgacactgtgaggtggagcgaatcgctgaaagccggccttagttcggattggggtctgcaactcgaccccatgaagtcggagtcgctagtaatcgcagatcagcaatgctgcggtgaatacgttcccgggccttgtacacaccgcccgtcacgtcatgaaagttggtaacacccgaagccggtggcctaaacgtgttagggagccgtcgaaggtgggatcggcgattgggacgaagtcgtaacaaggtacccgtaccggaaggtgcgggtggatcacctcctttct

SEQ ID NO: 682 - DNA, 1530 bp, Corynebacterium ammoniagenes
tttttgtggagagtttgatcctggctcaggatgaacgctggcggcgtgcttaacacatgcaagtcgaacggaaaggcctgtacttgtacaggtactcgagtggcgaacgggtgagtaacacgtgggtgatctgccctgcactatgggataagcttgggaaactgggtctaataccatataggaccacttcttggatgttgtggtggaaagcttttgcggtgtgggatgagcctgcggcctatcagcttgttggtggggtaatggcctaccaaggcggcgacgggtatccggcctgagagggtgtacggacacattgggactgagatacggcccagactcctacgggaggcagcagtggggaatattgcacaatgggcgcaagcctgatgcagcgacgccgcgtgggggatgacggccttcgggttgtaaactcctttcgctatcgacgaagccaccttgggtggtgacggtaggtagataagaagcaccggctaactacgtgccagcagccgcggtaatacgtagggtgcaagcgttgtccggaattactgggcgtaaagagctcgtaggtggtttgtcgcgtcgtctgtgaaatcccggggcttaacttcgggcgtgcaggcgatacgggcataacttgagtgctgtaggggagactggaattcctggtgtagcggtgaaatgcgcagatatcaggaggaacaccgatggcgaaggcaggtctctgggcagtaactgacgctgaggagcgaaagcatgggtagcgaacaggattagataccctggtagtccatgccgtaaacggtgggcgctaggtgtagggggcttccacgtcttctgtgccgtagctaacgcattaagcgccccgcctggggagtacggccgcaaggctaaaactcaaaggaattgacgggggcccgcacaagcggcggagcatgtggattaattcgatgcaacgcgaagaaccttacctgggcttgacatatacaggattgggctagagatagttcgtcccttgtggtctgtatacaggtggtgcatggttgtcgtcagctcgtgtcgtgagatgttgggttaagtcccgcaacgagcgcaacccttgtcttatgttgccagcacgtgatggtggggactcatgagaaactgccggggttaactcggaggaaggtggggatgacgtcaaatcatcatgccccttatgtccagggcttcacacatgctacaatggtcgatacaatgggcagcgacatcgtgaggtggagcgaatccctgaaagtcggccttagttcggattggggtctgcaactcgaccccatgaagtcggagtcgctagtaatcgcagatcagcaatgctgcggtgaatacgttcccgggccttgtacacaccgcccgtcacgtcatgaaagttggtaacacccgaagccagtggcctaaacttgttagggagctgtcgaaggtgggatcggcgattgggacgaagtcgtaacaaggtagccgtaccggaaggtgcggctggatcacctcctttct

SEQ ID NO: 683 - DNA, 1529 bp, Corynebacterium amycolatum
ttttgatggagggtttgatcctggctcaggacgaacgctggcggcgtgcttaacacatgcaagtcgaacggtaaggctccagcttgctggggtacacgagtggcgaacgggtgagtaacacgtgggtgacctgccctgcacttcgggataagcctgggaaactgggtctaataccggataggaccatggtgtggatactgtggtggaaagttttttcggtgtgggatgggcccgcggcctatcagcttgttggtggggtaatggcctaccaaggcggcgacgggtagccggcctgagagggtggacggccacattgggactgagacacggcccagactcctacgggaggcagcagtggggaatattgcacaatgggcgcaagcctgatgcagcgacgccgcgtgggggatgacggccttcgggttgtaaactcctttcaccatcgacgaagggtttctgacggtagatggagaagaagcaccggctaactacgtgccagcagccgcggtaatacgtagggtgcgagcgttgtccggaattactgggcgtaaagagctcgtaggtggtttgtcgcgtcgtctgtgaaattccggggcttaactccgggcgtgcaggcgatacgggcataacttgagtactgtaggggagactggaattcctggtgtagcggtgaaatgcgcagatatcaggaggaacaccggtggcgaaggcgggtctctgggcagtaactgacgctgaggagcgaaagcatggggagcgaacaggattagataccctggtagtccatgccgtaaacggtgggcgctaggtgtgggtttccttccacgggatccgtgccgtagctaacgcattaagcgccccgcctggggagtacggccgcaaggctaaaactcaaaggaattgacgggggcccgcacaagcggcggagcatgtggattaattcgatgcaacgcgaagaaccttacctgggcttgacatatacaggatcgcgccagagatggtgtttcccttgtggcttgtatacaggtggtgcatggttgtcgtcagctcgtgtcgtgagatgttgggttaagtcccgcaacgagcgcaacccttgtcttatgttgccagcacgtgatggtggggactcgtaagagactgccggggttaactcggaggaaggtggggatgacgtcaaatcatcatgccccttatgtccagggcttcacacatgctacaatggtcggtacagtgggttgccagtccgtgagggcgagctaatcccgtaaagccggtctcagttcggatcggggtctgcaactcgaccccgtgaagtcggagtcgctagtaatcgcagatcagcaacgctgcggtgaatacgttcccgggccttgtacacaccgcccgtcacgtcatgaaagtcggtaacacccgaagccagtggcctaacacttttttgtgggggagctgtcgaaggtgggattggcgattgggacgaagtcgtaacaaggtagccgtaccggaaggtgcggctggatcacctcctttct

SEQ ID NO: 684 - DNA, 1469 bp, Corynebacterium appendicis
cgtgcttaacacatgcaagtcggaacggaaaggcctctgcttgcaggggtactcgagtggcgaacgggtgagtaacacgtgggtgatctgccctgcacttcgggataagcctgggaaactgggtctaataccggataggacgatggtttggatgccattgtggaaagttttttcggtgtgggatgagctcgcggcctatcagcttgttggtggggtaatggcctaccaaggcgtcgacgggtagccggcctgagagggtgtacggccacattgggactgagatacggcccagactcctacgggaggcagcagtggggaatattgcacaatgggcgcaagcctgatgcagcgacgccgcgtgggggatgacggccttcgggttgtaaactcctttcgtcagggacgaagcgaaagtgacggtacctggataagaagcaccggctaactacgtgccagcagccgcggtaatacgtagggtgcgagcgttgtccggaattactgggcgtaaagagctcgtaggtggtttgtcgcgtcgtttgtggaataccgcagcttaactgcggggttgcaggcgatacgggcataacttgagtgctgtaggggagactggaattcctggtgtagcggtggaatgcgcagatatcaggaggaacaccgatggcgaaggcaggtctctgggcagtaactgacgctgaggagcgaaagcatgggtagcgaacaggattagataccctggtagtccatgccgtaaacggtgggcgctaggtgtgagtcccttccacggggttcgtgccgtagctaacgcattaagcgccccgcctggggagtacggccgcaaggctaaaactcaaaggaattgacgggggcccgcacaagcggcggagcatgtggattaattcgatgcaacgcgaagaaccttacctgggcttgacatacaccggaccgggccagagatggtctttcccttgtggctggtgtacaggtggtgcatggttgtcgtcagctcgtgtcgtgagatgttgggttaagtcccgcaacgagcgcaacccttgtcttatgttgccagcatttggttggggactcatgagagactgccggggttaactcggaggaaggtggggatgacgtcaaatcatcatgccccttatgtccagggcttcacacatgctacaatggtcggtacaacgcgcagcgatactgtgaggtggagctaatcgcctaaagccggccttagttcggattggggtctgcaactcgaccccatgaagtcggagtcgctagtaatcgcagatcagcaacgctgcggtgaatacgttcccgggccttgtacacaccgcccgtcacgtcatgaaagttggtaacacccgaagccagcggcccaaacgtgttagggagctgtcgaaggtgggatcggcgattgggacgaagtcgtaacaaggtagccgtaccggaaggtgcggctggatcac

SEQ ID NO: 685 - DNA, 1420 bp, Corynebacterium argentoratense
  modified_base (776)..(776): a, c, t, g, unknown or other
  modified_base (1061)..(1061): a, c, t, g, unknown or other
  modified_base (1365)..(1365): a, c, t, g, unknown or other
cgaacggaaaggcctaagacttgcttgggtactcgagtggcgaacgggcccattaacacgtgagtgatctgccctcaacttcgggataagcctgggaaactgggtctaatactggataggaccatcctttagtgtgtgatggtggaaagttttttcggttggggatgagctcgcggcctatcagcttgttggtggggtaatggcctaccaaggcgtcgacgggtagccggcctgacagggtgtacggccacattgggactgagacacggcccagactcctacaggaggcagcagtggggaatattgcacaatgggcggaagcctgatgcagcgacgccgcgtgagggatgacggccttcgggttgtaaacctctttcgacagggacgaagcttttgtgacggtgacctgtataagaaagcaccggctaactacgtgccaagcagccgcggtaatacgttacgggtgcgagcgttgtccggaattactgggcgtaaagagctcgtagcgtggtttgtcgcgtcgtctgtgaaattccggggcttaactccgggcgtgcaggcgatacgggcataacttgagtgctgtaggggagactggaattcctggtgtaacggtgaaatgcgcatatatcaggaggaacaccgatggcgaaagcaggtctctgggcagtaactgacgctgaggagcgaaagcatggggagcgaacaggattagataccctggtagttcatgccgtaaacggtgggcgctaggtgtaggggacttccacgtcttntgtgccgtagctaacgcattaagcgccccgcctggggagtacggccgcaaggctaaaactcaaaggaattgacgggggcccgcacaagcggcggagcatgtggattaattcgatgcaacgcgaagaaccttacctgggcttgacatatacaggatcgctgcagagatgtagtttcccttgtggtctgtatacaggtggtgcatggttgtcgtcagctcgtgtcgtgagatgttgggttaagtcccgcaacgagcgcaacccttgtcttatgttgccagcacactntggtggggactcatgagagactgccggggttaactcggaggaaggtggggatgacgtcaaatcatcatgccccttatgtccagggcttcacacatgctacaatggtcggtacaacgcgctgcgagcctgtgagggtgagcgaatcgctgaaagccggcctcagttcggattggggtctgcaactcgaccccatgaagtcggagtcgctagtaatcgcagatcagcaacgctgcggtgaatacgttcccgggccttgtacacaccgcccgtcaagtcaccgaaagttggtaacacccgaaaaccngtggcctaacccttgtggagggagctgtcgaaggtgggattcggcgattggtcta

SEQ ID NO: 686 - DNA, 1482 bp, Corynebacterium atypicum
gacgaacgctggcggcgtgcttaacacatgcaagtcgtacggaaaggccctgcttttgtggggtgctcgagtggcgaacgggtgagtaacacgtgggtgatctgccctgtacttcgggataagcttgggaaactgggtctaataccggataggactgcgctgtgggtggtgtggtggaaagctttttgcggtatgggatgagctcgcggcctatcagtttgttggtggggtaatggcctaccaaggcgtcgacgggtagccggcctgagagggtgatcggccacattgggactgagatacggcccagactcctgcgggaggcagcagtggggaatattgcacaatgggcgcaagcctgatgcagcgacgccgcgtgggggatgacggccttcgggttgtaaacctctttcgactatgacgaagcctttttggtgacggtagtggtagaagaagcaccggctaactacgtgccagcagccgcggtaatacgtagggtgcgagcgttgtccggatttactgggcgtaaagggctcgtaggtggtttgtcgcgtcgtctgtgaaattccggggcttaacttcgggcgtgcaggcgatacgggcataacttgagtgctgtaggggtaactggaattcctggtgtagcggtggaatgcgcagatatcaggaggaacaccgatggcgaaggcaggttactgggcagttactgacgctgaggagcgaaagcatggggagcgaacaggattagataccctggtagtccatgctgtcaacggtgggcgctaggtgtggggatcttccacggtccctgtgccgtagctaacgttttaagcgccccgcctggggagtacggccgcaaggctaaaactcaaaggaattgacgggggcccgcacaagcggcggagcatgtggattaattcgatgcaacgcgaagaaccttacctgggtttgatatacatcagatcgggccagagatggtctttccctttgtggttggtgtacaggtggtgcatggttgtcgtcagctcgtgtcgtgagatgttgggttaagtcccgcaacgagcgcaacccttgtcttgtgttgccagcatttggttggggactcacgagagactgccggggtgaactcggaggaaggtggggatgacgtcaaatcatcatgccccttatgtccagggcttcacacatgctacaatggtcggtacagtaggttgcgataccgtgaggtggagctaatcctcgtgaaagccggtcgtagttcggattgaggtctgcaactcgacctcatgaagtcggagtcgctagtaatcgcagatcagcagtgctgcggtgaatacgttcccgggccttgtacacaccgcccgtcacgtcatgaaagtcggtaacacccgaagcccacggcctaaccttgttgtaaggggggagtggtcgaaggtgggatcggcgattgggacgaagtcgtaacaaggtagccgtaccggaagg

SEQ ID NO: 687 - DNA, 1522 bp, Corynebacterium aurimucosum
tttttgtggagagtttgatcctggctcaggacgaacgctggcggcgtgcttaacacatgcaagtcgaacggaaaggcctcagcttgctggggtactcgagtggcgaacgggtgagtaacacgtgggtgatctgccttgcactctgggataagcttgggaaactgggtctaataccggatatgaactgcctttagtgtggtggttggaaagttttttcggtgcaagatgagctcgcggcctatcagcttgttggtggggtaatggcctaccaaggcgtcgacgggtagccggcctgagagggtgtacggccacattgggactgagatacggcccagactcctacgggaggcagcagtggggaatattgcacaatgggcggaagcctgatgcagcgacgccgcgtgggggatgacggccttcgggttgtaaactcctttcgacagggacgaagcgttatgtgacggtacctgtataagaagcaccggctaactacgtgccagcagccgcggtaatacgtagggtgcgagcgttgtccggaattactgggcgtaaagagctcgtaggtggtttgtcgcgtcgtctgtgaaattccggggcttaacttcgggcgtgcaggcgatacgggcataacttgagtgctgtaggggagactggaattcctggtgtagcggtgaaatgcgcagatatcaggaggaacaccgatggcgaaggcaggtctctgggcagttactgacgctgaggagcgaaagcatgggtagcaaacaggattagataccctggtagtccatgccgtaaacggtgggcgctaggtgtagggggcttccacgtcttctgtgccgtagctaacgcattaagcgccccgcctggggagtacggccgcaaggctaaaactcaaaggaattgacgggggcccgcacaagcggcggagcatgtggattaattcgatgcaacgcgaagaaccttacctgggcttgacatacaccagattgctgcagagatgtagtgtcccttgtggttggtgtacaggtggtgcatggttgtcgtcagctcgtgtcgtgagatgttgggttaagtcccgcaacgagcgcaacccttgtcttatgttgccagcatttggttggggactcatgagagactgccggggttaactcggaggaaggtggggatgacgtcaaatcatcatgccccttatgtccagggcttcacacatgctacaatggtcggtacaacgcgcagcgacactgtgaggtggagcgaatcgctgaaagccggccttagttcggattggggtctgcaactcgaccccatgaagtcggagtcgctagtaatcgcagatcagcaacgctgcggtgaatacgttcccgggccttgtacacaccgcccgtcacgtcatgaaagttggtaacacccgaagccagtggcctaaacttgttagggagctgtcgaaggtgggatcggcgattgggacgaagtcgtaacaaggtacccgtaccggaaggtgcgggtggatcacctcctttct

SEQ ID NO: 688 - DNA, 1327 bp, Corynebacterium bovis
gacgaacgctggcggcgtgcttaacacatgcaagtcgaacgagtggcgaacgggtgagtaacacgtgggtgatctgccctgcactctgggataagcctgggaaactgggtctaataccggatagggaaagcggtgcaggatgagcccgcggcctatcagcttgttggtggggtaatggcctaccaaggcggcgacgggtagccggcctgagagggtgtacggccacattgggactgagacacggcccagactcctacgggaggcagcagtggggaatattgcacaatgggcgcaagcctgatgcagcgacgccgcgtgggggatgacggccttcgggttgtaaacccctttcggcagggacgatgacggtacctgcataagaagcaccggctaactacgtgccagcagccgcggtaatacgtagggtgcgagcgttgtccggaattactgggcgtaaagagctcgtaggtggtttgtcgcgtcgtctgtgaaatcccggggcttaactccgggcgtgcaggcgatacgggcaaacttgagtgctgtaggggagactggaattcctggtgtagcggtgaaatgcgcagatatcaggaggaacaccgatggcgaaggcaggtctctgggcagactgacgctgaggagcgaaagcatgggtagcgaacaggattagataccctggtagtccatgccgtaaacggtgggcgctaggtgtggggatttccgtgccgtagctaacgcattaagcgccccgcctggggagtacggccgcaaggctaaaactcaaaggaattgacgggggcccgcacaagcggcggagcatgtggattaattcgatgcaacgcgaagaaccttacctgggcttgacatgcacaggtggtgcatggttgtcgtcagctcgtgtcgtgagatgttgggttaagtcccgcaacgagcgcaacccttgtcttgtgttgccagcacgtggggactcgcgagagactgccggggttaactcggaggaaggtggggatgacgtcaaatcatcatgccccttatgtccagggcttcacacatgctacaatggtcggcagtgggttgcgatgccgcgaggctcagctaatcccttccggtctcagttcggatggagtctgcaactcgactccagaagtcggagtcgctagtaatcgcagatcagcaacgctgcggtgaatacgttcccgggccttgtacacaccgcccgtcacgtcatgaaagttggtaacacccgaagccggtgcccagggagccgtcgaaggtgggatcggcgattgggacgaagtcgtaacaaggtagccgtaccggaagg

SEQ ID NO: 689 - DNA, 1497 bp, Corynebacterium canis
gacgaacgctggcggcgtgcttaacacatgcaagtcgtacggaaaggccctggctttggttggggtgctcgagtggcgaacgggtgagtaacacgtgggtgatctgccctgcactttgggataagcctgggaaactgggtctaatactggataggaccatgcttttgtgtgtcatggtggaaaggcttctgttttgggggctggtgtgggatgagcttgcggcctatcagcttgttggtggggtaatggcctaccaaggcgtcgacgggtagccggcctgagagggtgtacggccacattgggactgagatacggcccagactcctgcgggaggcagcagtggggaatattgcacaatgggcgcaagcctgatgcagcgacgccgcgtgagggatgacggccttcgggttgtaaacctctttcgctggggacgaagcttttttggtgacggtacctggagaagaagcaccggctaactacgtgccagcagccgcggtaatacgtagggtgcgagcgttgtccggaattactgggcgtaaagagctcgtaggtggtttgtcgcgtcgtctgtgaaattccggggcttaacttcgggcgtgcaggcgatacgggcataacttgagtgctgtaggggagactggaattcctggtgtagcggtgaaatgcgcagatatcaggaggaacaccgatggcgaaggcaggtctctgggcagtaactgacgctgaggagcgaaagcatgggtagcgaacaggattagataccctggtagtccatgccgtaaacggtgggcgctaggtgtgggggtcttccacgacttctgtgccgtagctaacgctttaagcgccccgcctggggagtacggccgcaaggctaaaactcaaaggaattgacgggggcccgcacaagcggcggagcatgtggattaattcgatgcaacgcgaagaaccttacctgggcttgacatatgcaggatcgcgccagagatggtgtttcccttgtggcttgtatacaggtggtgcatggttgtcgtcagctcgtgtcgtgagatgttgggttaagtcccgcaacgagcgcaacccttgtcttatgttgccagcacgtgatggtggggactcatgagagactgccggggtcaactcggaggaaggtggggatgacgtcaaatcatcatgccccttatgtccagggcttcacacatgctacaatggtcggtacagtgggttgcgagaccgtgaggtggagcgaatccctttgaaagccggcctcagttcggattggggtctgcaactcgaccccatgaagtcggagtcgctagtaatcgcagatcagcaatgctgcggtgaatacgttcccgggccttgtacacaccgcccgtcacgtcatgaaagttggtaacacccgaagcccatggcctaaccagcgtttgctggggggagtggtcgaaggtgggattggcgattgggacgaagtcgtaacaaggtagccgtaccggaagg

SEQ ID NO: 690 - DNA, 1343 bp, Corynebacterium casei
  modified_base (364)..(364): a, c, t, g, unknown or other
  modified_base (369)..(369): a, c, t, g, unknown or other
  modified_base (409)..(409): a, c, t, g, unknown or other
  modified_base (463)..(463): a, c, t, g, unknown or other
  modified_base (608)..(608): a, c, t, g, unknown or other
aacgggtgagtaacacgtgggtgatctgccctgcactttgggataagcttgggaaactgggtctaataccgaatatgaccacttcttggatgttgtggtggaaagcttttgcggtgtgggatgagcctgcggcctatcagcttgttggtggggtaatggcctaccaaggcggcgacgggtatccggcctgagagggtgtacggacacattgggactgagatacggcccagactcctacgggaggcagcagtggggaatattgcacaatgggcgcaagcctgatgcagcgacgccgcgtgggggatgaaggccttcgggttgtaaactcctttcgctatcgacgaagccacttgtggtgacggtnggtanataagaagcaccggctaactacgtgccagcagccgcggtnatacgtagggtgcaagcgttgtccggaattactgggcgtaaagagctcgtgggnggtttgtcgcgtcgtctgtgaaatcccggggcttaacttcgggcgtgcaggcgatacgggcataacttgagtgctgtaggggagactggaattactggtgttgcggggaaatgcgcatatatcaagacgaacacctatggcgaangcaggtctctgggcagtaactgactctgaggagcgaaagcatgggtagcgaacaggattagataccctggtagtccatgccgtaaacggtgggcgctaggtgtagggggcttccacgtcttctgtgccgtagctaacgcattaagcgccccgcctggggagtacggccgcaaggctaaaactcaaaggaattgacgggggcccgcacaagcggcggagcatgtggattaattcgatgcaacgcgaagaaccttacctgggcttgacatgtaccggattgggctagagatagtctttcccttgtggtcggtatacaggtggtgcatggttgtcgtcagctcgtgtcgtgagatgttgggttaagtcccgcaacgagcgcaacccttgtcttatgttgccagcacgttatggtgggaactcatgagagactgccggggttaactcggaggaaggtggggatgacgtcaaatcatcatgccccttatgtccagggcttcacacatgctacaatggtcgatacaatgggcagcgacatcgtgaggtgaagcgaatccctgaaagtcggccttagttcggattggggtctgcaactcgaccccatgaagtcggagtcgctagtaatcgcagatcagcaacgctgcggtgaatacgttcccgggccttgtacacaccgcccgtcacgtcatgaaagttggtaacacccgaagccagtggcctaaacttgttagggagctgt

SEQ ID NO: 691 - DNA, 1404 bp, Corynebacterium confusum
gagtttgatcctggctcaggacgaacgctggcggcgtgcttaacacatgcaagtcgaacggaaaggcttcagcttgctggagtactcgagtggcgaacgggtgagtaacacgtgggtgatctgccctgcacttcgggataagcctgggaaactgggtctaataccggataggaccgcactttggtgtgtgtggtggaaagttttttcggtgtaggatgagcccgcggcctatcagcttgttggtggggtaatggcctaccaaggcggcgacgggtagccggcctgagagggtggacggccacattgggactgagatacggcccagactcctacgggaggcagcagtggggaatattgcacaatgggcggaagcctgatgcagcgacgccgcgtgggggatgacggccttcgggttgtaaactcctttcgccagggacgaagcgtttttgtgacggtacctggataagaagcaccggctaactacgtgccagcagccgcggtaatacgtagggtgcgagcgttgtccggaattactgggcgtaaagagctcgtaggtggtttgtcgcgtcgtctgtgaaattccggggcttaactccgggcgtgcaggcgatacgggcaggcttgagtactgtaggggtaactggaattcctggtgtagcggtgaaatgcgcagatatcaggaggaacaccgatggcgaaggcaggttactgggcagttactgacgctgaggagcgaaagcatgggtagcgaacaggattagataccctggtagtccatgccgtaaacggtgggcgctaggtgtgagacccttccacgggttttgtgccgtagctaacgcattaagcgccccgcctggggagtacggccgcaaggctaaaactcaaaggaattgacgggggcccgcacaagcggcggagcatgtggattaattcgatgcaacgcgaagaaccttacctgggcttgacatatttaggttcgcggcagagatgtcgtttccctttgtggcctttatacaggtggtgcatggttgtcgtcagctcgtgtcgtgagatgttgggttaagtcccgcaacgagcgcaacccttgtcttatgttgccagcatttggttggggactcatgagagactgccggggttaactcggaggaaggtggggatgacgtcaaatcatcatgccccttatgtccagggcttcacacatgctacaatggtcaatacaatgcgttgcgacactgtgaggtggagctaatcgcttaaagttggccttagttcggattggggtctgcaactcgaccccatgaagtcggagtcgctagtaatcgcagatcagcaatgctgcggtgaatacgttcccgggccttgtacacaccgcccgtcacgtcatgaaagttggtaacacccgaa

SEQ ID NO: 692 - DNA, 1483 bp, Corynebacterium coyleae
  modified_base (29)..(29): a, c, t, g, unknown or other
  modified_base (51)..(51): a, c, t, g, unknown or other
  modified_base (59)..(59): a, c, t, g, unknown or other
  modified_base (108)..(108): a, c, t, g, unknown or other
  modified_base (362)..(362): a, c, t, g, unknown or other
  modified_base (959)..(959): a, c, t, g, unknown or other
  modified_base (962)..(962): a, c, t, g, unknown or other
atgaacgctggcggcgtgcttaacacatncaagtcgaacggaaaggcctcngcttgcangggtactcgagtggcgaacgggtgagtaacacgtgggtgatctgccccncacttcgggataagcctgggaaactgggtctaataccggataggaccacttcttggaggttgtggtggaaagttttttcggtgtgggatgagctcgcggcctatcagcttgttggtggggtaatggcctaccaaggcgtcgacgggtagccggcctgagagggtgtacggccacattgggactgagatacggcccagactcctacgggaggcagcagtggggaatattgcacaatgggcgcaagcctgatgcancgacgccgcgtgggggatgacggccttcgggttgtaaactcctttcgctagggacgaagcgcaagtgacggtacctagagaagaagcaccggctaactacgtgccagcagccgcggtaatacgtagggtgcgagcgttgtccggaattactgggcgtaaagagctcgtaggtggtttgtcgcgtcgtttgtgtaagcccgcagcttaactgcgggactgcaggcgatacgggcataacttgagtgctgtaggggagactggaattcctggtgtagcggtggaatgcgcagatatcaggaggaacaccgatggcgaaggcaggtctctgggcagtaactgacgctgaggagcgaaagcatggggagcgaacaggattagataccctggtagtccatgccgtaaacggtgggcgctaggtgtgagtcccttccacggggttcgtgccgtagctaacgcattaagcgccccgcctggggagtacggccgcaaggctaaaactcaaaggaattgacgggggcccgcacaagcggcggagcatgtggattaattcgatgcaacgcgaagaaccttacctgggcttgacatacaccagatcgncgnagagatgcgctttccctttgtggttggtgtacaggtggtgcatggttgtcgtcagctcgtgtcgtgagatgttgggttaagtcccgcaacgagcgcaacccttgtcttatgttgccagcacgtgatggtggggactcatgagagactgccggggttaactcggaggaaggtggggatgacgtcaaatcatcatgccccttatgtccagggcttcacacatgctacaatggtcggtacaacgcgtttgcgagcctgtgagggtgtgctaatcgctgaaagccggccttagttcggattggggtctgcaactcgaccccatgaagtcggagtcgctagtaatcgcagatcagcaacgctgcggtgaatacgttcccgggccttgtacacaccgcccgtcacgtcatgaaagttggtaacacccgaagccagtggcctgtcatgggagctgtcgaaggtgggatcggcgattgggacgaagtcgtaacaaggtagccgtaccggaatgcggctggatcacctcc

SEQ ID NO: 693 - DNA, 1529 bp, Corynebacterium diphtheriae
tttttatggagagtttgatcctggctcaggacgaacgctggcggcgtgcttaacacatgcaagtcgaacggaaaggcctagcttgctaggtactcgagtggcgaacgggtgagtaacacgtgggtgatctgcctcgtacttcgggataagcctgggaaactgggtctaatactggataggaccatgctttagtgtgtgtggtggaaagttttttcggtacgagatgagcccgcggcctatcagcttgttggtggggtaatggcctaccaaggcgtcgacgggtagccggcctgagagggtggacggccacattgggactgagatacggcccagactcctactggaggcagcagtggggaatattgcacaatgggcgcaagcctgatgcagcgacgccgcgtgggggatgacggccttcgggttgtaaacctctttcgctagggacgaagcttttgtgacggtacctagataagaagcaccggctaactacgtgccagcagccgcggtaatacgtagggtgcgagcgttgtccggaattactgggcgtaaagagctcgtaggtggtttgtcgcgtcgtctgtgaaattccggggcttaacttcgggcgtgcaggcgatacgggcataacttgagtgctgtaggggagactggaattcctggtgtagcggtggaatgcgcagatatcaggaggaacaccgatggcgaaggcaggtctctgggcagtaactgacgctgaggagcgaaagcatggggagcgaacaggattagataccctggtagtccatgccgtaaacggtgggcgctaggtgtgagggtcttccacgactttcgtgccgtagctaacgcattaagcgccccgcctggggagtacggccgcaaggctaaaactcaaaggaattgacgggggcccgcacaagcggcggagcatgtggattaattcgatgcaacgcgaagaaccttacctgggcttgacatatgcaggatcggcgtagtgatacgttttcccttgtggtctgtatacaggtggtgcatggttgtcgtcagctcgtgtcgtgagatgttgggttaagtcccgcaacgagcgcaacccttgtcttatgttgccagcacgtgatggtggggactcatgagagactgccggggttaactcggaggaaggtggggatgacgtcaaatcatcatgccccttatgtccagggcttcacacatgctacaatggtcggtacaacgcgctgcgagcctgtgagggtgagcgaatcgctgaaagccggcctcagttcggattggggtctgcaactcgaccccatgaagtcggagtcgctagtaatcgcagatcagcaacgctgcggtgaatacgttcccgggccttgtacacaccgcccgtcacgtcatgaaagttggtaacacccgaagccagtggcctaacccttgtggggggagctgtcgaaggtgggatcggcgattgggacgaagtcgtaacaaggtagccgtaccggaaggtgcggctggatcacctcctttctaaggag

SEQ ID NO: 694 - DNA, 1420 bp, Corynebacterium durum
ctcaggacgaacgctggcggcgtgcttaacacatgcaagtcgaacgaaaagccctgccaccttggtggtgggtactcgagtggcgaacgggtgagtaacacgtgggtgatctgccccgcactgtgggataagcctgggaaactgggtctaataccacatacgaccatggcgtaggggtcatggtggaaagccttattgcggtgtgggatgagcccgcggcctatcagcttgttggtggggtaatggcctaccaaggcggcgacgggtagccggcctgagagggtggacggccacattgggactgagacacggcccagactctacgggaggcagcagtggggaatattgcacaatgggcgcaagcctgatgcagcgacgccgcgtgggggatkgaaggcttcgggttgtaaactcctttcgcccgggacgaagcccacctggtgggtgacggtaccgtggagaagaagcaccggctaactacgtgccagcagccgcggtaatacgtagggtgcaagcgttgtccggatttactgggcgtaaagagctcgtaggtggtgtgtcgcgtcgtctgtgaaattccggggcttaactccgggcgtgcaggcgatacgggcacgactagagtgctgtaggggtaactggaattcctggtgtagcggtgaaatgcgcagatatcaggaggaacaccgatggcgaaggcaggttactgggcagttactgacgctgaggagcgaaagcatggggagcgaacaggattagataccctggtagtccatgctgtaaacggtgggcgctaggtgtgggctgtgtgtttgcagtctgtgccgtagctaacgcattaagcgccccgcctggggagtacggccgcaaggctaaaactcaaaggaattgacgggggcccgcacaagcggcggagcatgtggattaattcgatgcaacgcgaagaaccttacctgggtttgacatgcaccagatcggcgtagagatacgtcctcccttgtggttggtgcacaggtggtgcatggttgtcgtcagctcgtgtcgtgagatgttgggttaagtcccgcaacgagcgcaacccttgtcttatgttgccagcacatttttggtggggactcatgagaaactgccggggtcaactcggaggaaggtggggatgacgtcaaatcatcatgccctttatacccagggcttcacacatgctacaatggtcggtacaacgggttgcgacactgtgaagtgaagctaatctctgaaagccggcctcagttcggattggggtctgcaactcgaccccatgaagtcggagtcgctagtaatcgcagatcagcaacgctgcggtgaatacgttcccgggccttgtacacaccgcccgtcacgtcatgaaagttggtaacacccgaagcccatggcctaacca

SEQ ID NO: 695 - DNA, 1524 bp, Corynebacterium efficiens
ttttgtggagagtttgatcctggctcaggacgaacgctggcggcgtgcttaacacatgcaagtcgaacgatgaagccctgcttgcagggtggattagtggcgaacgggtgagtaacacgtgggtgatctgccccgcacttcgggataagcctgggaaactgggtctaataccggatacgaccccctggtaggtcagggggtggaaagattttatcggtgtgggatgagcctgcggcctatcagcttgttggtggggtaatggcctaccaaggcgtcgacgggtagccggcctgagagggtgatcggccacattgggactgagacacggcccagactcctacgggaggcagcagtggggaatattgcacaatgggcgcaagcctgatgcagcgacgccgcgtgggggatgacggccttcgggttgtaaactcctttcgacagggacgaagcttttgtgacggtacctgtagaagaagcaccggctaactacgtgccagcagccgcggtaatacgtagggtgcgagcgttgtccggaattactgggcgtaaagagctcgtaggtggtttgtcgcgtcgtctgtgaaatcccggggcttaacttcgggcgtgcaggcgatacgggcataacttgagtgctgtaggggagactggaattcctggtgtagcggtgaaatgcgcagatatcaggaggaacaccaatggcgaaggcaggtctctgggcagtaactgacgctgaggagcgaaagcatgggtagcgaacaggattagataccctggtagtccatgccgtaaacggtgggcgctaggtgtaggggacttccacgtcttctgtgccgcagctaacgcattaagcgccccgcctggggagtacggccgcaaggctaaaactcaaaggaattgacgggggcccgcacaagcggcggagcatgtggattaattcgatgcaacgcgaagaaccttacctgggcttgacatacactagatcgctgcagagatgtagcttcccttgtggctggtgtacaggtggtgcatggttgtcgtcagctcgtgtcgtgagatgttgggttaagtcccgcaacgagcgcaacccttgtcttatgttgccatcacgtgatggtgggcactcatgagagactgccggggttaactcggaggaaggtggggatgacgtcaaatcatcatgccccttatgtccagggcttcacacatgctacaatggtcggtacagcgagttgccacaccgtgaggtggagctaatctctcaaagccggcctcagttcggattggggtctgcaactcgaccccatgaagtcggagtcgctagtaatcgcagatcagcaacgctgcggtgaatacgttcccgggccttgtacacaccgcccgtcacgtcatgaaagttggtaacacccgaagccagtggcccaacccgtaagggggggagctgtcgaaggtgggatcggcgattgggacgaagtcgtaacaaggtagccgtaccggaaggtgcggctggatcacctcctttct

SEQ ID NO: 696 - DNA, 1475 bp, Corynebacterium falsenii
cgaacgctggcggcgtgcttaacacatgcaagtcgaacggaaaggcccttgcttgcaggggtactcgagtggcgaacgggtgagtaacacgtgggtgatctgccttgtacttcgggataagcctgggaaactgggtctaataccggataggaccatgctttagtgtgtgtggtggaaagttttttcggtacaagatgagcccgcggcctatcagcttgttggtggggtaatggcctaccaaggcgacgacgggtagccggcctgagagggtgtacggccacattgggactgagacacggcccagactcctacgggaggcagcagtggggaatattgcacaatgggcgcaagcctgatgcagcgacgccgcgtgagggatgacggccttcgggttgtaaacctctttcgctagggaagaagccacttgtggtgacggtacctggataagaagcaccggctaactacgtgccagcagccgcggtaatacgtagggtgcgagcgttgtccggaattactgggcgtaaagagctcgtaggtggtttgtcgcgtcgtctgtgaaatcccggggcttaactccgggcgtgcaggcgatacgggcataactggagtgctgtaggggagactggaattcctggtgtagcggtgaaatgcgcagatatcaggaggaacaccgatggcgaaggcaggtctctgggcagtaactgacgctgaggagcgaaagcatgggtagcgaacaggattagataccctggtagtccatgccgtaaacggtgggcgctaggtgtggggatctttctacgatttccgtgccgtagctaacgcattaagcgccccgcctggggagtacggccgcaaggctaaaactcaaaggaattgacgggggcccgcacaagcggcggagcatgtggattaattcgatgcaacgcgaagaaccttacctgggcttgacatatgcaggatcgctgcagagatgtagtttcccttgtggtctgtatacaggtggtgcatggttgtcgtcagctcgtgtcgtgagatgttgggttaagtcccgcaacgagcgcaacccttgtcttgtgttgccagcacgttatggtggggactcgcgagagactgccggggttaactcggaggaaggtggggatgacgtcaaatcatcatgccccttatgtccagggcttcacacatgctacaatggtcggtacagagggtcgcgataccgtgaggtggagctaatccctgaaagccggtctcagttcggattggagtctgcaactcgactccatgaagtcggagtcgctagtaatcgcagatcagcaacgctgcggtgaatacgttcccgggccttgtacacaccgcccgtcacgtcatgaaagttggtaacacccgaagccagtggcccaaactcgttagggagctgtcgaaggtgggatcggcgattgggacgaagtcgtaacaaggtagccgtaccggaaggt

SEQ ID NO: 697 - DNA, 1489 bp, Corynebacterium flavescens
atcgtggagagtttgatcctggctcaggacgaacactggcggcgtgcttaacacatgcaagtcgaacggaaagacccctagcttgctgggggtactcgagtggcgaacgggtgagtaacacgtgggtgatctgccctgcacttcgggataagcttgggaaactgggtctaataccggatatgaacggtctttggtgtgattgttggaaagattttttcggtgtgggatgagctcgcggcctatcagcttgttggtggggtaatggcctaccaaggcgtcgacgggtagccggcctgagagggtgtacggccacattgggactgagatacggcccagactcctacgggaggcagcagtggggaatattgcacaatgggcgcaagcctgatgcagcgacgccgcgtgggggatgaaggccttcgggttgtaaactcctttcgctagggacgaagccttttttaaggtgacggtacctggataagaagcaccggctaactacgtgccagcagccgcggtaatacgtagggtgcaagcgttgtccggaattactgggcgtaaagagctcgtaggtggtttgtcgcgtcgtctgtgaaattccggggcttaactccgggcgtgcaggcgatacgggcataacttgagtgctgtaggggagactggaattcctggtgtagcggtgaaatgcgcagatatcaggaggaacaccgatggcgaaggcaggtctctgggcagtaactgacgctgaggagcgaaagcatgggtagcgaacaggattagataccctggtagtccatgccgtaaacggtgggcgctaggtgtagggggcttccacgtcttctgtgccgtagctaacgcattaagcgccccgcctggggagtacggccgcaaggctaaaactcaaaggaattgacgggggcccgcacaagcggcggagcatgtggattaattcgatgcaacgcgaagaaccttacctgggcttgacatatgcaggattgggtcagagatggcttgtcccttgtggtctgtatacaggtggtgcatggctgtcgtcagctcgtgtcgtgagatgttgggttaagtcccgcaacgagcgcaacccttgtcttatgttgccagcacgttatggtggggactcatgagagactgccggggttaactcggaggaaggtggggatgacgtcaaatcatcatgccccttatgtccagggcttcacacatgctacaatggtcggtacaatgcgttgcgatactgtgaggtggagcgaatcgtgtaaagccggccttagttcggattggggtctgcaactcgaccccatgaagtcggagtcgctagtaatcgcagatcagcaatgctgcggtgaatacgttcccgggccttgtacacaccgcccgtcacgtcatgaaagttggtaacacccgaagccagtggcctaaacttgttagggagctgtcgaaggtgggatcggcgattgggacgaagtcgtaacaa

SEQ ID NO: 698 - DNA, 1529 bp, Corynebacterium genitalium
tttttgtggagagtttgatcctggctcaggatgaacgctggcggcgtgcttaacacatgcaagtcgaacggaaaggccgaagcttgcttcggtactcgagtggcgaacgggtgagtaacacgtgggtgatctgccctgcactttgggataagcctgggaaactgggtctaataccagataggaccacgtcttggatggtgtggtggaaagttttttcggtgtgggatgagctcgcggcctatcagcttgttggtggggtaatggcctaccaaggcgtcgacgggtagccggcctgagagggtgtacggccacattgggactgagatacggcccagactcctacgggaggcagcagtggggaatattgcacaatgggcgcaagcctgatgcagcgacgccgcgtgggggatgacggccttcgggttgtaaactcctttcgccagggacgaagcgtcagtgacggtacctggataagaagcaccggctaactacgtgccagcagccgcggtaatacgtagggtgcgagcgttgtccggaattactgggcgtaaagagctcgtaggtggtttgtcgcgtcgtttgtgtaataccgcagcttaactgcggggttgcaggcgatacgggcataacttgagtgctgtaggggagactggaattcctggtgtagcggtggaatgcgcagatatcaggaggaacaccgatggcgaaggcaggtctctgggcagtaactgacgctgaggagcgaaagcatgggtagcgaacaggattagataccctggtagtccatgccgtaaacggtgggcgctaggtgtgagtcccttccacggggttcgtgccgtagctaacgcattaagcgccccgcctggggagtacggccgcaaggctaaaactcaaaggaattgacgggggcccgcacaagcggcggagcatgtggattaattcgatgcaacgcgaagaaccttacctgggcttgacatacaccggatcgctgcagagatgtagcttcccttgtggctggtgtacaggtggtgcatggttgtcgtcagctcgtgtcgtgagatgttgggttaagtcccgcaacgagcgcaacccttgtcttatgttgccagcatttggttggggactcatgagagactgccggggttaactcggaggaaggtggggatgacgtcaaatcatcatgccccttatgtccagggcttcacacatgctacaatggtcggtacaacgcgcagctacttcgtgaggaggcgctaatcgctctaaagccggccttagttcggattggggtctgcaactcgaccccatgaagtcggagtcgctagtaatcgtagatcagcaacgctgcggtgaatacgttcccgggccttgtacacaccgcccgtcacgtcatgaaagttggtaacacccgaagccagtggcccaaacttgttagggagctgtcgaaggtgggatcggcgattgggacgaagtcgtaacaaggtagccgtaccggaaggtgcggctggatcacctcctttctaaggagc

SEQ ID NO: 699 - DNA, 1466 bp, Corynebacterium glaucum
ggcgtgctaacacatgcaagtcgaacggaaaggccgaagcttgctttggtactcgagtggcgaacgggtgagtaacacgtgggtgatctgccctgcactttgggataagcctgggaaactgggtctaataccagataggaccacggtgtggtgatcgtggtggaaagttttttcggtgtgggatgagctcgcggcctatcagcttgttggtggggtaatggcctaccaaggcgtcgacgggtagccggcctgagagggtgtacggccacattgggactgagatacggcccagactcctacgggaggcagcagtggggaatattgcacaatgggcgcaagcctgatgcagcgacgccgcgtgggggatgacggccttcgggttgtaaactcctttcgccaaagacgaattttgacggtatttggagaagaagcaccggctaactacgtgccagcagccgcggtaatacgtagggtgcgagcgttgtccggaattactgggcgtaaagagctcgtaggtggtttgtcgcgtcgtttgtggaataccggggcttaacttcggggttgcatacgatacgggcataacttgagtgctgtaggggagactggaattcctggtgtagcggtgaaatgcgcagatatcaggaggaacaccgatggcgaaggcaggtctctgggcagtaactgacgctgaggagcgaaagcatggggagcgaacaggattagataccctggtagtccatgccgtaaacggtgggcgctaggtgtgagtcccttccacggggttcgtgccgtagctaacgcattaagcgccccgcctggggagtacggccgcaaggctaaaactcaaaggaattgacgggggcccgcacaagcggcggagcatgtggattaattcgatgcaacgcgaagaaccttacctgggcttgacatacaccagatcgccgcagagatgtggtttcccttgtggttggtgtacaggtggtgcatggttgtcgtcagctcgtgtcgtgagatgttgggttaagtcccgcaacgagcgcaacccttgtcttatgttgccagcatgttgtggtggggactcatgagagactgccggggttaactcggaggaaggtggggatgacgtcaaatcatcatgccccttatgtccagggcttcacacatgctacaatggtcggtacaacgcgcttgcgagcctgtgagggtgagcgaatcgctgaaagccggtcgtagttcggattggggtctgcaactcgaccccatgaagtcggagtcgctagtaatcgcagatcagcaacgctgcggtgaatacgttcccgggccttgtacacaccgcccgtcacgtcatgaaagttggtaacacccgaagccagtggcctgtcaaaaggagctgtcgaaggtgggatcggcgattgggacgaagtcgtaacaaggtagccgtaccggaaggtgcggctggatcacct

SEQ ID NO: 700 - DNA, 1533 bp, Corynebacterium glucuronolyticum
ttttgttggagagtttgatcctggctcaggatgaacgctggcggcgtgcttaacacatgcaagtcgaacggaaaggctccagcttgctggggtgctcgagtggcgaacgggtgagtaacacgtaagtgatctgccctgcactgggggataagcttgggaaactgggtctaataccctataggaccgcatcgtggttggtgtggtggaaaggtttttctggtgtgggatgagcttgcggcctatcagcttgttggtggggtaatggcctaccaaggcggcgacgggtagccggcctgagagggtgtgcggccacattgggactgagatacggcccagactcctacgggaggcagcagtggggaattttgcacaatgggcggaagcctgatgcagcgacgccgtgtgggggatgaaggccttcgggttgtaaactcctttcgtcagggacgaagtttttttgacggtacctggataagaagcaccggctaactacgtgccagcagccgcggtaatacgtagggtgcgagcgttgtccggatttactgggcgtaaagggctcgtaggtggtgtgtcgcgtcgtctgtgtaatccaggggcttaacttttggttggcaggcgatacgggcattgcttgagtgctgtaggggagactggaattcctggtgtagcggtgaaatgcgcagatatcaggaggaacaccgatggcgaaggcaggtctctgggcagttactgacgctgaggagcgagagcatgggtagcgaacaggattagataccctggtagtctatgctgtaaacggtgggcgctaggtgtgagtcccttccacggggtttgtgccgtagctaacgctttaagcgccccgcctggggagtacggccgcaaggctaaaactcaaaggaattgacgggggcccgcacaagcggcggagcatgtggattaattcgatgcaacgcgaagaaccttacctgggcttgacatatgtgagattgggctagagatagttcgtcccttgtggctcatttacaggtggtgcatggttgtcgtcagctcgtgtcgtgagatgttgggttaagtcccgcaacgagcgcaacccttgtcttatgttgccagcacgttgtggtggggactcgtgagagactgccggggttaactcggaggaaggtggggatgacgtcaaatcatcatgccccttatgtccagggcttcacacatgctacaatggctggtacagtgcgtgtgcgacaccgtgaggtggagctaatcgcgaaagccagtctcagttcggattggggtctgcaactcgaccccatgaagtcggagtcgctagtaatcgcagatcagcagtgctgcggtgaatacgttcccgggccttgtacacaccgcccgtcacgtcatgaaagttggtaacacccgaagcccatggcccaaccggttttccggggggagtggtcgaaggtgggattggcgattgggacgaagtcgtaacaaggtagccgtaccggaaggtgcggctggatcacctcctttctaagg

SEQ ID NO: 701 - DNA, 1525 bp, Corynebacterium glutamicum
tgtggagagtttgatcctggctcaggacgaacgctggcggcgtgcttaacacatgcaagtcgaacgctgaaaccggagcttgctttggtggatgagtggcgaacgggtgagtaacacgtgggtgatctgccctacactttgggataagcctgggaaactgggtctaataccgaatattcacaccaccgtaggggtggtgtggaaagccttgtgcggtgtgggatgagcctgcggcctatcagcttgttggtggggtaatggcctaccaaggcgtcgacgggtagccggcctgagagggtgtacggccacattgggactgagacacggcccagactcctacgggaggcagcagtggggaatattgcacaatgggcgcaagcctgatgcagcgacgccgcgtgggggatgaaggccttcgggttgtaaactcctttcgctagggacgaagccttttaggtgacggtacctggagaagaagcaccggctaactacgtgccagcagccgcggtaatacgtagggtgcgagcgttgtccggaattactgggcgtaaagagctcgtaggtggtttgtcgcgtcgtctgtgaaatcccggggcttaacttcgggcgtgcaggcgatacgggcataacttgagtgctgtaggggagactggaattcctggtgtagcggtgaaatgcgcagatatcaggaggaacaccaatggcgaaggcaggtctctgggcagtaactgacgctgaggagcgaaagcatgggtagcgaacaggattagataccctggtagtccatgccgtaaacggtgggcgctaggtgtaggggtcttccacgacttctgtgccgcagctaacgcattaagcgccccgcctggggagtacggccgcaaggctaaaactcaaaggaattgacgggggcccgcacaagcggcggagcatgtggattaattcgatgcaacgcgaagaaccttacctgggcttgacatggaccggatcggcgtagagatacgttttcccttgtggtcggttcacaggtggtgcatggttgtcgtcagctcgtgtcgtgagatgttgggttaagtcccgcaacgagcgcaacccttgtcttatgttgccagcacattgtggtgggtactcatgagagactgccggggttaactcggaggaaggtggggatgacgtcaaatcatcatgccccttatgtccagggcttcacacatgctacaatggtcggtacagcgagttgccacaccgtgaggtggagctaatctcttaaagccggcctcagttcggattggggtctgcaactcgaccccatgaagtcggagtcgctagtaatcgcagatcagcaacgctgcggtgaatacgttcccgggccttgtacacaccgcccgtcacgtcatgaaagttggtaacacccgaagccagtggcccaaccttttaggggggagctgtcgaaggtgggatcggcgattgggacgaagtcgtaacaaggtagccgtaccggaaggtgcggctggatcacctcctttct

SEQ ID NO: 702 - DNA, 1489 bp, Corynebacterium hansenii
gctggcggcgtgcttaacacatgcaagtcgaacggtaaggccccagcttgctggggtacacgagtggcgaacgggtgagtaacacgtgggtgacctgccccgcacttcgggataagcctgggaaactgggtctaataccggataggaccgcatcgttgggatgtggtggaaagttttttcggtgtgggatgggcccgcggcctatcagcttgttggtggggtaatggcctaccaaggcggcgacgggtagccggcctgagagggtggacggccacattgggactgagacacggcccagactcctacgggaggcagcagtggggaatattgcacaatgggcggaagcctgatgcagcgacgccgcgtgggggatgacggccttcgggttgtaaactcctttcaccatcgacgaaggttttctgacggtagatggagaagaagcaccggctaactacgtgccagcagccgcggtaatacgtagggtgcgagcgttgtccggaattactgggcgtaaagagctcgtaggtggtttgtcgcgtcgtctgtgaaattccggggctcaactccgggcgtgcaggcgatacgggcataacttgagtactgtaggggagactggaattcctggtgtagcggtgaaatgcgcagatatcaggaggaacaccggtggcgaaggcgggtctctgggcagtaactgacgctgaggagcgaaagcatgggtagcgaacaggattagataccctggtagtccatgccgtaaacggtgggcgctaggtgtaggggtcttccacgacttctgtgccgtagctaacgcattaagcgccccgcctggggagtacggccgcaaggctaaaactcaaaggaattgacgggggcccgcacaagcggcggagcatgtggattaattcgatgcaacgcgaagaaccttacctgggcttgacatgtacgggatcgggccagagatggtctttcccttgtggctcgtatacaggtggtgcatggttgtcgtcagctcgtgtcgtgagatgttgggttaagtcccgcaacgagcgcaacccttgtcttatgttgccagcacgttatggtggggactcgtgagaaactgccggggtcaactcggaggaaggtggggatgacgtcaaatcatcatgccccttatgtccagggcttcacacatgctacaatggtcggtacagtgggttgcgatgccgtgaggcggagctaatcccttaaagccggtctcagttcggatcggggtctgcaactcgaccccgtgaagtcggagtcgctagtaatcgcagatcagcaacgctgcggtgaatacgttcccgggccttgtacacaccgcccgtcacgtcatgaaagtcggtaacacccgaagccagtggcccaaccttttttggggggagctgtcgaaggtgggatcggcgattgggacgaagtcgtaacaaggtagccgtaccggaaggtgcggctggatcacctcctttct

SEQ ID NO: 703 - DNA, 1460 bp, Corynebacterium imitans
aacgctggcggcgtgcttaacacatgcaagtcgaacggaaaggccgaagcttgcttcggtactcgagtggcgaacgggtgagtaacacgtgggtgatctgccctgtacttcgggataagcttgggaaactgggtctaataccggatatgacaatctcttggatggggttgtggaaagcttttgcggtatgggatgagctcgcggcctatcagcttgttggtggggtaatggcctaccaaggcgtcgacgggtagccggcctgagagggtgtacggccacattgggactgagatacggcccagactcctacgggaggcagcagtggggaatattgcacaatgggcgcaagcctgatgcagcgacgccgcgtgggggatgacggccttcgggttgtaaactcctttcgcaaccgacgaagcttttgtgacggtaggttgagaagaagcaccggctaactacgtgccagcagccgcggtaatacgtagggtgcgagcgttgtccggaattactgggcgtaaagagctcgtaggtggtttgtcgcgtcgtttgtggaataccgcagcttaactgcggggttgcaggcgatacgggcataacttgagtgctgtaggggagactggaattcctggtgtagcggtggaatgcgcagatatcaggaggaacaccgatggcgaaggcaggtctctgggcagtaactgacgctgaggagcgaaagcatggggagcgaacaggattagataccctggtagtccatgccgtaaacggtgggcgctaggtgtgagtcccttccacggggttcgtgccgtagctaacgcattaagcgccccgcctggggagtacggccgcaaggctaaaactcaaaggaattgacgggggcccgcacaagcggcggagcatgtggattaattcgatgcaacgcgaagaaccttacctgggcttgacatacaccggatcgctgcagagatgtagcttccctttgtggctggtgtacaggtggtgcatggttgtcgtcagctcgtgtcgtgagatgttgggttaagtcccgcaacgagcgcaacccttgtcttatgttgccagcatttggttggggactcatgagagactgccggggttaactcggaggaaggtggggatgacgtcaaatcatcatgccccttatgtccagggcttcacacatgctacaatggtcggtacaacgcgtttgcgagctcgtgagggtgggctaatcgctgaaagccggtcgtagttcggattggggtctgcaactcgaccccatgaagtcggagtcgctagtaatcgcagatcagcaacgctgcggtgaatacgttcccgggccttgtacacaccgcccgtcacgtcatgaaagttggtaacacccgaagcccatggcccaaacgtgttagggagtggtcgaaggtgggatcggcgattgggacgaagtcgtaacaaggtagccgtac

SEQ ID NO: 704 - DNA, 1532 bp, Corynebacterium jeikeium
tttttatggagagtttgatcctggctcaggacgaacgctggcggcgtgcttaacacatgcaagtcgaacggaaaggctccttgcttgcaaggggtactcgagtggcgaacgggtgagtaacacgtgggtgatctgccttgcacttcgggataagcctgggaaactgggtctaataccggataggaccatgctttagtgtgtgtggtggaaagttttttcggtgcaagatgagcccgcggcctatcagcttgttggtggggtaatggcctaccaaggcgacgacgggtagccggcctgagagggtgtacggccacattgggactgagacacggcccagactcctacgggaggcagcagtggggaatattgcacaatgggcgcaagcctgatgcagcgacgccgcgtgggggatgacggccttcgggttgtaaactcctttcgctagggaagaagccactgtgtggtgacggtacctggataagaagcaccggctaactacgtgccagcagccgcggtaatacgtagggtgcgagcgttgtccggaattactgggcgtaaagagctcgtaggtggtttgtcgcgtcgtctgtgaaatcccggggcttaacttcgggcgtgcaggcgatacgggcataactagagtgctgtaggggagactggaattcctggtgtagcggtgaaatgcgcagatatcaggaggaacaccgatggcgaaggcaggtctctgggcagttactgacgctgaggagcgaaagcatgggtagcgaacaggattagataccctggtagtccatgccgtaaacggtgggcgctaggtgtgggggttttatttacgattcccgtgccgtagctaacgcattaagcgccccgcctggggagtacggccgcaaggctaaaactcaaaggaattgacgggggcccgcacaagcggcggagcatgtggattaattcgatgcaacgcgaagaaccttacctgggcttgacatacaccggatcgctgcagagatgtagtttcccttgtggctggtgtacaggtggtgcatggttgtcgtcagctcgtgtcgtgagatgttgggttaagtcccgcaacgagcgcaacccttgtcttgtgttgccagcacgttatggtggggactcgcgagagactgccggggttaactcggaggaaggtggggatgacgtcaaatcatcatgccccttatgtccagggcttcacacatgctacaatggtcggtacagtgggttgcgataccgtgaggtggagctaatcccttaaagccggtctcagttcggattggagtctgcaactcgactccatgaagtcggagtcgctagtaatcgcagatcagcaacgctgcggtgaatacgttcccgggccttgtacacaccgcccgtcgcgtcatgaaagttggtaacacccgaagccagtggcccaaacttgttagggagctgtcgaaggtgggattggcgattgggacgaagtcgtaacaaggtagccgtaccggaaggtgcggctggatcacctcctttct

SEQ ID NO: 705 - DNA, 1400 bp, Corynebacterium kroppenstedtii
  modified_base (1077)..(1077): a, c, t, g, unknown or other
cctggctcaggacgaacgctggcggcgtgcttaacacatgcaagtcgaacggaaaggccctgcttgcagggtgctcgagtggcgaacgggtgagtaacacgtgggtgatctgccccttactttgggataagcctgggaaactgggtctaatactggataggaccatgctgtaggtggtgtggtggaaagattttttcggtaagggatgagctcgcggcctatcagcttgttggtggggtaatggcctaccaaggcgtcgacgggtagccggcctgagagggtggacggccacattgggactgagatacggcccagattcctacgggaggcagcagtggggaatattgcacaatgggcgcaagcctgatgcagcgacgccgcgtgggggatgacggccttcgggttgtaaactcctttcagccatgacgaagcccttgtggtgacggtagtggtagaagaagcaccggctaactacgtgccagcagccgcggtaatacgtagggtgcgagcgttgtccggaattactgggcgtaaagagctcgtaggtggtctgtcgcgtcatttgtgaaagcccggggcttaactccgggttggcaggtgatacgggcatgactggagtactgtaggggagactggaattcctggtgtagcggtgaaatgcgcagatatcaggaggaacaccggtggcgaaggcgggtctctgggcagtaactgacgctgaggagcgaaagcatgggtagcgaacaggattagataccctggtagtccatgccgtaaacggtgggcgctaggtgtgggtttccttccacgggatccgtgccgtagctaacgcattaagcgccccgcctggggagtacggccgcaaggctaaaactcaaaggaattgacgggggcccgcacaagcggcggagcatgtggattaattcgatgcaacgcgaagaaccttacctgggcttgacatgcactggatgcggccagagatggttgttccctttgtggctggtgtgcaggtggtgcatggttgtcgtcagctcgtgtcgtgagatgttgggttaagtcccgcaacgagcgcaaccnttgtctcgtgttgccagcatttggttggggactcgcgggagactgccggggttaactcggaggaaggtggggatgacgtcaaatcatcatgccccttatgtccagggcttcacacatgctacaatggctggtacagagagttgcgataccgtgaggtggggctaatctcttaaagccagtctcagttcggattggagtctgcaactcgactccatgaagtcggagtcgctagtaatcgcagatcagcaatgctgcggtgaatacgttcccgggccttgtacacaccgcccgtcacgtcatgaaagttggtaacacccgaagcc

SEQ ID NO: 706 - DNA, 1532 bp, Corynebacterium lipophiloflavum
tttttgtggagagtttgatcctggctcaggatgaacgctggcggcgtgcttaacacatgcaagtcgaacggaaaggccacagcttgctgtggtactcgagtggcgaacgggtgagtaacacgtgggtgatctgccctgtacttcgggataagcttgggaaactgggtctaataccggatatgaccactttttggatggggtggtggaaagcttttgcggtatgggatgagctcgcggcctatcagcttgttggtggggtaatggcctaccaaggcgtcgacgggtagccggcctgagagggtgtacggccacattgggactgagatacggcccagactcctacgggaggcagcagtggggaatattgcacaatgggcgcaagcctgatgcagcgacgccgcgtgggggatgacggccttcgggttgtaaactcctttcgccagggacgaagcgtaagtgacggtacctggataagaagcaccggctaactacgtgccagcagccgcggtaatacgtagggtgcgagcgttgtccggaattactgggcgtaaagagctcgtaggtggtttgtcgcgtcgtttgtgtaagtccacggcttaactgtgggatggcaggcgatacgggcataacttgagtgctgtaggggagactggaattcctggtgtagcggtgaaatgcgcagatatcaggaggaacaccgatggcgaaggcaggtctctgggcagtaactgacgctgaggagcgaaagcatgggtagcgaacaggattagataccctggtagtccatgccgtaaacggtgggcgctaggtgtgagtcccttccacggggttcgtgccgtagctaacgcattaagcgccccgcctggggagtacggccgcaaggctaaaactcaaaggaattgacgggggcccgcacaagcggcggagcatgtggattaattcgatgcaacgcgaagaaccttacctgggcttgacatacaccggatcgggctagagatagtctttcccttgtggctggtgtacaggtggtgcatggttgtcgtcagctcgtgtcgtgagatgttgggttaagtcccgcaacgagcgcaacccttgtcttatgttgccagcacgtgatggtggggactcatgagagactgccggggttaactcggaggaaggtggggatgacgtcaaatcatcatgccccttatgtccagggcttcacacatgctacaatggtcggtacaacgcgtgtgcgacactgtgaggtgaagctaatcgctctaaagccggtcgtagttcggattggggtctgcaactcgaccccatgaagtcggagtcgctagtaatcgcagatcagcaacgctgcggtgaatacgttcccgggccttgtacacaccgcccgtcacgtcatgaaagttggtaacacccgaagccagtggcctaaacgtgttagggagctgtcgaaggtgggatcggcgattgggacgaagtcgtaacaaggtagccgtaccggaaggtgcggctggatcacctcctttctaaggagc

SEQ ID NO: 707 - DNA, 1334 bp, Corynebacterium macginleyi
gagtttgatcmtggctcaggacgaacgctggcggcgtgcttaacacatgcaagtcgaacgagtggcgaacgggtgagtaacacgtgggtgatctgccctgcacttcgggataagcttgggaaactgggtctaataccggatagggaaagtcggtgtaggatgagctcgcggcctatcagcttgttggtggggtaatggcctaccaaggcggcgacgggtagccggcctgagagggtgtacggccacattgggactgagatacggcccagactcctacgggaggcagcagtggggaatattgcacaatgggcgcaagcctgatgcagcgacgccgcgtgggggatgaaggccttcgggttgtaaactcctttcgctagggacgatgacggtacctagataagaagcaccggctaactacgtgccagcagccgcggtaatacgtagggtgcgagcgttgtccggaattactgggcgtaaagggctcgtaggtggtttgtcgcgtcgtctgtgaaattctggggcttaactccgggcgtgcaggcgatacgggcaaacttgagtgctgtaggggtaactggaattcctggtgtagcggtgaaatgcgcagatatcaggaggaacaccgatggcgaaggcaggttactgggcagactgacgctgaggagcgaaagcatgggtagcgaacaggattagataccctggtagtccatgctgtaaacggtgggcgctaggtgtgagggttctcgtgccgtagctaacgcattaagcgccccgcctggggagtacggccgcaaggctaaaactcaaaggaattgacgggggcccgcacaagcggcggagcatgtggattaattcgatgcaacgcgaagaaccttacctgggcttgacatatacaggtggtgcatggttgtcgtcagctcgtgtcgtgagatgttgggttaagtcccgcaacgagcgcaacccttgtcttatgttgccagcatggggactcatgagagactgccggggttaactcggaggaaggtggggatgacgtcaaatcatcatgccccttatgtccagggcttcacacatgctacaatggtcggcaacgcgttgcgacactgtgaggtggagcgaatcgctgccggtcttagttcggatggggtctgcaactcgaccccagaagtcggagtcgctagtaatcgcagatcagcaatgctgcggtgaatacgttcccgggccttgtacacaccgcccgtcacgtcatgaaagttggtaacacccgaagccggtgcctagggagccgtcgaaggtgggattggcgattgggacgaagtcgtaacaaggtakcc

SEQ ID NO: 708 - DNA, 1336 bp, Corynebacterium mastitidis
gagtttgatcmtggctcaggacgaacgctggcggcgtgcttaacacatgcaagtcgaacgagtggcgaacgggtgagtaacacgtgggtgatctgccctcaacttcgggataagcttgggaaactgggtctaataccggatagggaaagtcggttggggatgagctcgcggcctatcagcttgttggtggggtaatggcctaccaaggcgtcgacgggtagccggcctgagagggtgtacggccacattgggactgagatacggcccagactcctacgggaggcagcagtggggaatattgcacaatgggcgcaagcctgatgcagcgacgccgcgtgggggatgaaggccttcgggttgtaaactcctttcgctaccgacgatgacggtaggtggagaagaagcaccggctaactacgtgccagcagccgcggtaatacgtagggtgcgagcgttgtccggatttactgggcgtaaagagctcgtaggtggtttgtcgcgtcgtctgtgaaattccggggcttaacttcgggcgtgcaggcgatacgggcaaacttgagtgctgtaggggtaactggaattcctggtgtagcggtggaatgcgcagatatcaggaggaacaccgatggcgaaggcaggttactgggcagactgacgctgaggagcgaaagcatgggtagcgaacaggattagataccctggtagtccatgctgtaaacggtgggcgctaggtgtgagccggtttgtgccgtagctaacgcattaagcgccccgcctggggagtacggccgcaaggctaaaactcaaaggaattgacgggggcccgcacaagcggcggagcatgtggattaattcgatgcaacgcgaagaaccttacctgggcttgacatatacaggtggtgcatggttgtcgtcagctcgtgtcgtgagatgttgggttaagtcccgcaacgagcgcaacccttgtcttatgttgccagcacgtggggactcatgagagactgccggggttaactcggaggaaggtggggatgacgtcaaatcatcatgccccttatgtccagggcttcacacatgctacaatggtcggcagtaggttgcgataccgtgaggtggagctaatcctgttcggccttagttcggatggggtctgcaactcgaccccagaagtcggagtcgctagtaatcgcagatcagcaacgctgcggtgaatacgttcccgggccttgtacacaccgcccgtcacgtcatgaaagttggtaacacccgaaaaccatgcctagggagtggttgaaggtgggattggcgattgggacgaagtcgtaacaaggtakcc

SEQ ID NO: 709 - DNA, 1559 bp, Corynebacterium matruchotii
tttttttggagagtttgatcctggctcaggacgaacgctggcggcgtgcttaacacatgcaagtcgaacggaaaggcccccacttttttggtgggggtgctcgagtggcgaacgggtgagtaacacgtgggtgatctgccctgcacttcgggataagcttgggaaactgggtctaataccggataggaccatggtttagtgtctcatggtggaaagattattgttttggtgcaggatgagctcgcggcctatcagcttgttggtggggtaatggcctaccaaggcgtcgacgggtagccggcctgagagggtggacggccacattgggactgagatacggcccagactcctacgggaggcagcagtggggaatattgcacaatgggcgcaagcctgatgcagcgacgccgcgtgggggatgacggccttcgggttgtaaactcctttcgttagggacgaagccrcacctkttttgggtgtggtgacggtacctttgttaagaagcaccggctaactacgtgccagcagccgcggtaatacgtagggtgcgagcgttgtccggaattactgggcgtaaagagctcgtaggtggtttgttgcgtcgtctgtgaaattccggggcttaacttcggggtggcaggcgatacgggcataactagagtgctgtaggggagactggaattcctggtgtagcggtggaatgcgcagatatcaggaggaacaccgatggcgaaggcaggtctctgggcagtaactgacgctgaggagcgaaagcatggggagcgaacaggattagataccctggtagtccatgctgtaaacggtgggcgttaggtgtggggaccggtttggtttctgtgccgtagctaacgcattaagcgccccgcctggggagtacggccgcaaggctaaaactcaaaggaattgacgggggcccgcacaagcggcggagcatgtggattaattcgatgcaacgcgaagaaccttacctgggtttgacatgcaccagacggttgtagagatacgtacctccctttgtggttggtgtgcaggtggtgcatggttgtcgtcagctcgtgtcgtgagatgttgggttaagtcccgcaacgagcgcaacccttgtcttatgttgccagcactttgggtggggactcatgagagactgccggggttaactcggaggaaggtggggatgacgtcaaatcatcatgccctttatgcccagggcttcacacatgctacaatggttagtacaacgcgctgcaaacctgtgagggtgagcgaatcgctgaaagctaatctcagttcggattggggtctgcaactcgaccccatgaagtcggagtcgctagtaatcgcagatcagcaatgctgcggtgaatacgttcccgggccttgtacacaccgcccgtcacgtcatgaaagttggtaacacccgaagcccatggcctaaccaccgttttttggtggggggagtggtcgaaggtgggattggcgattgggacgaagtcgtaacaaggtagccgtaccggaaggtgcggctggatcacctcctttct

SEQ ID NO: 710 - DNA, 1400 bp, Corynebacterium minutissimum
  modified_base (49)..(52): a, c, t, g, unknown or other
  modified_base (59)..(61): a, c, t, g, unknown or other
  modified_base (188)..(188): a, c, t, g, unknown or other
  modified_base (426)..(427): a, c, t, g, unknown or other
  modified_base (832)..(832): a, c, t, g, unknown or other
  modified_base (884)..(884): a, c, t, g, unknown or other
  modified_base (1395)..(1396): a, c, t, g, unknown or other
acgaacgctggcggcgtgcttaacacatgcaagtcgaacggaaaggccnnnngcttgcnnngggtactcgagtggcgaacgggtgagtaacacgtgggtgatctgccttgcactctgggataagcttgggaaactgggtctaataccggataggaaccgtctttagtgtggtggttggaaagtttttncggtgcaagatgagctcgcggcctatcagcttgttggtggggtaatggcctaccaaggcgtcgacgggtagccggcctgagagggtgtacggccacattgggactgagatacggcccagactcctacgggaggcagcagtggggaatattgcacaatgggcggaagcctgatgcagcgacgccgcgtgggggatgacggccttcgggttgtaaactcctttcgacagggacgaagcgnnagtgacggtacctgtataagaagcaccggctaactacgtgccagcagccgcggtaatacgtagggtgcgagcgttgtccggaattactgggcgtaaagagctcgtaggtggtttgtcgcgtcgtctgtgaaattccggggcttaactccgggcgtgcaggcgatacgggcataacttgagtgctgtaggggagactggaattcctggtgtagcggtgaaatgcgcagatatcaggaggaacaccgatggcgaaggcaggtctctgggcagttactgacgctgaggagcgaaagcatgggtagcgaacaggattagataccctggtagtccatgccgtaaacggtgggcgctaggtgtagggggcttccacgtcttctgtgccgtagctaacgcattaagcgcccngcctggggagtacggccgcaaggctaaaactcaaaggaattgacgggggccngcacaagcggcggagcatgtggattaattcgatgcaacgcgaagaaccttacctgggcttgacatacaccagatcgctgcagagatgtagtttcccttgtggttggtgtacaggtggtgcatggttgtcgtcagctcgtgtcgtgagatgttgggttaagtcccgcaacgagcgcaacccttgtcttatgttgccagcatttggttggggactcatgagagactgccggggttaactcggaggaaggtggggatgacgtcaaatcatcatgccccttatgtccagggcttcacacatgctacaatggtcggtacaacgcgcagcgacactgtgaggtggagcgaatcgctgaaagccggtcttagttcggattggggtctgcaactcgaccccatgaagtcggagtcgctagtaatcgtagatcagcaatgctgcggtgaatacgttcccgggccttgtacacaccgcccgtcacgtcatgaaagttggtaacacccgaacgcagtggctnnaact

SEQ ID NO: 711 - DNA, 1459 bp, Corynebacterium mucifaciens
  modified_base (354)..(354): a, c, t, g, unknown or other
  modified_base (385)..(385): a, c, t, g, unknown or other
  modified_base (1092)..(1092): a, c, t, g, unknown or other
ggcggcgtgcttaacacatgcaagtcgaacggaaaggcccaagcttgcttgggtactcgagtggcgaacgggtgagtaacacgtgggtgatctgccctgcacttcgggataagcctgggaaactgggtctaataccggataggacgatggtttggatgccattgtggaaagttttttcggtgtgggatgagctcgcggcctatcagcttgttggtggggtaatggcctaccaaggcgtcgacgggtagccggcctgagagggtgtacggccacattgggactgagatacggcccagactcctacgggaggcagcagtggggaatattgcacaatgggcgcaagcctgatgcagngacgccgcgtgggggatgacggccttcgggntgtaaactcctttcgctagggacgaagcgttttgtgacggtacctggagaagaagcaccggctaactacgtgccagcagccgcggtaatacgtagggtgcgagcgttgtccggaattactgggcgtaaagagctcgtaggtggtttgtcgcgtcgtttgtgtaagcccgcagcttaactgcgggactgcaggcgatacgggcataacttgagtgctgtaggggagactggaattcctggtgtagcggtggaatgcgcagatatcaggaggaacaccgatggcgaaggcaggtctctgggcagtaactgacgctgaggagcgaaagcatgggtagcgaacaggattagataccctggtagtccatgccgtaaacggtgggcgctaggtgtgagtcccttccacggggttcgtgccgtagctaacgcattaagcgccccgcctggggagtacggccgcaaggctaaaactcaaaggaattgacgggggcccgcacaagcggcggagcatgtggattaattcgatgcaacgcgaagaaccttacctgggcttgacatacaccagatcgccgtagagatacggtttccctttgtggttggtgtacaggtggtgcatggttgtcgtcagctcgtgtcgtgagatgttgggttaagtcccgcaacgagcgcaacccttgtcttatgttgccagcagctgatggtggggactcntgagagactgccggggttaactcggaggaaggtggggatgacgtcaaatcatcatgccccttatgtccagggcttcacacatgctacaatggtcggtacaacgcgcatgcgagcctgtgaggtggagcgaatcgctgaaagccggtcgtagttcggattggggtctgcaactcgaccccatgaagtcggagtcgctagtaatcgcagatcagcaacgctgcggtgaatacgttcccgggccttgtacacaccgcccgtcacagtcatgaaagttggtaacacccgaagccagtggcctgttacagggagctgtgtcgaaggtgggatcggcgattgggacgaagtcgtaacaaggtagccgtaccgg

SEQ ID NO: 712 - DNA, 1443 bp, Corynebacterium propinquum
  modified_base (16)..(16): a, c, t, g, unknown or other
ctgctcaggacgaacnctggcggcgtgcttaacacatgcaagtcgaacggaaaggccttttcggaggtactcgagtggcgaacgggtgagtaacacgtgggtgatctgccctgcactctgggataagcctgggaaactgggtctaataccggataggactgcactttagtgtgtgtggtggaaagttttttcggtgtaggatgagcccgcggcctatcagcttgttggtggggtaatggcctaccaaggcggcgacgggtagccggactgagaggttggtcggccacattgggactgagatacggcccagactcctacgggaggcagcagtggggaatattgcacaatgggcgcaagcctgatgcagcgacgccgcgtgggggatgacggccttcgggttgtaaactcctttcgccagggacgaagcgttttgtgacggtacctggagaagaagcaccggctaactacgtgccagcagccgcggtaatacgtagggtgcaagcgttgtccggaattactgggcgtaaagagctcgtaggtggtttgtcgcgtcgtctgtgaaattccacagcttaactgtgggcgtgcaggcgatacgggctgacttgagtactgtaggggtaactggaattcctggtgtagcggtgaaatgcgcagatatcaggaggaacaccgatggcgaaggcaggttactgggcagttactgacgctgaggagcgaaagcatgggtagcaaacaggattagataccctggtagtccatgccgtaaacggtgggcgctaggtgtaggggccttttggggtttctgtgccgtagctaacgcattaagcgccccgcctggggagtacggccgcaaggctaaaactcaaaggaattgacgggggcccgcacaagcggcggagcatgtggattaattcgatgcaacgcgaagaaccttacctgggcttgacatacaccagatcgctgcagagatgtagtttcccttgtggctggtgtacaggtggtgcatggctgtcgtcagctcgtgtcgtgagatgttgggttaagtcccgcaacgagcgcaacccttgtcttatgttgccagcacgttatggtggggactcatgagagactgccggggttaactcggaggaaggtggggacgacgtcaagtcatcatgccccttatgtccagggcttcacacatgctacaatggccggtacaatgcgcagcgagcctgtgagggtgagctaatcgcttaaagccggtcttagttcggattggggtctgcaactcgaccccatgaagtcggagtcgctagtaatcgcagatcagcaatgctgcggtgaatacgttcccgggccttgtacacaccgcccgtcacgtcatgaaagttggtaacacccgaagccggtggctcaaactcggtttagggagccgtcgaaggtgggatcggcgattgg

SEQ ID NO: 713 - DNA, 1483 bp, Corynebacterium pseudodiphtheriticum
cctggctcaggacgaacgctggcggcgtgcttaacacatgcaagtcgaacggaaaggcctcttcggaggtactcgagtggcgaacgggtgagtaacacgtgggtgatctgccctgcactctgggataagcctgggaaactgggtctaataccggataggaccatgctttagtgtgtgtggtggaaagttttttcggtgtaggatgagcccgcggcctatcagcttgttggtggggtaatggcctaccaaggcggcgacgggtagccggactgagaggttggtcggccacattgggactgagatacggcccagactcctacgggaggcagcagtggggaatattgcacaatgggcgcaagcctgatgcagcgacgccgcgtgggggatgacggccttcgggttgtaaactcctttcggcagggacgaagcgttttgtgacggtacctggagaagaagcaccggctaactacgtgccagcagccgcggtaatacgtagggtgcaagcgttgtccggaattactgggcgtaaagagctcgtaggtggtttgtcacgtcgtctgtgaaattccacagcttaactgtgggcgtgcaggcgatacgggctgacttgagtactgtaggggtaactggaattcctggtgtagcggtgaaatgcgcagatatcaggaggaacaccgatggcgaaggcaggttactgggcagttactgacgctgaggagcgaaagcatgggtagcaaacaggattagataccctggtagtccatgccgtaaacggtgggcgctaggtgtagggaccttttggggtttctgtgccgtagctaacgcattaagcgccccgcctggggagtacggccgcaaggctaaaactcaaaggaattgacgggggcccgcacaagcggcggagcatgtggattaattcgatgcaacgcgaagaaccttacctgggcttgacatacactggatcgctgcagagatgtagtttcccttgtggctagtgtacaggtggtgcatggctgtcgtcagctcgtgtcgtgagatgttgggttaagtcccgcaacgagcgcaacccttgtcttatgttgccagcacgttatggtggggactcatgagagactgccggggttaactcggaggaaggtggggacgacgtcaagtcatcatgccccttatgtccagggcttcacacatgctacaatggccggtacaatgcgcagcgagcctgtgagggtgagctaatcgcttaaagctggtcttagttcggattggggtctgcaactcgaccccatgaagtcggagtcgctagtaatcgcagatcagcaatgctgcggtgaatacgttcccgggccttgtacacaccgcccgtcacgtcatgaaagttggtaacacccgaagccggtggctcaaactcgtttagggagccgtcgaaggtgggatcggcgattgggacgaagtcgtaacaaggtagccgtaccggaaggtgcgg

SEQ ID NO: 714 - DNA, 1529 bp, Corynebacterium pseudogenitalium
tttttgtggagagtttgatcctggctcaggacgaacgctggcggcgtgcttaacacatgcaagtcgaacggaaaggccctgcttgcagggtactcgagtggcgaacgggtgagtaacacgtgggtgatctgccctgcacttcgggataagcctgggaaactgggtctaataccggataggagccatttttagtgtgatggttggaaagttttttcggtgtaggatgagctcgcggcctatcagcttgttggtggggtaatggcctaccaaggcggcgacgggtagccggcctgagagggtggacggccacattgggactgagatacggcccagactcctacgggaggcagcagtggggaatattgcacaatgggcgcaagcctgatgcagcgacgccgcgtgggggatgacggccttcgggttgtaaactcctttcgctagggacgaagctttttgtgacggtacctagataagaagcaccggctaactacgtgccagcagccgcggtaatacgtagggtgcgagcgttgtccggaattactgggcgtaaagggctcgtaggtggtttgtcgcgtcgtctgtgaaattccggggcttaactccgggcgtgcaggcgatacgggcataacttgagtactgtaggggtaactggaattcctggtgtagcggtgaaatgcgcagatatcaggaggaacaccgatggcgaaggcaggttactgggcagttactgacgctgaggagcgaaagcatgggtagcgaacaggattagataccctggtagtccatgccgtaaacggtgggcgctaggtgtgagggtcttttcacgactttcgtgccgtagctaacgcattaagcgccccgcctggggagtacggccgcaaggctaaaactcaaaggaattgacgggggcccgcacaagcggcggagcatgtggattaattcgatgcaacgcgaagaaccttacctgggcttgacatacactggatcgggctagagatagtctttccctttgtggctggtgtacaggtggtgcatggttgtcgtcagctcgtgtcgtgagatgttgggttaagtcccgcaacgagcgcaacccttgtcttatgttgccagcatttggttggggactcatgagagactgccggggtcaactcggaggaaggtggggatgacgtcaaatcatcatgccccttatgtccagggcttcacacatgctacaatggtcggtacaacgcgcagcgacactgtgaggtggagcgaatcgctgaaagccggccttagttcggattggggtctgcaactcgaccccatgaagtcggagtcgctagtaatcgcagatcagcaatgctgcggtgaatacgttcccgggccttgtacacaccgcccgtcacgtcatgaaagttggtaacacccgaagccggtggcccaaacttgttagggagccgtcgaaggtgggatcggcgattgggacgaagtcgtaacaaggtacccgtaccggaaggtgcgggtggatcacctcctttctaaggagc

SEQ ID NO: 715 - DNA, 1396 bp, Corynebacterium pseudotuberculosis
  modified_base (827)..(827): a, c, t, g, unknown or other
  modified_base (879)..(879): a, c, t, g, unknown or other
acgaacgctggcggcgtgcttaacacatgcaagtcgaacggaaaggccccttcgggggtgctcgagtggcgaacgggtgagtaacacgtgggtgatctgcctcgtactctgggataagcctgggaaactgggtctaatactggataggaccgcactttagtgtgtgtggtggaaagttttttcggtacgagatgagcccgcggcctatcagcttgttggtggggtaatggcctaccaaggcgtcgacgggtagccggcctgagagggtggacggccacattgggactgagatacggcccagactcctacgggaggcagcagtggggaatattgcacaatgggcgcaagcctgatgcagcgacgccgcgtgagggatgacggccttcgggttgtaaacctctttcgacagggacgaagctttttgtgacggtacctgtataagaagcaccggctaactacgtgccagcagccgcggtaatacgtagggtgcgagcgttgtccggaattactgggcgtaaagagctcgtaggtggtttgtcgcgtcgtctgtgaaattccggggcttaactccgggcgtgcaggcgatacgggcataacttgagtgctgtaggggagactggaattcctggtgtagcggtggaatgcgcagatatcaggaggaacaccgatggcgaaggcaggtctctgggcagtaactgacgctgaggagcgaaagcatggggagcgaacaggattagataccctggtagtccatgccgtaaacggtgggcgctaggtgtgagggtcttccacgactttcgtgccgtagctaacgcattaagcgcccngcctggggagtacggccgcaaggctaaaactcaaaggaattgacgggggccngcacaagcggcggagcatgtggattaattcgatgcaacgcgaagaaccttacctgggcttgacatatacaagatcggcgtagagatacgttttcccttgtggtttgtatacaggtggtgcatggttgtcgtcagctcgtgtcgtgagatgttgggttaagtcccgcaacgagcgcaacccttgtcttatgttgccagcacgtgatggtggggactcatgagagactgccggggttaactcggaggaaggtggggatgacgtcaaatcatcatgccccttatgtccagggcttcacacatgctacaatggtcggtacaacgcgttgcgagcctgtgagggtgagcgaatcgctgaaagccggcctcagttcggattggggtctgcaactcgaccccatgaagtcggagtcgctagtaatcgcagatcagcaacgctgcggtgaatacgttcccgggccttgtacacaccgcccgtcacgtcatgaaagttggtaacacccgaacgccatggcccaacc

SEQ ID NO: 716 - DNA, 1409 bp, Corynebacterium pyruviciproducens
acgctggcggcgtgcttaacacatgcaagtcgaacggaaaggcctcagcttgctggggtgctcgagtggcgaacgggtgagtaacacgtaggtgatctgcctttcacttcgggataagcttgggaaactgggtctaataccggatattcactatgccgtggttggtgtggtggaaagcttttgcggtgggagatgagcttgcggcctatcagcttgttggtggggtaatggcctaccaaggcggcgacgggtagccggcctgagagggtgtgcggccacattgggactgagatacggcccagactcctacgggaggcagcagtggggaattttgcacaatgggcggaagcctgatgcagcgacgccgtgtgggggatgaaggccttcgggttgtaaactcctttcgtcagggacgaagtttgtttgacggtacctggataagaagcaccggctaactacgtgccagcagccgcggtaatacgtagggtgcgagcgttgtccggatttactgggcgtaaagggctcgtaggtggtgtgttgcgtcgtctgtgtaatccaggggcttaacttttggttggcaggcgatacgggcattgcttgagtgctgtaggggagactggaattcctggtgtagcggtgaaatgcgcagatatcaggaggaacaccgatggcgaaggcaggtctctgggcagttactgacgctgaggagcgagagcatgggtagcgaacaggattagataccctggtagtctatgctgtaaacggtgggcgctaggtgtgagcctcttccacggggtttgtgccgtagctaacgctttaagcgccccgcctggggagtacggccgcaaggctaaaactcaaaggaattgacgggggcccgcacaagcggcggagcatgtggattaattcgatgcaacgcgaagaaccttacctgggcttgacataggcaggatgggcgcagagatgtgtcgtccctttgtggtctgtttacaggtggtgcatggttgtcgtcagctcgtgtcgtgagatgttgggttaagtcccgcaacgagcgcaacccttgtcttatgttgccagcacgttgtggtggggactcgtgagagactgccggggttaactcggaggaaggtggggatgacgtcaaatcatcatgccccttatgtccagggcttcacacatgctacaatggttggtacagtgcgtgagcaacatcgtgaggtggagctaatcgctaaagccagtctcagttcggattggggtctgcaactcgacctcatgaagtcggagtcgctagtaatcgcagatcagcagtgctgcggtgaatacgttcccgggccttgtacacaccgcccgtcacgtcatgaaagttggtaacacccgaagcccatggcctaaccggttttgccggg

SEQ ID NO: 717 - DNA, 1395 bp, Corynebacterium renale
  modified_base (830)..(830): a, c, t, g, unknown or other
  modified_base (882)..(882): a, c, t, g, unknown or other
  modified_base (1391)..(1391): a, c, t, g, unknown or other
acgaacgctggcggcgtgcttaacacatgcaagtcgaacggaaaggccactgcttgcagtggtactcgagtggcgaacgggtgagtaacacgtgggtgatctgccctgtactttgggataagcctgggaaactgggtctaataccggataggaccatcgtttagtgtcggtggtggaaagcttttgcggtacgggatgagctcgcggcctatcagcttgttggtggggtaatggcctaccaaggcgtcgacgggtagccggcctgagagggtggacggccacattgggactgagatacggcccagactcctacgggaggcagcagtggggaatattgcacaatgggcgcaagcctgatgcagcgacgccgcgtgagggatgacggccttcgggttgtaaacctctttcgctagggacgaagcttttgtgacggtacctagagaagaagcaccggctaactacgtgccagcagccgcggtaatacgtagggtgcgagcgttgtccggatttactgggcgtaaagagctcgtaggtggtttgtcgcgtcgtctgtgaaattccggggcttaactccgggcgtgcaggcgatacgggcataacttgagtactgtaggggagactggaattcctggtgtagcggtggaatgcgcagatatcaggaggaacaccgatggcgaaggcaggtctctgggcagttactgacactgaggagcgaaagcatgggtagcgaacaggattagataccctggtagtccatgccgtaaacggtgggcgctaggtgtgagacccttccacgggttttgtgccgtagctaacgcattaagcgcccngcctggggagtacggccgcaaggctaaaactcaaaggaattgacgggggccngcacaagcggcggagcatgtggattaattcgatgcaacgcgaagaaccttacctgggtttgacatacaccagaccgggccagagatggtctttccctttgtggttggtgtacaggtggtgcatggttgtcgtcagctcgtgtcgtgagatgttgggttaagtcccgtaacgagcgcaacccttgtcttatgttgccagcacgttgtggtggggactcatgagagactgccggggttaactcggaggaaggtggggatgacgtcaaatcatcatgccccttatgtccagggcttcacacatgctacaatggtcggtacaacgcgtgtgctacttcgtgaggagatgctaatcgctgaaagccggccttagttcggattggggtctgcaactcgaccccatgaagtcggagtcgctagtaatcgcagatcagcaacgctgcggtgaatacgttcccgggccttgtacacaccgcccgtcacgtcatgaaagttggtaacacccgaacgccntggc

SEQ ID NO: 718 - DNA, 1320 bp, Corynebacterium resistens
aaagttttttcggtacgagatgagcccgcggcctatcagcttgttggtggggtaatggcctaccaaggcgacgacgggtagccggcctgagagggtgtacggccacattgggactgagacacggcccagactcctacgggaggcagcagtggggaatattgcacaatgggcggaagcctgatgcagcgacgccgcgtgagggatgacggccttcgggttgtaaacctctttcgctagggaagaagcctttttggtgacggtacctggataagaagcaccggctaactacgtgccagcagccgcggtaatacgtagggtgcaagcgttgtccggaattactgggcgtaaagagctcgtaggtggtttgtcgcgtcgttagtgaaagcccggggcttaactccgggtctgctggcgatacgggcataacttgagtgctgtaggggagactggaattcctggtgtagcggtggaatgcgcagatatcaggaggaacaccgatggcgaaggcaggtctctgggcagtaactgacgctgaggagcgaaagcatgggtagcgaacaggattagataccctggtagtccatgccgtaaacggtgggcgctaggtgtgggggtttttcacgacttccgtgccgtagctaacgcattaagcgccccgcctggggagtacggccgcaaggctaaaactcaaaggaattgacgggggcccgcacaagcggcggagcatgtggattaattcgatgcaacgcgaagaaccttacctgggcttgacatatacgggatcggcgtagagatacgttttcccttgtggctcgtatacaggtggtgcatggttgtcgtcagctcgtgtcgtgagatgttgggttaagtcccgcaacgagcgcaacccttgtcttgtgttgccagcacgttatggtggggactcgcgagagactgccggggttaactcggaggaaggtggggatgacgtcaaatcatcatgccccttatgtccagggcttcacacatgctacaatggtcggtacagtgggttgcgatgccgtgaggtggagctaatcccttaaagccggtctcagttcggattggagtctgcaactcgactccatgaagtcggagtcgctagtaatcgcagatcagcaacgctgcggtgaatacgttcccgggccttgtacacaccgcccgtcacgtcatgaaagttggtaacacccgaagccagtggcccaaactcgttagggagctgtcgaaggtgggatcggcgattgggacgaagtcgtaacaaggtagccgtaccggaaggtgcggctggatcacctcctttct

SEQ ID NO: 719 - DNA, 1457 bp, Corynebacterium riegelii
atgaacgctggcggcgtgcttaacacatgcaagtcgaacggaaaggcccaagcttgcttgggtactcgagtggcgaacgggtgagtaacacgtgggtgatctgccctgcacttcgggataagcctgggaaactgggtctaataccggataggaccacttcgtagktgttgtggtggaaagttttttcggtgtgggatgagctcgcggcctatcagcttgttggtggggtaatggcctaccaaggcgtcgacgggtagccggcctgagagggtgtacggccacattgggactgagatacggcccagactcctacgggaggcagcagtggggaatattgcacaatgggcggaagcctgatgcagcgacgccgcgtgggggatgacggccttcgggttgtaaactcctttcgccaaagacgaattttgacggtatttggagaagaagcaccggctaactacgtgccagcagccgcggtaatacgtagggtgcgagcgttgtccggaattactgggcgtaaagagctcgtaggtggtttgtcgcgtcgtttgtggaagtccacggcttaactgtgggactgcaggcgatacgggcataacttgagtgctgtaggggagactggaattcctggtgtagcggtgaaatgcgcagatatcaggaggaacaccgatggcgaaggcaggtctctgggcagtaactgacgctgaggagcgaaagcatggggagcgaacaggattagataccctggtagtccatgccgtaaacggtgggcgctaggtgtgagtcccttccacggggttcgtgccgtagctaacgcattaagcgccccgcctggggagtacggccgcaaggctaaaactcaaaggaattgacgggggcccgcacaagcggcggagcatgtggattaattcgatgcaacgcgaagaaccttacctgggcttgacatacaccggatcgctgcagagatgtagtttcccttgtggctggtgtacaggtggtgcatggttgtcgtcagctcgtgtcgtgagatgttgggttaagtcccgcaacgagcgcaacccttgtcttatgttgccagcacgtgatggtggggacttatgagaaactgccggggttaactcggaggaaggtggggatgacgtcaaatcatcatgccccttatgtccagggcttcacacatgctacaatggtcggtacaacgcgcagctacctcgtgaggggacgcgaatcgctgaaagccggccttagttcggattggggtctgcaactcgaccccatgaagtcggagtcgctagtaatcgcagatcagcaacgctgcggtgaatacgttcccgggccttgtacacaccgcccgtcacgtcatgaaagttggtaacacccgaagccagtggcctgtcaaaaggagctgtcgaaggtgggatcggcgattgggacaagtcgtaacaaggtagccgtaccgg

SEQ ID NO: 720 - DNA, 1469 bp, Corynebacterium simulans
gacgaacgctggcggcgtgcttaacacatgcaagtcgaacggaaaggcctcagcttgctggggtactcgagtggcgaacgggtgagtaacacgtgggtgatctgccttgcacttcgggataagcttgggaaactgggtctaataccggataggacagctgtttagtgtcagttgtggaaagttttttcggtgcaagatgagctcgcggcctatcagcttgttggtggggtaatggcctaccaaggcgtcgacgggtagccggcctgagagggtggacggccacattgggactgagatacggcccagactcctacgggaggcagcagtggggaatattgcacaatgggcggaagcctgatgcagcgacgccgcgtgggggatgaaggccttcgggttgtaaactcctttcgacagggacgaagcttttgtgacggtacctgtataagaagcaccggctaactacgtgccagcagccgcggtaatacgtagggtgcgagcgttgtccggaattactgggcgtaaagagctcgtaggtggtttgtcgcgtcgtctgtgaaattccggggcttaactccgggcgtgcaggcgatacgggctgacttgagtgctgtaggggagactggaattcctggtgtagcggtgaaatgcgcagatatcaggaggaacaccgatggcgaaggcaggtctctgggcagtaactgacgctgaggagcgaaagcatgggtagcgaacaggattagataccctggtagtccatgccgtaaacggtgggcgctaggtgtagggggcttccacgtcttctgtgccgtagctaacgcattaagcgccccgcctggggagtacggccgcaaggctaaaactcaaaggaattgacgggggcccgcacaagcggcggagcatgtggattaattcgatgcaacgcgaagaaccttacctgggcttgacatatagcggatcgctgcagagatgtagtttccctttgtggtcgttatacaggtggtgcatggttgtcgtcagctcgtgtcgtgagatgttgggttaagtcccgcaacgagcgcaacccttgtcttatgttgccagcatttggttggggactcatgagagactgccggggtcaactcggaggaaggtggggatgacgtcaaatcatcatgccccttatgtccagggcttcacacatgctacaatggtcggtacaacgcgcagcgacactgtgaggtggagcgaatcgctgaaagccggccttagttcggattggggtctgcaactcgaccccatgaagtcggagtcgctagtaatcgcagatcagcaacgctgcggtgaatacgttcccgggccttgtacacaccgcccgtcacgtcatgaaagttggtaacacccgaagccagtggctcaaactcgttagggagctgtcgaaggtgggatcggcgattgggacgaagtcgtaacaaggtagccgtaccggaagg

SEQ ID NO: 721 - DNA, 1323 bp, Corynebacterium singulare
  modified_base (922)..(922): a, c, t, g, unknown or other
  modified_base (1086)..(1086): a, c, t, g, unknown or other
acgaacgctggcggcgtgcttaacacatgcaagtcgaacggaaaggccctagcttgctgaggtgctcgagtggcgaacgggtgagtaacacgtgggtgatctgccttgtactctgggataagcttgggaaactgggtctaataccggataggaactgcctttagtgtggtggttggaaagttttttcggtgcaagatgagctcgcggcctatcagcttgttggtggggtaatggcctaccaaggcgtcgacgggtagccggcctgagagggtgtacggccacattgggactgagatacggcccagactcctacgggaggcagcagtggggaatattgcacaatgggcggaagcctgatgcagcgacgccgcgtgggggatgacggccttcgggttgtaaactcctttcgacagggacgaagctttttgtgacggtacctgtataagaagcaccggctaactacgtgccagcagccgcggtaatacgtagggtgcgagcgttgtccggaattactgggcgtaaagagctcgtaggtggtttgtcgcgtcgtctgtgaaattccggggcttaactccgggcgtgcaggcgatacgggcataacttgagtgctgtaggggagactggaattcctggtgtagcggtgaaatgcgcagatatcaggaggaacaccgatggcgaaggcaggtctctgggcagttactgacgctgaggagcgaaagcatgggtagcgaacaggattagataccctggtagtccatgccgtaaacggtgggcgctaggtgtagggggcttccacgtcttctgtgccgtagctaacgcattaagcgccccgcctggggagtacggccgcaaggctaaaactcaaaggaattgacgggggcccgcacaagcggcggagcatgtggattaattcgatgcaacncgaagaaccttacctgggcttgacatacaccagatcgctgcagagatgtagtttcccttgtggttggtgtacaggtggtgcatggttgtcgtcagctcgtgtcgtgagatgttgggttaagtcccgcaacgagcgcaacccttgtcttatgttgccagcatttngttggggactcatgagagactgccggggttaactcggaggaaggtggggatgacgtcaaatcatcatgccccttatgtccagggcttcacacatgctacaatggtcggtacaacgcgcagcgacactgtgaggtggagcgaatcgctgaaagccggtcttagttcggattggggtctgcaactcgaccccatgaagtcggagtcgctagtaatcgtagatcagcaatgctgcggtga

SEQ ID NO: 722 - DNA, 1475 bp, Corynebacterium sp.
  1 ex sheep
gacgaacgctggcggcgtgcttaacacatgcaagtcgaacggaaaggcccctagcttgctgggggtactcgagtggcgaacgggtgagtaacacgtgggtgatctgccctgcacttcgggataagcctgggaaactgggtctaataccggataggagccatctttggtgtgatggttggaaagttttttcggtgtaggatgagcctgcggcctatcagcttgttggtggggtaatggcctaccaaggcgtcgacgggtagccggcctgagagggtgtacggccacattgggactgagatacggcccagactcctacgggaggcagcagtggggaatattgcacaatgggcgcaagcctgatgcagcgacgccgcgtgggggatgacggccttcgggttgtaaactcctttcgccagggacgaagcgttttgtgacggtacctggataagaagcaccggctaactacgtgccagcagccgcggtaatacgtagggtgcgagcgttgtccggaattactgggcgtaaagagctcgtaggtggtttgtcgcgtcgtctgtgaaatcccggggcttaacttcgggcgtgcaggcgatacgggcataacttgagtgctgtaggggagactggaattcctggtgtagcggtgaaatgcgcagatatcaggaggaacaccgatggcgaaggcaggtctctgggcagtaactgacgctgaggagcgaaagcatgggtagcgaacaggattagataccctggtagtccatgccgtaaacggtgggcgctaggtgtgagtcccttccacggggttcgtgccgtagctaacgcattaagcgccccgcctggggagtacggccgcaaggctaaaactcaaaggaattgacgggggcccgcacaagcggcggagcatgtggattaattcgatgcaacgcgaagaaccttacctgggcttgacatgtaccagatcgccatagagatatggtttcccttgtggctggttcacaggtggtgcatggttgtcgtcagctcgtgtcgtgagatgttgggttaagtcccgcaacgagcgcaacccttatcttatgttgccagcacgtagtggtggggactcatgagagactgccggggtcaactcggaggaaggtggggatgacgtcaaatcatcatgccccttatgtccagggcttcacacatgctacaatggtcggtacaacgcgcagcgagactgtgaggttaagcgaatcgctgaaagccggccttagttcggattggggtctgcaactcgaccccatgaagtcggagtcgctagtaatcgcagatcagcaatgctgcggtgaatacgttcccgggccttgtacacaccgcccgtcacgtcatgaaagttggtaacacccgaagccagtggcccaaactcgtttagggagctgtcgaaggtgggatcggcgattgggacgaagtcgtaacaaggtagccgtaccggaagg

SEQ ID NO: 723 - DNA, 1491 bp, Corynebacterium sp.
  L-2012475
gaacgctggcggcgtgcttaacacatgcaagtcgaacggaaaggctcaagcttgcttgggtactcgagtggcgaacgggtgagtaacacgtgggtgatctgccctgcactttgggataagcctgggaaactgggtctaataccggataggaccatcgtttagtgtcggtggtggaaagtttttcggtgtgggatgagctcgcggcctatcagcttgttggtggggtaatggcctaccaaggcgtcgacgggtagccggcctgagagggtgtacggccacattgggactgagatacggcccagactcctacgggaggcagcagtggggaatattgcacaatgggcgcaagcctgatgcagcgacgccgcgtgggggatgacggccttcgggttgtaaactcctttcgccaaggacgaagaggaattgacggtacttggataagaagcaccggctaactacgtgccagcagccgcggtaatacgtagggtgcgagcgttgtccggaattactgggcgtaaagagctcgtaggtggtttgtcgcgtcgtttgtggaataccgcagcttaactgtggggttgcaggcgatacgggcataacttgagtgctgtaggggagactggaattcctggtgtagcggtgaaatgcgcagatatcaggaggaacaccgatggcgaaggcaggtctctgggcagtaactgacgctgaggagcgaaagcatgggtagcgaacaggattagataccctggtagtccatgccgtaaacggtgggcgctaggtgtgagtcccttccacggggttcgtgccgtagctaacgcattaagcgccccgcctggggagtacggccgcaaggctaaaactcaaaggaattgacgggggcccgcacaagcggcggagcatgtggattaattcgatgcaacgcgaagaaccttacctgggcttgacatacaccggatcgggctagagatagtctttcccttgtggctggtgtacaggtggtgcatggttgtcgtcagctcgtgtcgtgagatgttgggttaagtcccgcaacgagcgcaacccttgtcttatgttgccagcacgtgatggtggggactcatgagagactgccggggttaactcggaggaaggtggggatgacgtcaaatcatcatgccccttatgtccagggcttcacacatgctacaatggtcggtacaacgcgcagcttccctgtgagggggtgcgaatcgctgaaagccggtcgtagttcggattggggtctgcaactcgaccccatgaagtcggagtcgctagtaatcgcagatcagcaacgctgcggtgaatacgttcccgggccttgtacacaccgcccgtcacgtcatgaaagttggtaacacccgaagccagtggcccaaacgtgttagggagctgtcgaaggtgggatcggcgattgggacgaagtcgtaacaaggtagccgtaccggaaggtgcggctggatcaccttctttcta

SEQ ID NO: 724 - DNA, 1445 bp, Corynebacterium sp.
  NML 93-0481
catgcaagtcgaacggaaaggctccagcttgctggggtactcgagtggcgaacgggtgagtaacacgtgggtgatctgccctgcacttcgggataagcctgggaaactgggtctaataccggataggaccacttctttgaggttgtggtggaaagttttttcggtgtgggatgagctcgcggcctatcagcttgttggtggggtaatggcctaccaaggcgtcgacgggtagccggcctgagagggtgtacggccacattgggactgagatacggcccagactcctacgggaggcagcagtggggaatattgcacaatgggcgcaagcctgatgcagcgacgccgcgtgggggatgacggccttcgggttgtaaactcctttcgtcagggacgaagcgaaagtgacggtacctggataagaagcaccggctaactacgtgccagcagccgcggtaatacgtagggtgcgagcgttgtccggaattactgggcgtaaagagctcgtaggtggtttgtcgcgtcgtttgtggaataccgcagcttaactgtggggttgcaggcgatacgggcataacttgagtgctgtaggggagactggaattcctggtgtagcggtggaatgcgcagatatcaggaggaacaccgatggcgaaggcaggtctctgggcagtaactgacgctgaggagcgaaagcatgggtagcgaacaggattagataccctggtagtccatgccgtaaacggtgggcgctaggtgtgagtcccttccacggggttcgtgccgtagctaacgcattaagcgccccgcctggggagtacggccgcaaggctaaaactcaaaggaattgacgggggcccgcacaagcggcggagcatgtggattaattcgatgcaacgcgaagaaccttacctgggcttgacatacaccggaccgggccagagatggtctttcccttgtggctggtgtacaggtggtgcatggttgtcgtcagctcgtgtcgtgagatgttgggttaagtcccgcaacgagcgcaacccttgtcttatgttgccagcatttggttggggactcatgagagactgccggggttaactcggaggaaggtggggatgacgtcaaatcatcatgccccttatgtccagggcttcacacatgctacaatggtcggtacaacgcgttgctacttcgtgaggagatgctaatcgctaaaagccggccttagttcggattggggtctgcaactcgaccccatgaagtcggagtcgctagtaatcgcagatcagcaacgctgcggtgaatacgttcccgggccttgtacacaccgcccgtcacgtcatgaaagttggtaacacccgaagccagtggcctaaactcgttagggagctgtcgaaggtgggatcggcgattgggacgaagtcgtaacaaggtagccgtaccggaaggtg

SEQ ID NO: 725 - DNA, 1457 bp, Corynebacterium sp.
  NML 97-0186
catgcaagtcgaacggaaaggccagtgcttgcactggtactcgagtggcgaacgggtgagtaacacgtgggtgatctgccctcaactccgggataagcctgggaaactgggtctaatactggataggaccacatcgtaggtggtgtggtggaaagcgtttgtagcggttggggatgagctcgcggcctatcagcttgttggtggggtaatggcctaccaaggcggcgacgggtagccggcctgagagggtgtacggtcacattgggactgagatacggcccagactcctacgggaggcagcagtggggaatattgcacaatgggcgcaagcctgatgcagcgacgccgcgtgggggatgacggccttcgggttgtaaacctctttcgaccgtgacgaagcctttggtgacggtagcggtagaagaagcaccggctaactacgtgccagcagccgcggtaatacgtagggtgcgagcgttgtccggatttactgggcgtaaagggctcgtaggtggtttgtcgcgtcgtctgtgaaattccggggctcaactccgggcgtgcaggcgatacgggcataacttgagtactgcaggggtaactggaattcctggtgtagcggtggaatgcgcagatatcaggaggaacaccgatggcgaaggcaggttactgggcagttactgacgctgaggagcgaaagcatgggtagcgaacaggattagataccctggtagtccatgctgtcaacggtgggcgctaggtgtgagacccttccacgggttttgtgccgtagctaacgttttaagcgccccgcctggggagtacggccgcaaggctaaaactcaaaggaattgacgggggcccgcacaagcggcggagcatgtggattaattcgatgcaacgcgaagaaccttacctgggtttgacatacactggatcgcctcggagacggggtttccctttgtggtcggtgtacaggtggtgcatggttgtcgtcagctcgtgtcgtgagatgttgggttaagtcccgcaacgagcgcaacccttgtcctgtgttgccagcacgttgtggtggggactcacgggagactgccggggtgaactcggaggaaggtggggatgacgtcaaatcatcatgccccttatgtccagggcttcacacatgctacaatggtcggtacaacaggttgcgataccgtgaggtggagctaatccttttaaagccggcctcagttcggattggggtctgcaactcgaccccatgaagtcggagtcgctagtaatcgcagatcagcagtgctgcggtgaatacgttcccgggccttgtacacaccgcccgtcacgtcatgaaagtcggtaacacccgaagcccacggcccaacccttgtggggggagtggtcgaaggtgggatcggcgattgggacgaagtcgtaacaaggtagccgtaccggaaggtgcg

SEQ ID NO: 726 - DNA, 1453 bp, Corynebacterium sp.
  NML 99-0018
catgcaagtcgaacggaaaggcctctagcttgctaggggtactcgagtggcgaacgggtgagtaacacgtgggtgatctgccctgcactttgggataagcttgggaaactgggtctaataccgaatatgaccattgtttggatgcgatggtggaaagcttttgcggtgtgggatgagcctgcggcctatcagcttgttggtggggtaatggcctaccaaggcggcgacgggtatccggcctgagagggtgtacggacacattgggactgagatacggcccagactcctacgggaggcagcagtggggaatattgcacaatgggcgcaagcctgatgcagcgacgccgcgtgggggatgacggccttcgggttgtaaactcctttcgccagggacgaagcgtttttgtgacggtacctggataaraagcaccggctaactacgtgccagcagccgcggtaatacgtagggtgcgagcgttgtccggaattactgggcgtaaagagctcgtaggtggtttgtcgcgtcgtctgtgaaatcccggggcttaacttcgggcgtgcaggcgatacgggcataacttgagtgctgtaggggagactggaattcctggtgtagcggtgaaatgcgcaratatcaggaggaacaccgatggcgaaggcaggtctctgggcagtaactgacgctgaggagcgaaagcatgggtagcgaacaggattagataccctggtagtccatgccgtaaacggtgggcgctaggtgtagggggcttccacgtcttctgtgccgtagctaacgcattaagcgccccgcctggggagtacggccgcaaggctaaaactcaaaggaattgacgggggcccgcacaagcggcggagcatgtggattaattcgatgcaacgcgaagaaccttacctgggcttgacatgtacaggatcgggctagagatagtctttcccttgtggtctgtatacaggtggtgcatggttgtcgtcagctcgtgtcgtgagatgttgggttaagtcccgcaacgagcgcaayccttgtcttatgttgccagcacgttatggtggggactcatgagagactgccggggttaactcggaggaaggtggggatgacgtcaaatcatcatgccccttatgtccagggcttcacacatgctacaatggtcgatacagtgggcagcgacatcgtgaggtggagcgaatccctgaaagtcggccttagttcggattggggtctgcaactcgaccccatgaagtcggagtcgctagtaatcgcagatcagcaacgctgcggtgaatacgttcccgggccttgtacacaccgcccgtcacgtcatgaaagttggtaacacccgaagccagtggcctaaacttgttagggagctgtcgaaggtgggatcggcgattgggacgaagtcgtaacaaggtagccgtaccggaaggtgcg

SEQ ID NO: 727 - DNA, 1522 bp, Corynebacterium striatum
tttttgtggagagtttgatcctggctcaggacgaacgctggcggcgtgcttaacacatgcaagtcgaacggaaaggcctgcagcttgctgcgggtactcgagtggcgaacgggtgagtaacacgtgggtgatctgccttgcacttcgggataagcttgggaaactgggtctaataccggataggacagctgtttagtgtcagttgtggaaagttttttcggtgcaagatgagctcgcggcctatcagcttgttggtggggtaatggcctaccaaggcgtcgacgggtagccggcctgagagggtgtacggccacattgggactgagatacggcccagactcctacgggaggcagcagtggggaatattgcacaatgggcggaagcctgatgcagcgacgccgcgtgggggatgaaggccttcgggttgtaaactcctttcgacagggacgaagcgtaagtgacggtacctgtataagaagcaccggctaactacgtgccagcagccgcggtaatacgtagggtgcgagcgttgtccggaattactgggcgtaaagagctcgtaggtggtttgtcgcgtcgtctgtgaaattccggggcttaactccgggcgtgcaggcgatacgggctgacttgagtgctgtaggggagactggaattcctggtgtagcggtgaaatgcgcagatatcaggaggaacaccgatggcgaaggcaggtctctgggcagtaactgacgctgaggagcgaaagcatgggtagcgaacaggattagataccctggtagtccatgccgtaaacggtgggcgctaggtgtagggggcttccacgtcttctgtgccgtagctaacgcattaagcgccccgcctggggagtacggccgcaaggctaaaactcaaaggaattgacgggggcccgcacaagcggcggagcatgtggattaattcgatgcaacgcgaagaaccttacctgggcttgacatatacaagacaggcgtagagatacgtcctcccttgtggtttgtatacaggtggtgcatggttgtcgtcagctcgtgtcgtgagatgttgggttaagtcccgcaacgagcgcaacccttgtcttatgttgccagcatttggttggggactcatgagagactgccggggtcaactcggaggaaggtggggatgacgtcaaatcatcatgccccttatgtccagggcttcacacatgctacaatggtcggtacaacgcgcagcgacactgtgaggtggagcgaatcgctgaaagccggccttagttcggattggggtctgcaactcgaccccatgaagtcggagtcgctagtaatcgcagatcagcaacgctgcggtgaatacgttcccgggccttgtacacaccgcccgtcacgtcatgaaagttggtaacacccgaagccagtggctcaaactcgttagggagctgtcgaaggtgggatcggcgattgggacgaagtcgtaacaaggtagccgtaccggaaggtgcggctggatcacctcctttct

SEQ ID NO: 728 - DNA, 1468 bp, Corynebacterium sundsvallense
gatgaacgctggcggcgtgcttaacacatgcaagtcgaacggaaaggccagtgcttgcactggtgctcgagtggcgaacgggtgagtaacacgtgagtgatctgccctgcactttgggataagcctgggaaactgggtctaataccggataggaccatgctttagatggtgtggtggaaagttttttcggtgtgggatgagcttgcggcctatcagcttgttggtggggtaatggcctaccaaggcgtcgacgggtagccggcctgagagggtgtacggccacattgggactgagatacggcccagactcctacgggaggcagcagtggggaatattgcacaatgggcgcaagcctgatgcagcgacgccgcgtgggggatgacggccttcgggttgtaaactcctttcgcaactgacgaagctttgtgtgacggtaggttgagaagaagcaccggctaactacgtgccagcagccgcggtaatacgtagggtgcgagcgttgtccggaattactgggcgtaaagagctcgtaggtggtttgtcgcgtcgtgtgtgaaattccggggcttaacttcggggttgcatacgatacgggcataacttgagtgctgtaggggagactggaattcctggtgtagcggtgaaatgcgcagatatcaggaggaacaccgatggcgaaggcaggtctctgggcagtaactgacgctgaggagcgaaagcatggggagcgaacaggattagataccctggtagtccatgccgtaaacggtgggcgctaggtgtgaggcccttccacgggtttcgtgccgtagctaacgcattaagcgccccgcctggggagtacggccgcaaggctaaaactcaaaggaattgacgggggcccgcacaagcggcggagcatgtggattaattcgatgcaacgcgaagaaccttacctgggcttgacatacaccgaatcgctgcagagatgtggtttcccttgtggttggtgtacaggtggtgcatggttgtcgtcagctcgtgtcgtgagatgttgggttaagtcccgcaacgagcgcaacccttgtcttatgttgccagcatgttgtggtgggcacttatgagagactgccggggttaactcggaggaaggtggggatgacgtcaaatcatcatgccccttatgtccagggcttcacacatgctacaatggtcggtacaacgcgcagctacctcgtgaggggacgcgaatcgctgaaagccggtcgtagttcggattggggtctgcaactcgaccccatgaagtcggagtcgctagtaatcgcagatcagcaacgctgcggtgaatacgttcccgggccttgtacacaccgcccgtcacgtcatgaaagttggtaacacccgaagccagtggcctgtgaaaaggagctgtcgaaggtgggatcggcgattgggacgaagtcgtaacaaggtagccgtaccggaagg

SEQ ID NO: 729 - DNA, 1522 bp, Corynebacterium tuberculostearicum
tttttgtggagagtttgatcctggctcaggacgaacgctggcggcgtgcttaacacatgcaagtcgaacggaaaggccctgcttgcagggtactcgagtggcgaacgggtgagtaacacgtgggtgatctgccctgcacttcgggataagcctgggaaactgggtctaataccggataggagccatttttagtgtgatggttggaaagttttttcggtgtaggatgagctcgcggcctatcagcttgttggtggggtaatggcctaccaaggcggcgacgggtagccggcctgagagggtggacggccacattgggactgagatacggcccagactcctacgggaggcagcagtggggaatattgcacaatgggcgcaagcctgatgcagcgacgccgcgtgggggatgacggccttcgggttgtaaactcctttcgctagggacgaagctttttgtgacggtacctagataagaagcaccggctaactacgtgccagcagccgcggtaatacgtagggtgcgagcgttgtccggaattactgggcgtaaagggctcgtaggtggtttgtcgcgtcgtctgtgaaattccggggcttaactccgggcgtgcaggcgatacgggcataacttgagtactgtaggggtaactggaattcctggtgtagcggtgaaatgcgcagatatcaggaggaacaccgatggcgaaggcaggttactgggcagttactgacgctgaggagcgaaagcatgggtagcgaacaggattagataccctggtagtccatgccgtaaacggtgggcgctaggtgtgagggtcttttcacgactttcgtgccgtagctaacgcattaagcgccccgcctggggagtacggccgcaaggctaaaactcaaaggaattgacgggggcccgcacaagcggcggagcatgtggattaattcgatgcaacgcgaagaaccttacctgggcttgacatacaccggatcgggctagagatagtctttccctttgtggctggtgtacaggtggtgcatggttgtcgtcagctcgtgtcgtgagatgttgggttaagtcccgcaacgagcgcaacccttgtcttatgttgccagcatttggttggggactcatgagagactgccggggtcaactcggaggaaggtggggatgacgtcaaatcatcatgccccttatgtccagggcttcacacatgctacaatggtcggtacaacgcgcagcgacactgtgaggtggagcgaatcgctgaaagccggccttagttcggattggggtctgcaactcgaccccatgaagtcggagtcgctagtaatcgcagatcagcaatgctgcggtgaatacgttcccgggccttgtacacaccgcccgtcacgtcatgaaagttggtaacacccgaagccggtggcccaaacttgttagggagccgtcgaaggtgggatcggcgattgggacgaagtcgtaacaaggtacccgtaccggaaggtgcgggtggatcacctcctttct

SEQ ID NO: 730 - DNA, 1502 bp, Corynebacterium tuscaniae
  modified_base (674)..(674): a, c, t, g, unknown or other
agagtttgatcctggctcaggatgaacgctggcggcgtgcttaacacatgcaagtcgaacggaaaggcccaagcttgcttgggtgctcgagtggcgaacgggtgagtaacacgtgggtgatctgccctgcacttcgggataagcctgggaaactgggtctaataccggataggaccatcgtgttgtggcggtggtggaaagttttttcggtgtgggatgagctcgcggcctatcagcttgttggtggggtaatggcctaccaaggcgtcgacgggtagccggcctgagagggtgtacggccacattgggactgagatacggcccagactcctacgggaggcagcagtggggaatattgcacaatgggcgcaagcctgatgcagcgacgccgcgtgggggatgacggccttcgggttgtaaactcctttcgccagggacgaagcgttatgtgacggtacctggataagaagcaccggctaactacgtgccagcagccgcggtaatacgtagggtgcgagcgttgtccggaattactgggcgtaaagagctcgtaggtggtttgtcgcgtcgtttgtgtaataccgcagcttaactgtggggttgcaggcgatacgggcataacttgagtgctgtaggggagactggaattcctggtgtagcggtggaatgcgcanatatcaggaggaacaccgatggcgaaggcaggtctctgggcagtaactgacgctgaggagcgaaagcatgggtagcgaacaggattagataccctggtagtccatgccgtaaacggtgggcgctaggtgtgagtcccttccacggggttcgtgccgtagctaacgcattaagcgccccgcctggggagtacggccgcaaggctaaaactcaaaggaattgacgggggcccgcacaagcggcggagcatgtggattaattcgatgcaacgcgaagaaccttacctgggcttgacatacaccggatcgctgcagagatgtagtttcccttgtggctggtgtacaggtggtgcatggttgtcgtcagctcgtgtcgtgagatgttgggttaagtcccgcaacgagcgcaacccttgtcttatgttgccagcatttggttggggactcatgagagactgccggggttaactcggaggaaggtggggatgacgtcaaatcatcatgccccttatgtccagggcttcacacatgctacaatggtcggtacaacgcgcagctactctgtgaggggatgcgaatcgctgaaagccggccttagttcggattggggtctgcaactcgaccccatgaagtcggagtcgctagtaatcgcagatcagcaacgctgcggtgaatacgttcccgggccttgtacacaccgcccgtcacgtcatgaaagttggtaacacccgaagccagtggcctaaacgtgttagggagctgtcgaaggtgggatcggcgattgggacgaagtcgtaacaaggtagccgtaccggaaggtgcggctggatc

SEQ ID NO: 731 - DNA, 1508 bp, Corynebacterium ulcerans
agagtttgatcctggctcaggacgaacgctggcggcgtgcttaacacatgcaagtcgaacggaaaggccccttcgggggtactcgagtggcgaacgggtgagtaacacgtgggtgatctgcctcgtactctgggataagcctgggaaactgggtctaatactggataggaccgcactttagtgtgtgtggtggaaagttttttcggtacgagatgagcccgcggcctatcagcttgttggtggggtaatggcctaccaaggcgtcgacgggtagccggcctgagagggtggacggccacattgggactgagatacggcccagactcctacgggaggcagcagtggggaatattgcacaatgggcgcaagcctgatgcagcgacgccgcgtgagggatgacggcctcgggttgtaaacctctttcgacagggacgaagcttttgtgacggtacctgtataagaagcaccggctaactacgtgccagcagccgcggtaatacgtagggtgcgagcgttgtccggaattactgggcgtaaagagctcgtaggtggtttgtcgcgtcgtctgtgaaattccggggcttaactccgggcgtgcaggcgatacgggcataacttgagtgctgtaggggagactggaattcctggtgtagcggtggaatgcgcagatatcaggaggaacaccgatggcgaaggcaggtctctgggcagtaactgacgctgaggagcgaaagcatggggagcgaacaggattagataccctggtagtccatgccgtaaacggtgggcgctaggtgtgagggtcttccacgactttcgtgccgtagctaacgcattaagcgccccgcctggggagtacggccgcaaggctaaaactcaaaggaattgacgggggcccgcacaagcggcggagcatgtggattaattcgatgcaacgcgaagaaccttacctgggcttgacatatacaagatcggcgtagagatacgttttcccttgtggtttgtatacaggtggtgcatggttgtcgtcagctcgtgtcgtgagatgttgggttaagtcccgcaacgagcgcaacccttgtcttatgttgccagcacgttatggtggggactcatgagagactgccggggttaactcggaggaaggtggggatgacgtcaaatcatcatgccccttatgtccagggcttcacacatgctacaatggtcggtacaacgcgttgcgagcctgtgagggtgagcgaatcgctgaaagccggcctcagttcggattggggtctgcaactcgaccccatgaagtcggagtcgctagtaatcgcagatcagcaacgctgcggtgaatacgttcccgggccttgtacacaccgcccgtcacgtcatgaaagttggtaacacccgaagcccatggcccaaccagtttgtctggggggagtggtcgaaggtgggatcggcgattgggacgaagtcgtaacaaggtagccgtaccggaaggtgcggctggatcacct

SEQ ID NO: 732 - DNA, 1401 bp, Corynebacterium urealyticum
  modified_base (830)..(830): a, c, t, g, unknown or other
  modified_base (882)..(882): a, c, t, g, unknown or other
acgaacgctggcggcgtgcttaacacatgcaagtcgaacggaaaggcccctgcttgcagggtactcgagtggcgaacgggtgagtaacacgtgggtgatctgcccttcacttcgggataagcctgggaaactgggtctaataccggataggaccaatctttagtgtggttggtggaaagttttttcggtggaggatgagcccgcggcctatcagcttgttggtggggtaatggcctaccaaggcgacgacgggtagccggcctgagagggtggacggccacattgggactgagacacggcccagactcctacgggaggcagcagtggggaatattgcacaatgggcggaagcctgatgcagcgacgccgcgtgagggatgacggccttcgggttgtaaacctctttcgctagggaagaagccttcgggtgacggtacctggataagaagcaccggctaactacgtgccagcagccgcggtaatacgtagggtgcgagcgttgtccggaattactgggcgtaaagagctcgtaggtggtttgtcgcgtcgtctgtgaaattccggggcttaactccgggcgtgcaggcgatacgggcaaactggagtgctgtaggggagactggaattcctggtgtagcggtggaatgcgcagatatcaggaggaacaccgatggcgaaggcaggtctctgggcagttactgacactgaggagcgaaagcatgggtagcgaacaggattagataccctggtagtccatgccgtaaacggtgggcgctaggtgtggggatttttcacgatttccgtgccgtagctaacgcattaagcgcccngcctggggagtacggccgcaaggctaaaactcaaaggaattgacgggggccngcacaagcggcggagcatgtggattaattcgatgcaacgcgaagaaccttacctgggcttgacatacaccggatcgctgcagagatgtagtttcccttcggggctggtgtacaggtggtgcatggttgtcgtcagctcgtgtcgtgagatgttgggttaagtcccgtaacgagcgcaacccttgtcttgtgttgccagcacgttgtggtggggactcacaagagactgccggggttaactcggaggaaggtggggatgacgtcaaatcatcatgccccttatgtccagggcttcacacatgctacaatggtcgatacagtgggttgcgatgccgtgaggtggagctaatccctgaaagtcggcctcagttcggattggagtctgcaactcgactccatgaagtcggagtcgctagtaatcgcagatcagcaacgctgcggtgaatacgttcccgggccttgtacacaccgcccgtcgcgtcatgaaagttggtaacacccgaacgcagtggcctaaact

SEQ ID NO: 733 - DNA, 1480 bp, Corynebacterium ureicelerivorans
ggcgtgcttaacacatgcaagtcgaacggaaaggcccaagcttgcttgggtactcgagtggcgaacgggtgagtaacacgtgggtgatctgccctgcacttcgggataagcctgggaaactgggtctaatactggataggaccacttcttggatgttgtggtggaaagttttttcggtgtgggatgagctcgcggcctatcagcttgttggtggggtaatggcctaccaaggcgtcgacgggtagccggcctgagagggtgtacggccacattgggactgagatacggcccagactcctacgggaggcagcagtggggaatattgcacaatgggcgcaagcctgatgcagcgacgccgcgtgggggatgacggccttcgggttgtaaactcctttcgctagggacgaagcgtttttgtgacggtacctggagaagaagcaccggctaactacgtgccagcagccgcggtaatacgtagggtgcagcgttgtccggaattactgggcgtaaagagctcgtaggtggtttgtcgcgtcgtttgtgtaagcccgcagcttaactgcgggactgcaggcgatacgggcataacttgagtgctgtaggggagactggaattcctggtgtagcggtggaatgcgcagatatcaggaggaacaccgatggcgaaggcaggtctctgggcagtaactgacgctgaggagcgaaagcatgggtagcgaacaggattagataccctggtagtccatgccgtaaacggtgggcgctaggtgtgagtcccttccacggggttcgtgccgtagctaacgcattaagcgccccgcctggggagtacggccgcaaggctaaaactcaaaggaattgacgggggcccgcacaagcggcggagcatgtggattaattcgatgcaacgcgaagaaccttacctgggcttgacatacaccagatcgtcgtagagatacggtttccctttgtggttggtgtacaggtggtgcatggttgtcgtcagctcgtgtcgtgagatgttgggttaagtcccgcaacgagcgcaacccttgtcttatgttgccagcacgttatggtggggactcgtgagagactgccggggttaactcggaggaaggtggggatgacgtcaaatcatcatgccccttatgtccagggcttcacacatgctacaatggtcggtacaacgcgcatgcgagcctgtgagggtgagcgaatcgctgtaaagccggtcgtagttcggattggggtctgcaactcgaccccatgaagtcggagtcgctagtaatcgcagatcagcaacgctgcggtgaatacgttcccgggccttgtacacaccgcccgtcacgtcatgaaagttggtaacacccgaagccagtggcctgtcatgggagctgtcgaaggtgggatcggcgattgggacgaagtcgtaacaaggtagccgtaccggaaggtgcggctggatcacctcctttct

SEQ ID NO: 734 - DNA, 1436 bp, Corynebacterium variabile
gacgaacgctggcggcgtgcttaacacatgcaagtcgaacggaaaggccctgcttgcagggtactcgagtggcgaacgggtgagtaacacgtgggtgatctgccctgcacttcgggataagcctgggaaactgggtctaataccggataggaccatcgtttagtgtcggtggtggaaagtttttcggtgcaggatgagctcgcggcctatcagcttgttggtggggtaatggcctaccaaggcgtcgacgggtagccggcctgagagggtggacggccacattgggactgagacacggcccagactcctacgggaggcagcagtggggaatattgcacaattgggcgcaagcctgatgcagcgacgccgcgtgggggatgaaggccttcgggttgtaaactcctttcaaccatgacgaagcattatgtgacggtagtggtagaagaagcaccggctaactacgtgccagcagccgcggtaatacgtagggtgcgagcgttgtccggaattactgggcgtaaagagctcgtaggtggtttgtcgcgtcgtctgtgaaattccggggcttaactccgggcgtgcaggcgatacgggcataacttgagtgctgtaggggagactggaattcctggtgtagcggtgaaatgcgcagatatcaggaggaacaccgatggcgaaggcaggtctctgggcagtaactgacgctgaggagcgaaagcatgggtagcgaacaggattagataccctggtagtccatgccgtaaacggtgggcgctaggtgtgggggtcttccacgacttctgtgccgtagctaacgcattaagcgccccgcctggggagtacggccgcaaggctaaaactcaaaggaattgacgggggcccgcacaagcggcggagcatgtggattaattcgatgcaacgcgaagaaccttacctgggcttgacatatgccggatcgrcgcagagatgcgttttcccttgtggtcggtatacaggtggtgcatggttgtcgtcagctcgtgtcgtgagatgttgggttaagtcccgcaacgagcgcaacccttgtcttgtgttgccagcacgttatggtggggactcgcgagagactgccggggttaactcggaggaaggtggggatgacgtcaaatcatcatgccccttatgtccagggcttcacacatgctacaatggtcggtacagtgggttgctacaccgtgaggtggtgctaatcccttaaagccggtctcagttcggattggagtctgcaactcgactccatgaagtcggagtcgctagtaatcgcagatcagcaacgctgcggtgaatacgttcccgggccttgtacacaccgcccgtcacgtcatgaaagttggtaacacccgaagccagtggcccaaactcgttagggagctgtcgaaggtgggatcggcgattgg

SEQ ID NO: 735 - DNA, 1362 bp, Corynebacterium xerosis
  modified_base (185)..(185): a, c, t, g, unknown or other
agtcgaacggtaaggccccagcttgctggggtacacgagtggcgaacgggtgagtaacacgtgggtgacctgccccgcacttcgggataagcctgggaaactgggtctaataccggataggaccgcaccgtgagggtgtggtggaaagtttttcggtgtgggatgggcccgcggcctatcagctngttggtggggtaatggcctaccaaggcggcgacgggtagccggcctgagagggtggacggccacattgggactgagacacggcccagactcctacgggaggcagcagtggggaatattgcacaatgggcggaagcctgatgcagcgacgccgcgtgggggatgacggccttcgggttgtaaactcctttcaccatcgacgaaggttttctgacggtagatggagaagaagcaccggctaactacgtgccagcagccgcggtaatacgtagggtgcgagcgttgtccggaattactgggcgtaaagagctcgtaggtggtttgtcgcgtcgtctgtgaaattccggggcttaactccgggcgtgcaggcgatacgggcataacttgagtactgtaggggagactggaattcctggtgtagcggtgaaatgcgcagatatcaggaggaacaccggtggcgaaggcgggtctctgggcagtaactgacgctgaggagcgaaagcatgggtagcgaacaggattagataccctggtagtccatgccgtaaacggtgggcgctaggtgtaggggtcttccacgacttctgtgccgtagctaacgcattaagcgccccgcctggggagtacggccgcaaggctaaaactcaaaggaattgacgggggcccgcacaagcggcggagcatgtggattaattcgatgcaacgcgaagaaccttacctgggcttgacatatacgggaccgggccagagatggtccttcccttgtggctcgtatacaggtggtgcatggttgtcgtcagctcgtgtcgtgagatgttgggttaagtcccgcaacgagcgcaacccttgtcttatgttgccagcacgtaatggtggggactcgtgagaaactgccggggtcaactcggaggaaggtggggatgacgtcaaatcatcatgccccttatgtccagggcttcacacatgctacaatggtcggtacagtgggttgcgatgccgtgaggtggagctaatccctgaaagccggtctcagttcggatcggggtctgcaactcgaccccgtgaagtcggagtcgctagtaatcgcagatcagcaacgctgcggtgaatacgttcccgggccttgtacacaccgcccgtcacgtcatgaaagtcggtaacacccgaagccagtggccc

SEQ ID NO: 736 - DNA, 1544 bp, Coxiella burnetii
tttaattgaagagtttgattctggctcagattgaacgctagcggcatgcttaacacatgcaagtcgaacggcagcgcggggagcttgctccctggcggcgagtggcggacgggtgagtaatgcgtaggaatctaccttgtagtgggggataacctggggaaactcgggctaataccgcataatctctttggagcaaagcgggggatcttcggacctcgtgctataagatgagcctacgtcggattagcttgttggtggggtaatggcctaccaaggcgacgatccgtagctggtctgagaggacgatcagccacactgggactgagacacggcccagactcctacgggaggcagcagtggggaatattggacaatgggggaaaccctgatccagcaatgccgcgtgtgtgaagaaggccttcgggttgtaaagcactttcggtggggaagaaattctcaagggtaatatccttgggcgttgacgttacccacagaagaagcactggctaactctgtgccagcagccgcggtaatacagagagtgcaagcgttaatcggaatcactgggcgtaaagcgcgcgtaggtggatatttaagtcggatgtgaaagccctgggcttaacctgggaattgcatccgatactgggtatcttgagtatggtagagggaagtggaatttccggtgtagcggtgaaatgcgtagatatcggaaagaacaccagtggcgaaggcgacttcctggaccaatactgacactgaggcgcgaaagcgtggggagcaaacaggattagagaccctggtagtccacgccgtcaacgatgagaactagctgttgggaagttcacttcttagtagcgaagctaacgcgttaagttctccgcctggggagtacggccgcaaggttaaaactcaaagaaattgacgggggcccgcacaagcggtggagcatgtggtttaattcgatgcaacgcgaaaaaccttacctacccttgacatcctcggaacttgtcagagatgatttggtgccttcgggaaccgagtgacaggtgctgcatggctgtcgtcagctcgtgtcgtgagatgttgggttaagtcccgtaacgagcgcaaccctcgtccttagttgccagcgagtcaagtcgggaactctaaggagactgccggtgataaaccggaggaaggtggggatgatgtcaagtcatcatggcccttacgggtagggctacacacgtgctacaatgggcagtacaaagggttgccaagccgcgaggtggagctaatcccagaaaactgctcgtagtccggattggagtctgcaactcgactccatgaagttggaatcgctagtaatcgcgaatcagcatgtcgcggtgaatacgttctcgggccttgtacacaccgcccgtcacaccatgggagtgaattgtaccagaagcgggtaggctaaccttcgggaggccgctcaccacggtatgatccatgactggggtgaagtcgtaacaaggtagccgtaggggaacctgcggctggatcacctccttact

SEQ ID NO: 737 - DNA, 1507 bp, Cronobacter malonaticus
agagtttgatcatggctcagattgaacgctggcggcaggcctaacacatgcaagtcgaacggtaacagagagcagcttgctgctctgctgacgagtggcggacgggtgagtaatgtctgggaaactgcctgatggagggggataactactggaaacggtagctaataccgcataacgtcttcggaccaaagtgggggaccttcgggcctcatgccatcagatgtgcccagatgggattagctagtaggtggggtaaaggctcacctaggcgacgatccctagctggtctgagaggatgaccagccacactggaactgagacacggtccagactcctacgggaggcagcagtggggaatattgcacaatgggcgcaagcctgatgcagccatgccgcgtgtatgaagaaggccttcgggttgtaaagtactttcagcgaggaggaagggattgtggttaataaccgcagtcattgacgttactcgcagaagaagcaccggctaactccgtgccagcagccgcggtaatacggagggtgcaagcgttaatcggaattactgggcgtaaagcgcacgcaggcggtttgttaagtcagatgtgaaatccccgggctcaacctgggaactgcatttgaaactggcaagcttgagtctcgtagaggggggtagaattccaggtgtagcggtgaaatgcgtagagatctggaggaataccggtggcgaaggcggccccctggacgaagactgacgctcaggtgcgaaagcgtggggagcaaacaggattagataccctggtagtccacgccgtaaacgatgtcgacttggaggttgtgcccttgaggcgtggcttccggagctaacgcgttaagtcgaccgcctggggagtacggccgcaaggttaaaactcaaatgaattgacgggggcccgcacaagcggtggagcatgtggtttaattcgatgcaacgcgaagaaccttacctggtcttgacatccagagaatcctgcagagatgcgggagtgccttcgggaactctgagacaggtgctgcatggctgtcgtcagctcgtgttgtgaaatgttgggttaagtcccgcaacgagcgcaacccttatcctttgttgccagcacgtaatggtgggaacccaaaggagactgccggtgataaaccggaggaaggtggggatgacgtcaagtcatcatggcccttacgaccagggctacacacgtgctacaatggcgcatacaaagagaagcgaactcgcgagagcaagcggacctcataaagtgcgtcgtagtccggattggagtctgcaactcgactccatgaagtcggaatcgctagtaatcgtggatcagaatgccacggtgaatacgttcccgggccttgtacacaccgcccgtcacaccatgggagtgggttgcaaaagaagtaggtagcttaaccttcgggagggcgcttaccactttgtgattcatgactggggtgaagtcgtaacaaggtagccgta

SEQ ID NO: 738 - DNA, 1542 bp, Cronobacter sakazakii
aattgaagagtttgatcatggctcagattgaacgctggcggcaggcctaacacatgcaagtcgaacggtaacagggagtagcttgctgctctgctgacgagtggcggacgggtgagtaatgtctgggaaactgcctgatggagggggataactactggaaacggtagctaataccgcataacgtctacggaccaaagtgggggaccttcgggcctcatgccatcagatgtgcccagatgggattagctagtaggtggggtaacggctcacctaggcgacgatccctagctggtctgagaggatgaccagccacactggaactgagacacggtccagactcctacgggaggcagcagtggggaatattgcacaatgggcgcaagcctgatgcagccatgccgcgtgtatgaagaaggccttcgggttgtaaagtactttcagcggggaggaaggcgttgtggttaataaccacagcgattgacgttacccgcagaagaagcaccggctaactccgtgccagcagccgcggtaatacggagggtgcaagcgttaatcggaattactgggcgtaaagcgcacgcaggcggtctgttaagtcagatgtgaaatccccgggctcaacctgggaactgcatttgaaactggcaggcttgagtctcgtagaggggggtagaattccaggtgtagcggtgaaatgcgtagagatctggaggaataccggtggcgaaggcggccccctggacgaagactgacgctcaggtgcgaaagcgtggggagcaaacaggattagataccctggtagtccacgccgtaaacgatgtcgacttggaggttgtgcccttgaggcgtggcttccggagctaacgcgttaagtcgaccgcctggggagtacggccgcaaggttaaaactcaaatgaattgacgggggcccgcacaagcggtggagcatgtggtttaattcgatgcaacgcgaagaaccttacctggtcttgacatccagagaatcctgcagagatgcgggagtgccttcgggaactctgagacaggtgctgcatggctgtcgtcagctcgtgttgtgaaatgttgggttaagtcccgcaacgagcgcaacccttatcctttgttgccagcggttcggccgggaactcaaaggagactgccggtgataaaccggaggaaggtggggatgacgtcaagtcatcatggcccttacgaccagggctacacacgtgctacaatggcgcatacaaagagaagcgacctcgcgagagcaagcggacctcataaagtgcgtcgtagtccggattggagtctgcaactcgactccatgaagtcggaatcgctagtaatcgtggatcagaatgccacggtgaatacgttcccgggccttgtacacaccgcccgtcacaccatgggagtgggttgcaaaagaagtaggtagcttaaccttcgggagggcgcttaccactttgtgattcatgactggggtgaagtcgtaacaaggtaaccgtaggggaacctgcggttggatcacctccttac

SEQ ID NO: 739 - DNA, 312 bp, Cronobacter turicensis
  modified_base (293)..(294): a, c, t, g, unknown or other
ctcaaaggagactgccggtgataaaccggaggaaggtggggatgacgtcaagtcatcatggcccttacgaccagggctacacacgtgctacaatggcagatacaaagagaagcgacctcgcgagagcaagcggaactcataaagtgtgtcgtagtccggattggagtctgcaactcgactccatgaagtcggaatcgctagtaatcgtagatcagaatgccacggtgaatacgttcccgggccttgtacacaccgcccgtcacaccatgggagtgggttgcaaaagaagtagnnagcttaaccttcgggagg

SEQ ID NO: 740 - DNA, 1448 bp, Cryptobacterium curtum
gagtttgatcctggctcaggatgaacgctggcggcgcgcctaacacatgcaagtcgaacgattaaaccgcccttgggcggatatacagtggcgaacgggtgagtaacgcgtgaccaaccttccccccgcatcgggacaacccggggaaacccgggctaataccggatatgccgggtatggcgcatgtcatacccaggaaagcttttgcggcgggggatggggtcgcgtcccatcaggtagacggcggggtagtagcccaccgtgccaacgacgggtagccgggttgagagaccgaccggccacattgggactgagatacggcccagactcctacgggaggcagcagtggggaatcttgcgcaatgggggaaaccctgacgcagcgacgccgcgtgcgggatggaggccttcgggccgtgaaccgctttcagcagggaagacattaaggacggtacctgcagaagaagccccggctaactacgtgccagcagccgcggtaatacgtagggggcgagcgttatccggattcattgggcgtaaagcgcgcgcaggcggcgcaccaggcgggatctcgaaaccgggggctcaacctccgggcggatcccgaaccggtgtgctcgagtgcggtagaggaagtcggaattcccggtgtagcggtgaaatgcgcagatatcgggaagaacaccgatggcgaaggcagacttctgggccgacactgacgctcaggcgcgaaagctgggggagcgaacaggattagataccctggtagtcccagccgtaaacgatgggcactaggtgtggggggcatttgccttccgtgccgcagctaacgcattaagtgccccgcctggggagtacggccgcaaggctaaaactcaaaggaattgacgggggcccgcacaagcagcggagcatgtggcttaattcgaagcaacgcgaagaaccttaccagggcttgacatgtaggtgaagcgacagagatgtcgcagccgaaaggagcctacacaggtggtgcatggctgtcgtcagctcgtgtcgtgagatgttgggttaagtcccgcaacgagcgcaacccctgccgcatgttgccagcatttagttggggactcatgcgggaccgccggcggcaagccggaggaaggcggggacgacgtcaagtcatcatgccccttatgccctgggctgcacacgtgctacaatggccggcacaacgggatgcaaaggcgcgagcccaagcggatcccccaaagccggtcccagttcggatcggaggctgcaacccgcctccgtgaagccggagttgctagtaatcgcggatcagcatgccgcggtgaatacgttcccgggccttgtacacaccgcccgtcacaccacccgagtcgtctgcacccgaagtcgccggccgaacccttttgggacggaggcgccgaaggcgcgggggataaggg

SEQ ID NO: 741 - DNA, 1400 bp, Cupriavidus metallidurans
catgcaagtcgaacggcagcgcggacttcggtctggcggcgagtggcgaacgggtgagtaatacatcggaacgtaccctgttgtgggggataactagtcgaaagattagctaataccgcatacgacctgagggtgaaagtgggggaccgcaaggcctcacgcagcaggagcggccgatgtctgattagctagttggtggggtaaaggcccaccaaggcgacgatcagtagctggtctgagaggacgatcagccacactgggactgagacacggcccagactcctacgggaggcagcagtggggaattttggacaatgggggcaaccctgatccagcaatgccgcgtgtgtgaagaaggccttcgggttgtaaagcacttttgtccggaaagaaatcgcgctggttaatacctggcgtggatgacggtaccggaagaataagcaccggctaactacgtgccagcagccgcggtaatacgtagggtgcgagcgttaatcggaattactgggcgtaaagcgtgcgcaggcggttttgtaagacaggcgtgaaatccccgggcttaacctgggaattgcgcttgtgactgcaaggctagagtgcgtcagaggggggtagaattccacgtgtagcagtgaaatgcgtagagatgtggaggaataccgatggcgaaggcagccccctgggacgtgactgacgctcatgcacgaaagcgtggggagcaaacaggattagataccctggtagtccacgccctaaacgatgtcaactagttgttggggattcattttctcagtaacgtagctaacgcgtgaagttgaccgcctggggagtacggtcgcaagattaaaactcaaaggaattgacggggacccgcacaagcggtggatgatgtggattaattcgatgcaacgcgaaaaaccttacctacccttgacatgccactaacgaagcagagatgcattaggtgcccgaaagggaaagtggacacaggtgctgcatggctgtcgtcagctcgtgtcgtgagatgttgggttaagtcccgcaacgagcgcaacccttgtctctagttgctacgcaagagcactctagagagactgccggtgacaaaccggaggaaggtggggatgacgtcaagtcctcatggcccttatgggtagggcttcacacgtcatacaatggtgcgtacagagggttgccaacccgcgagggggagctaatcccagaaaacgcatcgtagtccggatcgtagtctgcaactcgactacgtgaagctggaatcgctagtaatcgcggatcagcatgccgcggtgaatacgttcccgggtcttgtacacaccgcccgtcacaccatgggagtgggttttgccagaagtagttagcctaaccgcaaggagggcgat

SEQ ID NO: 742 - DNA, 1507 bp, Cytophaga xylanolytica
gtttgatcctggctcaggatgaacgctagcgacaggcctaacacatgcaagtcgaggggcagcacgtcttcggatggtggcgaccggcgcacgggtgagtaacgcgtatgtaacctgcctacaacagggggatagctcgctgaaaagcgaattaagaccgcataagaccacgctttcgcatgttagcgtggtaaaatatttataggttgtagatgggcatgcgtgacattagctagttggtaaggtaacggcttaccaaggcaacgatgtctaggggttctgagaggaaggtcccccacactggtactgagacacggaccagactcctacgggaggcagcagtgaggaatattggtcaatgggcgagagcctgaaccagccatgtcgcgtgcaggatgacggccctacgggttgtaaactgcttttgtacgggaagaaaaaacgccacgtgtggtgtcttgccggtaccgtacgaataaggatcggctaactccgtgccagcagccgcggtaatacggaggatccgagcgttatccggatttattgggtttaaagggtgcgtaggcgggagattaagtcagtggtgaaagtttgcggctcaaccgtaaaattgccattgatactggttttcttgagtacagttgaggtaggcggaatgtggtgtgtagcggtgaaatgcttagatataccacagaacaccgattgcgaaggcagcttactaaagtgtaactgacgctgatgcacgaaagcgtggggatcaaacaggattagataccctggtagtccacgcagtaaacgatgatcactcgttgtttgcgatacattgcaagtgaccaagagaaatcgataagtgatccacctggggagtacggccgcaaggctgaaactcaaaggaattgacgggggcccgcacaagcggaggaacatgtggtttaattcgatgatacgcgaggaaccttacctgggtttaaatggggagtgacagctgccgaaaggtggtcttcttcggacactcttcaaggtgctgcatggttgtcgtcagctcgtgccgtgaggtgtcgggttaagtcccataacgagcgcaacccacgtcgttagttgccatcaggtsatgctgggcactctaacgagactgccggtgtaaaccgcgaggaaggtgtggatgacgtcaaatcagcacggcccttacatccagggctacacacgtgttacaatggccggtacagagggctgctaccatgcgaatggatgctaatcctaaaaaccggtcccagttcggattggagtctgcaacccgactccatgaagctggattcgctagtaatcgcgcatcagccatggcgcggtgaatacgttcccgggccttgtacacaccgcccgtcaagccatggaagctgagggtacctaaagtctgtcaccgtaaggagcggcctagggtaaaattggtaactggggctaagtcgtaacaaggtagccgtaccggaaggtgcggctggatcacctcctt

SEQ ID NO: 743 - DNA, 1325 bp, Deferribacteres sp.
  oral clone JV001
ggagtttgatcctggctcaggatgaacgctggcggcgtgcgtaacacatgcaagttgaacgagtagcggacgggtgagtacaacatgagaagctgtccttcagcggggggcaacgtctggaagcggacgctaataccccatagtaaaggcgcgacgggaggtactcgtgtcctatcagctagttggtgaggtaacggctcaccaaggcgacgacgggtagccggcctgagagggtgaccggccacactggaactgagatacggtccagactcctacgggaggcagcagtggggaatattgggcaatgggaggaatcctgacccagcgacgccgcgtgaacgaagacggccttcgggttgtaaagttcttttatgtgggaagatgacggtaccacatgaataagccccggctaactacgtgccagcagccgcggtaatacgtagggggcgagcgttgtccggaattactgggcgtaaagggcacgcaggctgtgcttcaagtcagctgtaaaaggatgcggcttaaccgtgttatgcagttgagactgaggtgctggagtaccggagaggcaagtggaattcccagtgtagcggtgaaatgcgtagatattgggaagaacatcggtggcgaaggcgacttgctggacggactgacgctgaggtgcgaaagccagggtagcgaacgggattagataccccggtagtcctggctgtaaacgatgaatgctaggtgtgcgagttggtgtgccgcagttaacgcgataagcattccgcctggggagtacggtcgcaagattgaaactcaaaggaattgacgggggcccgcacaagcggtggagcacgtggtttaattcgatgcaaaccgaagaaccttacctgggtttgacatgcacaggtgctgcatggctgtcgtcagctcgtgtcgtgagatgttgggttaagtcccgcaacgagcgcaacccctgcgattagttgccagcggccgggcactctaatgggactgccatcgacaagatggaggaaggtggggatgacgtcaagtcatcatggcccttatgtccagggcgacacacgtgctacaatggccggcagagggaagcgaggctgtgaggttgagcggatcccctccggtctcagttcggatgaagtctgcaattcgacttcagaagctggaatcgctagtaatcgcagatcagccaagctgcggtgaatacgttcccgggccttgtacacaccgcccgtcacaccacccgagccgggtgtacccgaagccggtgcctaaggagccgtcgaaggtgtgtctggtgaggggggtgaagtcgtaac

SEQ ID NO: 744 - DNA, 1325 bp, Deferribacteres sp.
  oral clone JV006
ggagtttgatcatggctcaggatgaacgctggcggcgtgcgtaacacatgcaagttgaacgagtagcggacgggtgagtaaagcatgagaatctgtcctgtcgagggggataacgttcggaaacggaccctaataccccatagtaaaggcgcggcaggaggagctcgtgtcctatcagctagttggtgaggtaacggctcaccaaggcttcgacgggtagccggcctgagagggtgaccggccacactggaactgagacacggtccagactcctacgggaggcagcagtggggaatattgggcaatgggagaaatcctgacccagcgacgccgcgtgaacgaagacggccttcgggttgtaaagttcttttatgtgggaagatgacggtaccacatgaataagccccggctaactacgtgccagcagccgcggtaatacgtagggggcgagcgttgtccggaattactgggcgtaaagggcacgcaggctgtgcttcaagtcagctgtaaaaggatgcggcttaaccgtgttatgcagttgagactgaggtgctggagtaccggagaggcaagtggaattcccagtgtagcggtgaaatgcgtagatattgggaagaacatcggtggcgaaggcgacttgctggacggactgacgctgaggtgcgaaagccagggtagcgaacgggattagataccccggtagtcctggccgtaaacgatgaatgctaggtgtgcgagttggtgtgccgcagttaacgcgataagcattccgcctggggagtacggtcgcaagattgaaactcaaaggaattgacgggggcccgcacaagcggtggagcacgtggtttaattcgatgcaaaccgaagaaccttacctgggtttgacatgcacaggtgctgcatggctgtcgtcagctcgtgtcgtgagatgttgggttaagtcccgcaacgagcgcaacccctgcgattagttgccagcgatcgggcactctaatgggactgccatcgacaagatggaggaaggtggggatgacgtcaagtcatcatggcccttatgtccagggcgacacacgtgctacaatggccggcagagggaagcgacactgcgaggtgaagcggatcccatccgctctcagttcggatgaagtctgcaattcgacttcagaagttggaatcgctagtaatcgcagatcaaccaagctgcggtgaatccgtccccgggccttgtacacaccgcccgtcacaccacccgagccgggtgtacccgaggccggtgcctaaggagccgtcgaaggtgtgtctggtgaggggggtgaagtcgtaac

SEQ ID NO: 745 - DNA, 1325 bp, Deferribacteres sp.
  oral clone JV023
ggagtttgatcctggctcaggatgaacgctggcggcgtgcgtaacacatgcaagttgaacgagtagcggacgggtgagtaaagcatgagaatctgtcctgccgagggggataacgttcggaaacggaccctaataccccatagtaaaggcgcggcaggaggagctcgtgtcctatcagctggttggtgaggtaagggctcaccaaggcttcgacgggtagccggcctgagagggtgaccggccacactggaactgagagacggtccagactcctacgggaggcagcagtggggaatattgggcaatgggaggaatcctgacccagcgacgccgcgtgaacgaagacggccttcgggttgtaaagttcttttatgtgggaagatgacggtaccacatgaataagccccggctaactacgtgccagcagccgcggtaatacgtagggggcgagcgttgtccggaattactgggcgtaaagggcacgcaggctgtgcttcaagtcagctgtaaaaggatgcggcttaaccgtgttatgcagttgagactgaggtgctggagtaccggagaggcaagtggaattcccagtgtagcggtgaaatgcgtagatattgggaagaacatcggtggcgaaggcgacttgctggacggactgacgctgaggtgcgaaagccagggtagcgaacgggattagataccccggtagtcctggcggtaaacgatgaatgctaggtgtgcgagttggtgtgccgcagttaacgcgataagcattccgcctggggagtacggtcgcaagattgaaactcaaaggaattgacgggggcccgcacaagcggtggagcacgtggtttaattcgatgcaaaccgaagaaccttacctgggtttgacatgcacaggtgctgcatggctgtcgtcagctcgtgtcgtgagatgttgggttaagtcccgcaacgagcgcaacccctgcgattagttgctaacggccgagcactctaatgggactgccatcgacaagatggaggaaggtggggatgacgtcaagtcatcatggcccttatgtccagggcgacacacgtgctacaatggccggcagagggaagcgaggctgtgaggttgagcggatcccctccggtcacagttcggatgaagtctgcaattcgacttcagaagctggaatcgctagtaatcgcagatcagccaagctgcggtgaatacgttcccgggccttgtacacaccgcccgtcacaccacccgagccgggtgtacccgaagccggtgcctaaggagccgtcgaaggtgtgtctggtgaggggggtgaagtcgtaac

SEQ ID NO: 746 - DNA, 1502 bp, Deinococcus radiodurans
tttatggagagtttgatcctggctcagggtgaacgctggcggcgtgcttaagacatgcaagtcgaacgcggtcttcggaccgagtggcgcacgggtgagtaacacgtaactgacctacccagaagtcacgaataactggccgaaaggtccgctaatacgtgatgtggtgatgcaccgtggtgcatcactaaagatttatcgcttctggatggggttgcgttccatcagctggttggtggggtaaaggcctaccaaggcgacgacggatagccggcctgagagggtggccggccacaggggcactgagacacgggtcccactcctacgggaggcagcagttaggaatcttccacaatgggcgcaagcctgatggagcgacgccgcgtgagggatgaaggttttcggatcgtaaacctctgaatctgggacgaaagagccttagggcagatgacggtaccagagtaatagcaccggctaactccgtgccagcagccgcggtaatacggagggtgcaagcgttacccggaatcactgggcgtaaagggcgtgtaggcggaaatttaagtctggttttaaagaccggggctcaacctcggggatggactggatactggatttcttgacctctggagaggtaactggaattcctggtgtagcggtggaatgcgtagataccaggaggaacaccaatggcgaaggcaagttactggacagaaggtgacgctgaggcgcgaaagtgtggggagcaaaccggattagatacccgggtagtccacaccctaaacgatgtacgttggctaagcgcaggatgctgtgcttggcgaagctaacgcgataaacgtaccgcctgggaagtacggccgcaaggttgaaactcaaaggaattgacgggggcccgcacaagcggtggagcatgtggtttaattcgaagcaacgcgaagaaccttaccaggtcttgacatgctaggaactttgcagagatgcagaggtgcccttcggggaacctagacacaggtgctgcatggctgtcgtcagctcgtgtcgtgagatgttgggttaagtcccgcaacgagcgcaacccttgcctttagttgtcagcattcagttggacactctagagggactgcctatgaaagtaggaggaaggcggggatgacgtctagtcagcatggtccttacgtcctgggcgacacacgtgctacaatgggtaggacaacgcgcagcaaacccgcgagggtaagcgaatcgctaaaacctatccccagttcagatcggagtctgcaactcgactccgtgaagttggaatcgctagtaatcgcgggtcagcataccgcggtgaatacgttcccgggccttgtacacaccgcccgtcacaccatgggagtagattgcagttgaaaccgccgggagcttaacggcaggcgtctagactgtggtttatgactggggtgaagtcgtaacaaggtaactgtaccggaaggtgcggttggatcacctccttt

SEQ ID NO: 747 - DNA, 1333 bp, Deinococcus sp.
  R-43890
ggtgaacgctggcggcgtgcttaagacatgcaagtcgaacgagatcttcggatctagtggcgcacgggtgagtatcgcgtgactgacctgccccaaagttccgaataactggctgaaaggtcagctaatacggaatgtgcagcatcctcgtgtggatgttgtaaaggctatgaccgctttgggatggggttgcgttccatcagctagttggtggggtaaaggcccaccaaggcgacgacggataaccggcctgagagggtggccggtcacaggggcactgagacacgggtcccactcctacgggaggcagcagttaggaatcttccccaatggacgaaagtctgagggagcgacgccgcgtgagggatgaaggttttcggatcgtaaacctctgaatctgggacgaaagaccgggacaaccggagatgacggtaccagagtaatagcaccggctaactccgtgccagcagccgcggtaatacggagggtgcaagcgttacccggaatcactgggcgtaaagggcgtgtaggcggcatcacaagtctggttttaaagcctgcggctcaaccgcagagatggactggagactgtgaagctagacctctggagagagaactggaattcctggtgtagcggtggaatgcgtagataccaggaggaacaccgatggcgaaggcaggttcttggacagaaggtgacgctgaggcgcgaaagtgtggggagcaaaccggattagatacccgggtagtccacaccctaaacgatgtacgttggcctacagcaggatgctgttgtgggcgaagctaacgcgataaacgtaccgcctgggaagtacggccgcaaggttgaaactcaaaggaattgacgggggcccgcacaagcggtggagcatgtggtttaattcgaagcaacgcgaagaaccttaccaggtcttgacatccatagaagctcccggagacgggagcgtgcccttcggggagctatgagacaggtgctgcatggctgtcgtcagctcgtgtcgtgagatgttgggttaagtcccgcaacgagcgcaacccctaccttcagttgccagcattcagttgggcactctgacgggactgcctatgaaagtaggaggaaggcggggatgacgtctagtcagcatggtccttacgacctgggctacacacgtgctacaatggatggtacaacgcgcagccaactcgcgagagtgagcgaatcgccaaaagccatccccagttcagatcggagtctgcaactcgactccgtgaagttggaatcgctagtaatcrcgggtcagcataccgsgrtgaatacgttcccgggcct

SEQ ID NO: 748 - DNA, 1526 bp, Delftia acidovorans
agagtttgatcctggctcagattgaacgctggcggcatgccttacacatgcaagtcgaacggtaacaggtcttcggacgctgacgagtggcgaacgggtgagtaatacatcggaacgtgcccagtcgtgggggataactactcgaaagagtagctaataccgcatacgatctgaggatgaaagcgggggaccttcgggcctcgcgcgattggagcggccgatggcagattaggtagttggtgggataaaagcttaccaagccgacgatctgtagctggtctgagaggacgaccagccacactgggactgagacacggcccagactcctacgggaggcagcagtggggaattttggacaatgggcgaaagcctgatccagcaatgccgcgtgcaggatgaaggccttcgggttgtaaactgcttttgtacggaacgaaaaagcttctcctaatacgagaggcccatgacggtaccgtaagaataagcaccggctaactacgtgccagcagccgcggtaatacgtagggtgcgagcgttaatcggaattactgggcgtaaagcgtgcgcaggcggttatgtaagacagatgtgaaatccccgggctcaacctgggaactgcatttgtgactgcatggctagagtacggtagagggggatggaattccgcgtgtagcagtgaaatgcgtagatatgcggaggaacaccgatggcgaaggcaatcccctggacctgtactgacgctcatgcacgaaagcgtggggagcaaacaggattagataccctggtagtccacgccctaaacgatgtcaactggttgttgggaattagttttctcagtaacgaagctaacgcgtgaagttgaccgcctggggagtacggccgcaaggttgaaactcaaaggaattgacggggacccgcacaagcggtggatgatgtggtttaattcgatgcaacgcgaaaaaccttacccacctttgacatggcaggaagtttccagagatggattcgtgctcgaaagagaacctgcacacaggtgctgcatggctgtcgtcagctcgtgtcgtgagatgttgggttaagtcccgcaacgagcgcaacccttgtcattagttgctacattcagttgggcactctaatgagactgccggtgacaaaccggaggaaggtggggatgacgtcaagtcctcatggcccttataggtggggctacacacgtcatacaatggctggtacagagggttgccaacccgcgagggggagctaatcccataaaaccagtcgtagtccggatcgcagtctgcaactcgactgcgtgaagtcggaatcgctagtaatcgcggatcagcatgccgcggtgaatacgttcccgggtcttgtacacaccgcccgtcacaccatgggagcgggtctcgccagaagtaggtagcctaaccgcaaggagggcgcttaccacggcggggttcgtgactggggtgaagtcgtaacaaggtagccgtatcggaaggtgcggctggatcacctccttt

SEQ ID NO: 749 - DNA, 1394 bp, Dermabacter hominis
catgcaagtcgaacgatgaagctgtgcttgcacagtggattagtggcgaacgggtgagtaacacgtgagtaacctgcccttcactttgggataactccgagaaatcggggctaataccggatatgactactggccgcatggttggtggtggaaagtttttcggtgagggatgggctcgcggcctatcagtttgttggtgaggtagtggctcaccaaggcgatgacgggtagccggcctgagagggcgaccggccacactgggactgagacacggcccagactcctacgggaggcagcagtggggaatattgcacaatgggcgaaagcctgatgcagcgacgccgcgtgggggatgacggccttcgggttgtaaacctctttcagcaaggaagaagcgaaagtgacggtacttgcagaagaagcgccggctaactacgtgccagcagccgcggtaatacgtagggcgcaagcgttgtccggaattattgggcgtaaagagcttgtaggtggcttgtcgcgtctgccgtgaaaacccgaggcttaaccttgggcgtgcggtgggtacgggcaggctagagtgcggtaggggagactggaattcctggtgtagcggtgaaatgcgcagatatcaggaggaacaccgatggcgaaggcaggtctctgggccgttactgacactgagaagcgaaagcatggggagcgaacaggattagataccctggtagtccatgccgtaaacgttgggcactaggtgtggggagcattccacgttttccgcgccgtagctaacgcattaagtgccccgcctggggagtacggccgcaaggctaaaactcaaaggaattgacgggggcccgcacaagcggcggagcatgcggattaattcgatgcaacgcgaagaaccttaccaaggcttgacatgcactggatcgctgcagagatgtggttttctttggactggtgcacaggtggtgcatggttgtcgtcagctcgtgtcgtgagatgttgggttaagtcccgcaacgagcgcaaccctcgttccatgttgccagcacttcgggtggggactcatgggagactgccggggtcaactcggaggaaggtggggacgacgtcaaatcatcatgccccttatgtcttgggcttcacgcgtgctacaatggtcggtacaatgggttgcgatactgtgaggtggagctaatcccaaaaagccggtctcagttcggattggggtctgcaactcgaccctatgaagtcggagtcgctagtaatcgcagatcagcaatgctgcggtgaatacgttcccgggccttgtacacaccgcccgtcaagtcacgaaagtcggtaacacccgaagccgatggcccaagcttttgcggggagtcgtcgaaggt

SEQ ID NO: 750 - DNA, 1520 bp, Dermacoccus sp.
  Ellin185
  modified_base (434)..(435): a, c, t, g, unknown or other
tttctacggagagtttgatcctggctcaggacgaacgctggcggcgtgcttaacacatgcaagtcgaacgatgaagcaccagcttgctggtgtggattagtggcgaacgggtgagtaacacgtgagtaacctgcccctcactctgggataagcctgggaaactgggtctaatactggatacgaccgatctccgcatggagtgttggtggaaagtttttgtggtgggggatggactcgcggcctatcagcttgttggtggggtaatggcctaccaaggcgacgacgggtagccggcctgagagggcgaccggccacactgggactgagacacggcccagactcctacgggaggcagcagtggggaatattgcacaatgggcgaaagcctgatgcagcgacgccgcgtgagggatgacggccttcgggttgtaaannttcaccagggacgaagctaacgtgacggtacctggagaagaagcaccggctaactacgtgccagcagccgcggtaatacgtagggtgcggcgttgtccggaattattgggcgtaaagagcttgtaggcggtctgtcgcgtctgctgtgaaagaccggggcttaactccggttctgcagtgggtacgggcagactagagtgtggtaggggagactggaattcctggtgtagcggtgaaatgcgcagatatcaggaggaacaccgatggcgaaggcaggtctctgggccattactgacgctgagaagcgaaagcatggggagcgaacaggattagataccctggtagtccatgccgtaaacgttgggcgctaggtgtgggactcattccacgagttccgtgccgcagctaacgcattaagcgccccgcctggggagtacggccgcaaggctaaaactcaaaggaattgacgggggcccgcacaagcggcggagcatgcggattaattcgatgcaacgcgaagaaccttaccaaggcttgacatacaccggaatcatgcagagatgtgtgcgtcttcggactggtgtacaggtggtgcatggttgtcgtcagctcgtgtcgtgagatgttgggttaagtcccgcaacgagcgcaaccctcgttccatgttgccagcacttcgggtggggactcatgggagactgccggggtcaactcggaggaaggtggggatgacgtcaaatcatcatgccccttatgtcttgggcttcacgcatgctacaatggccggtacagagggttgcgaaaccgtgaggtggagctaatcccaaaaaaccggtctcagttcggattggggtctgcaactcgaccccatgaagtcggagtcgctagtaatcgcagatcagcaacgctgcggtgaatacgttcccgggccttgtacacaccgcccgtcaagtcacgaaagtcggtaacacccgaagccggtggcctaacccttgtggggggagccgtcgaaggtgggactggcgattgggactaagtcgtaacaaggtagccgtaccggaaggtgcggctggatcacctccttt

SEQ ID NO: 751 - DNA, 1522 bp, Desmospora activa
gctggcggcgtgcctaatacatgcaagtcgagcggaccgatggagagcttgctctcttgaagtcagcggcgaacgggtgagtaacacgtgggcaacctgcccgcaagactgggataactccgggaaaccggggctaataccggatacgatcttccctcgcatgagagaagatggaaaggcggcatcacgctgtcacttgcggatgggcccgcggcgcattagctagttggtgaggtagtggctcaccaaggcgacgatgcgtagccgacctgagagggtgaccggccacactgggactgagacacggcccagactcctacgggaggcagcagtagggaattttcgtcaatgggcgcaagcctgaacgagcaacgccgcgtgagtgaggacggctttcgggttgtaaagctctgttcttcgggaagaacgacagaagggtgaataatccttttgtgtgacggtaccggagaagaaagccccggctaactacgtgccagcagccgcggtaatacgtagggggcaagcgttgtccggaattattgggcgtaaagcgcgcgcaggcggcctgttaagtcggatgtgaaagaccacggctcaaccgtgggggtgcatccgaaactggcgggcttgagtgcaggagaggggagtggaattcccggtgtagcggtggaatgcgtagagatcgggaggaacaccagtggcgaaggcggctctctggcctgtaactgacgctgaggcgcgaaagcgtggggagcaaacaggattagataccctggtagtccacgccgtaaacgatgagtgctaggtgttgggggtttcacgccctctgtgccgaaggtaacccaataagcactccgcctggggagtacggccgcaaggctgaaactcaaaggaattgacgggggcccgcacaagcggtggagcatgtggtttaattcgaagcaacgcgaagaaccttaccagggcttgacatcccgctgaccccttcagagatgaaggttcccttcggggcagcggagacaggtggtgcatggttgtcgtcagctcgtgtcgtgagatgttgggttcagtcccgcaacgagcgcaacccttatcgttagttgccagcacctcgggtgggcactctagcgagacagccggtgaaagccggaggaaggtggggatgaggtcaaatcatcatgccccttatgtcctgggcaacacacgtgctacaatggctggtacaacgggtcgcgaagccgcgaggtggagccaatcccaaaaaaccagtctcagttcggatcgcaggctgcaactcgcctgcgtgaagctggaatcgctagtaatcgcggatcagcatgccgcggtgaatacgttcccgggccttgtacacaccgcccgtcacaccacgagagtttgcaacacccgaagtcggtgagggaacccttttgggacccagccgccgaaggtggggcagatgattggggtgaagtcgtaacaaggtatccctaccggaaggtggggctggatcacctcctttcta

SEQ ID NO: 752 - DNA, 1455 bp, Desmospora sp.
  8437
agcggcggacgggtgagtaacacgtgggcaacctgcccgcaagaccgggataactccgggaaaccggggctaataccggatgatgcctcttcctgcatgggaggatgctgaaaggcggcctttggctgtcacttgcggatgggcccgcggcgcattagctggttggtgaggtaacggctcaccaaggcgacgatgcgtagccgacctgagagggtgatcggccacactgggactgagacacggcccagactcctacgggaggcagcagtagggaattttccgcaatgggcgcaagcctgacggagcaacgccgcgtgagtgaggacggctttcgggttgtaaaactctgttcttcgggaagaacggtcgaagggtgaacaatcctttggcgtgacggtaccggaggagaaagccccggctaactacgtgccagcagccgcggtaatacgtagggggcaagcgttgtccggaattattgggcgtaaagcgcgcgcaggcggcctgttaagtctggtgtgaaagaccacggctcaaccgtggggtggcatcagaaactggcgggcttgagtgcaggagaggagagtggaattcccggtgtagcggtggaatgcgtagagatcgggaggaacaccagtggcgaaggcgactctctggcctgtaactgacgctgaggcgcgaaagcgtggggagcgaacaggattagataccctggtagtccacgccgtaaacgatgagtgctaggtgttgggggtttccgccctctgtgccgaaggtaacccaataagcactccgcctggggagtacggccgcaaggctgaaactcaaaggaattgacgggggcccgcacaagcggtggagcatgtggtttaattcgaagcaacgcgaagaaccttaccagggcttgacatcccgctgaccggtgtagagatacaccttcccttcggggcagcggtgacaggtggtgcatggttgtcgtcagctcgtgtcgtgagatgttgggttcagtcccgcaacgagcgcaacccttgtcgtcagttgccagcacatgatggtgggcactctggcgagacagccggtgaaagccggaggaaggtggggatgacgtcaaatcatcatgccccttatgtcctgggctacacacgtgctacaatggccggtacaacgggcagcgaacccgtgagggggagccaatcccaaaaaaccggtctcagttcggatcgcaggctgcaactcgcctgcgtgaagctggaatcgctagtaatcgcggatcagcatgccgcggtgaatccgttcccgggccttgtacacaccgcccgtcacaccacgagagtctgcaacacccgaagtcggtgaggtaaccttcgggaaccagccgccgaaggtggggcagatgattggggtgaagtcgtaacaaggtatccctaccggaaggtggggatggatcacctcctttct

SEQ ID NO: 753 - DNA, 1456 bp, Desulfitobacterium frappieri
  modified_base (968)..(968): a, c, t, g, unknown or other
cactgagtgctaaacgttagttagtggcggacgggtgagtaacgcgtggataacctacctagtagaccgggacaacccttggaaacgagggctaataccggatgagcttaattagtggcatcactgattaaggaaagatggcctctgaagatgctatcgttagtagatggatccgcgtctgattagctagttggtggggtaaaggcctaccaaggcgacgatcagtagccggcctgagagggtgaacggccacactgggactgagacacggcccagactcctacgggaggcagcagtggggaatcttccgcaatggacgaaagtctgacggagcaacgccgcgtgtacgacgaaggccttcgggttgtaaagtactgtcttcagggacgaacggtaagtatgtaaataatgtacttacatgacggtacctgaggaggaagccccggctaactacgtgccagcagccgcggtaatacgtagggggcaagcgttgtccggaatcattgggcgtaaagggcgcgtaggcggatacttaagtctggtgtgaaaacctagggctcaaccctgggactgcatcggaaactgggtatcttgaggacaggagaggaaagtggaattccacgtgtagcggtgaaatgcgtagatatgtggaggaacaccagtggcgaaggcgactttctggactgtaactgacgctgaggcgcgaaagcgtggggagcaaacaggattagataccctggtagtccacgccgtaaacgatgagtgctaggtgtagagggtatcgaccccttctgtgccgcagttaacacactaagcactccgcctggggagtacggccgcaaggttgaaactcaaaggaattgacgggggcccgcacaagcggtggagcatgtggtttaattcgacgcaacgcgaagaaccttaccaaggcttgacatccatagaatcctgtggaaacatgggagtgnccttcggggagctatgagacaggtggtgcatggttgtcgtcagctcgtgtcgtgagatgttgggttaagtcccgcaacgagcgcaacccctatgtttagttgctaacgcgtaatggtgagcactctagacagactgccggtgacaaaccggaggaaggtggggatgacgtcaaatcatcatgccccttatgtcttgggctacacacgtgctacaatggccagtacagacggaagcgaagccgtgaggtgaagccaatccgagaaagctggtctcagttcggattgttctctgcaactcgagaacatgaagtcggaatcgctagtaatcgcaggtcagcatactgcggtgaatacgttcccgggccttgtacacaccgcccgtcacaccacgaaagtctgcaacacccgaagccggtgaggtaacccgaaagggagctagccgtcgaaggtggggccgatgattggggtgaagtcgtaacaaggtatcc

SEQ ID NO: 754 - DNA, 1554 bp, Desulfitobacterium hafniense
agagtttgatcctggctcaggacgaacgctggcggcgtgcctaacacatgcaagtcgaacggagagctcaataagcttgcttagagagttcttagtggcggacgggtgagtaacgcgtggataacctacctagtagaccgggacaacccttggaaacgagggctaataccggataagcttaattagtggcatcactgattaaggaaagatggcctctgaagatgctatcgttagtagatggatccgcgtctgattagctagttggtggggtaaaggcctaccaaggcgacgatcagtagccggcctgagagggtgaacggccacactgggactgagacacggcccagactcctacgggaggcagcagtggggaatcttccgcaatggacgaaagtctgacggagcaacgccgcgtgtacgacgaaggccttcgggttgtaaagtactgtcttcagggacgaacggtaagtatgtaaagaatgtacttacatgacggtacctgaggaggaagccccggctaactacgtgccagcagccgcggtaatacgtagggggcaagcgttgtccggaatcattgggcgtaaagggcgcgtaggcggatacttaagtctggtgtgaaaacctagggctcaaccctgggactgcatcggaaactgggtatcttgaggacaggagaggaaagtggaattccacgtgtagcggtgaaatgcgtagatatgtggaggaacaccagtggcgaaggcgactttctggactgtaactgacgctgaggcgcgaaagcgtggggagcaaacaggattagataccctggtagtccacgccgtaaacgatgagtgctaggtgtagagggtatcgaccccttctgtgccgcagttaacacactaagcactccgcctggggagtacggccgcaaggttgaaactcaaaggaattgacgggggcccgcacaagcggtggagcatgtggtttaattcgacgcaacgcgaagaaccttaccaaggcttgacatccatagaatcctgtggaaacatgggagtgcccttcggggagctatgagacaggtggtgcatggttgtcgtcagctcgtgtcgtgagatgttgggttaagtcccgcaacgagcgcaacccctatgtttagttgctaacgcgtaatggtgagcactctagacagactgccggtgacaaaccggaggaaggtggggatgacgtcaaatcatcatgccccttatgtcttgggctacacacgtgctacaatggccagtacagacggaagcgaagccgtgaggtgaagccaatccgagaaagctggtctcagttcggattgttctctgcaactcgagaacatgaagtcggaatcgctagtaatcgcaggtcagcatactgcggtgaatacgttcccgggccttgtacacaccgcccgtcacaccacgaaagtctgcaacacccgaagccggtgaggtaacccgaaagggagctagccgtcgaaggtggggccgatgattggggtgaagtcgtaacaaggtagccgtatcggaaggtgcggctggatcacct

SEQ ID NO: 755 - DNA, 1557 bp, Desulfobulbus sp.
  oral clone CH031
gagagtttgatyctggctcagaacgaacgctggcggcgtgcttaacacatgcaagtcgaacgcgaacgggacttcggttcctagtagagtggcgcacgggtgagtaacgcgtagataacctgtcttcatatccggaataacacgccgaaaggggtactaataccggatgttcttgcatttcacaggtaaggcaaggaaaggtggcctctgattcaagctactgtatgaagaggggtctgcgtaccattagctagtaggtggggtaatggcctacctaggcgacgatggttagcgggtctgagaggatgatccgccacactggcactggaatacgggccagactcctacgggaggcagcagtgaggaatattgcgcaatgggggcaaccctgacgcagcgacgccgcgtgagtgaggaaggtcttcggatcgtaaagctctgtcaagagggaagaagtgcaaggcagcgaataactgttttgtttgacggtacctctaaaggaagcaccggctaactccgtgccagcagccgcggtaatacggagggtgcgagcgttgttcggaatcactgggcgtagagggcgcgcaggcgggctgtcaagtcagatgtgaaatcccacggcttaactgtggacgtgcatttgaaactggcagtcttgagtaccagaggggaatgtggaattcccggtgtagaggtgaaattcgtagatatcgggaggaataccggtggcgaaggcgacattctggctggatactgacgctgaggcgcgaaagcgtggggagcaaacaggattagataccctggtagtccacgccgtaaacgatgtgaactagatgcagggggtgttgatcccctctgtgtcgcggctaacgcattaagttcaccgcctggggagtacggtcgcaagattaaaactcaaaggaattgacgggggcccgcacaagcggtggggtatgtggtttaattcgatgcaacgcgaagaaccttacctggtcttgacatcccggagacgcccatgaaagtgggtggtgccttctttgaaggaatccggagacaggtgctgcatggctgtcgtcagctcgtgtcgtgagatgttgggttaagtcccgcaacgagcgcaacccttgccttcagttgccagcggttcggccgggcactctgaagggactgccggtgtcaaaccggaggaaggtggggatgacgtcaagtcctcatggcccttatgaccagggctacacacgtactacaatggccggtacaaaggggagcgacattgcgaaatggagccaatcccgcaaagccggtctcagtccggattggagtctgcaactcgactccatgaagttggaatcgctagtaatcgtggatcagcatgccacggtgaatacgttcccgggccttgtacacaccgcccgtcacaccacgggagtcggttgtaccagaagcagttgagctaaccgcaagggggcaggctgccaaggtacggctggtaactggggtgaagtcgtaacagggtagccctaggggaacctggggctggatcacctccttaagggc

SEQ ID NO: 756 - DNA, 1431 bp, Desulfotomaculum nigrificans
  modified_base (1)..(1): a, c, t, g, unknown or other
  modified_base (43)..(46): a, c, t, g, unknown or other
  modified_base (66)..(66): a, c, t, g, unknown or other
  modified_base (186)..(186): a, c, t, g, unknown or other
  modified_base (415)..(415): a, c, t, g, unknown or other
  modified_base (419)..(419): a, c, t, g, unknown or other
  modified_base (615)..(615): a, c, t, g, unknown or other
  modified_base (619)..(619): a, c, t, g, unknown or other
  modified_base (891)..(891): a, c, t, g, unknown or other
  modified_base (897)..(897): a, c, t, g, unknown or other
  modified_base (906)..(906): a, c, t, g, unknown or other
  modified_base (1420)..(1420): a, c, t, g, unknown or other
natagtttgatcctggctcaggacgaacgctggcggcgtgccnnnnacatgcaagtcgaacggggntgaatgaagcttggcgatttctaaacctagtggcggacgggtgagtaacgcgtggataacctgcctggtagaccgggataacagctggaaacggctgctaataccggatacgctcttggngccgcatggtgccgagaggaaaggggagccgctatcagatggatccgcgtcccattagctggttggtggtgtagcggaccaccaaggcgacgatgggtagccggcctgagagggcgaccggccacactgggactgagacacggcccagactcctacgggaggcagcagtggggaatcttccgcaatgggcgaaagctgacggagcaacgccgcgtgagggaagaaggcntcgngttgtaaacctctgtcctaaaggaagaaagaaatgacggtactttaggaagaatgacggtactttaggaggaagccccggctaactacgtgccagcagccgcggtaaaacgtagggggcgagcgttgtccggaattactgggcgtaaagggcgcgtaggtggtccattaagttagaggtgaaagtgcggggcttancccngtgattgcctctgatactggtggacttgagtgcaggagaggggagcggaattcccagtgtagcggtgaaatgcgtagatattgggaggaacaccagtggcgaaggcggctctctggactgcaactgacactgaggcgcgaaagcgtggggagcaaacaggattagataccctggtagtccacgccgtaaacgatgagtgctaggtgttgcgggtatcgacccctgcagtgccgcagtaaacacaataagcactccgcctggggagtacggtngcaagnctgaaactnaaaggaattgacggggccccgcacaagcggtggagtatgtggtttaattcgacgcaacgcgaagaaccttaccagggcttgacatcccgcgcaccactctagagatagagggttctgccttagggtagacgcgcagacaggtggtgcatggttgtcgtcagctcgtgtcgtgagatgttgggttaagtcccgcaacgcgcgcaacccctaacattagttgccagcgatagagacggggactctaatgtgactgccgttgacaaaacggaggaaggtggggatgacgtcaaatcatcatgccccttatgtcctgggctacacacgtactacaatggccggtactaacggatgcgaatggcgtgagccggagcaaaactgagaaagccggtctcagttcggattgtagtctgcaactcgactacatgaagtcggaatcgctagtaatcgcaggtcagcatactgcggtgaatacgttcccgggccttgtacacaccgcccgtcacaccacgaaagntgacaacaccc

SEQ ID NO: 757 - DNA, 1548 bp, Desulfovibrio desulfuricans
attagagtttgatcctggctcagattgaacgctggcggcgtgcttaacacatgcaagtcgaacgcgaaagggacttcggtcctgagtaaagtggcgcacgggtgagtaacgcgtggataatctgcccttatgatcgggataacagttggaaacggctgctaataccggatacgctcaaaatgaactttttgaggaaagatggcctctgcttgtatgctatcacgtaaggatgagtccgcgtcccattagcttgttggcggggtaacggcccaccaaggcatcgatgggtagccgatttgagaggatgatcggccacactggaactgaaacacggtccagactcctacgggaggcagcagtggggaatattgcgcaatgggcgaaagcctgacgcagcgacgccgcgtgagggatgaaggttttcggatcgtaaacctctgtcagaagggaagaaactacgttgtgctaatcagcagcgtactgacggtaccttcaaaggaagcaccggctaactccgtgccagcagccgcggtaatacggagggtgcaagcgttaatcggaattactgggcgtaaagcgcacgtaggctgtagtgtaagtcaggggtgaaatcccacggctcaaccgtggaactgcctttgatactgcacaacttgaatccgggagagggtggcggaattccaggtgtaggagtgaaatccgtagatatctggaggaacatcagtggcgaaggcggccacctggaccggtattgacgctgaggtgcgaaagcgtggggagcaaacaggattagataccctggtagtccacgctgtaaacgatggatgctagatgtcggggagtattcttcggtgtcgtagttaacgcgttaagcatcccgcctggggagtacggtcgcaaggctgaaactcaaagaaattgacgggggcccgcacaagcggtggagtatgtggtttaattcgatgcaacgcgaagaaccttacctaggtttgacatccacggaaccctcccgaaaaggaggggtgcccttcggggagccgtgagacaggtgctgcatggctgtcgtcagctcgtgtcgtgagatgttgggttaagtcccgcaacgagcgcaacccctatggatagttgccagcaagtaatgttgggcactctattcagactgcccgggttaaccgggaggaaggtggggacgacgtcaagtcatcatggcccttacgcctagggctacacacgtactacaatggcgcgcacaaaggggagcgagaccgcgaggtggagccaatcccaaaaaacgcgtcccagtccggattgcagtctgcaactcgactgcatgaagttggaatcgctagtaattcgagatcagcatgctcgggtgaatgcgttcccgggccttgtacacaccgcccgtcacaccacgaaagtcggttttacccgaagccggtgagccaaccagcaatggaggcagccgtctacggtagggccgatgattggggtgaagtcgtaacaaggtagccgtaggggaacctgcggctggatcacctccttaat

SEQ ID NO: 758 - DNA, 1394 bp, Desulfovibrio fairfieldensis
tcgaacgcgaaagagacttcggtctcgagtagagtggcgcacgggtgagtaacgcgtggataatctgccctcatgaccgggataacagttggaaacggctgctaataccggatacgctctgaatgaacttttaggggaaagacggcctctgcttgcaagctgtcgtatgaggatgagtccgcgtcccattagctagttggcggggtaacggcccaccaaggcaacgatgggtagccgatctgagaggatgatcggccacactggaactgaaacacggtccagactcctacgggaggcagcagtggggaatattgcgcaatgggcgaaagcctgacgcagcgacgccgcgtgagggatgaaggttttcggatcgtaaacctctgtcagaagggaagaaagtgcgtggtgctaatcagccgcgcattgacggtaccttcaaaggaagcaccggctaactccgtgccagcagccgcggtaatacggagggtgcaagcgttaatcggaattactgggcgtaaagcgcacgtaggctgttgtgtaagtcaggggtgaaatcccacggctcaaccgtggaactgcccttgatactgcatgacttgaatccgggagagggtggcggaattccaggtgtaggagtgaaatccgtagatatctggaggaacatcagtggcgaaggcggccacctggaccggtattgacgctgaggtgcgaaagcgtggggagcaaacaggattagataccctggtagtccacgctgtaaacgatggatgctagatgtcggggagtattcttcggtgtcgtagttaacgcgttaagcatcccgcctggggagtacggtcgcaaggctgaaactcaaagaaattgacgggggcccgcacaagcggtggagtatgtggtttaattcgatgcaacgcgaagaaccttacctaggtttgacatctggggaaccctcccgaaaaggaggggtgcccttcggggagccccaagacaggtgctgcatggctgtcgtcagctcgtgtcgtgagatgttgggttaagtcccgcaacgagcgcaacccctatgcatagttgccagcaagtgaagttgggcactctatgcagactgcccgggttaaccgggaggaaggtggggacgacgtcaagtcatcatggcccttacacctagggctacacacgtactacaatggcgcgcacaaaggggagcgagaccgcgaggtggagccaatcccaaaaaacgcgtcccagtccggattgcagtctgcaactcgactgcatgaagtcggaatcgctagtaattcgagatcagcatgctcgggtgaatgcgttcccgggccttgtacacaccgcccgtcacaccacgaaagtcggttttacccgaagccggtgagccaacc

SEQ ID NO: 759 - DNA, 1053 bp, Desulfovibrio piger
  modified_base (44)..(44): a, c, t, g, unknown or other
  modified_base (49)..(50): a, c, t, g, unknown or other
  modified_base (699)..(699): a, c, t, g, unknown or other
  modified_base (713)..(713): a, c, t, g, unknown or other
  modified_base (861)..(861): a, c, t, g, unknown or other
  modified_base (893)..(894): a, c, t, g, unknown or other
  modified_base (941)..(942): a, c, t, g, unknown or other
  modified_base (959)..(960): a, c, t, g, unknown or other
  modified_base (965)..(965): a, c, t, g, unknown or other
  modified_base (974)..(974): a, c, t, g, unknown or other
  modified_base (979)..(980): a, c, t, g, unknown or other
  modified_base (1009)..(1010): a, c, t, g, unknown or other
  modified_base (1018)..(1019): a, c, t, g, unknown or other
  modified_base (1023)..(1023): a, c, t, g, unknown or other
  modified_base (1030)..(1030): a, c, t, g, unknown or other
  modified_base (1042)..(1042): a, c, t, g, unknown or other
cgcgaagggacttcggtcccgagtaaagtggcgcacgggtgagnaacanntggataatctgcctctatgatggggataacagttggaaacgactgctaataccgaatacgctcatgatgaactttgtgaggaaaggtggcctctgcttgcaagctatcgcatagagatgagtccgcgtcccattagctagttggtggggtaacggcctaccaaggcaacgatgggtagccgatctgagaggatgatcggccacactggaactgaaacacggtccagactcctacgggaggcagcagtggggaatattgcgcaatgggcgaaagcctgacgcagcgacgccgcgtgagggatgaaggtcttcggatcgtaaacctctgtcagaagggaagaaactagggtgctctaatcatcatcctactgacggtaccttcaaaggaagcaccggctaactccgtgccagcagccgcggtaatacggagggtgcaagcgttaatcggaatcactgggcgtaaagcgcacgtaggctgttatgtaagtcaggggtgaaatcccacggctcaaccgtggaactgcccttgatactgcacgacttgaatccgggagagggtggcggaattccaggtgtaggagtgaaatccgtagatatctggaggaacatcagtggcgaaggcggccacctggaccggtattgacgctgangtgcgaaagcgtgnggagcaaacaggattagataccctggtagtccacgccgtaaacgatggatgctggatgtcgggatgtatgtctcggtgtcgtagttaacgcgttaagcatcccgcctggggagtacggtcgcaaggctgaaactcaaagaaattgacnggggcccgcacaagcggtggagtatgtggttnnattcgatgcaacgcgaagaaccttacctaggtttgacatctgggganncctcccgaaaaggaggnntgccnttcgggganccccnnacaggtgctgcatggctgtcgtcagctcnngtcgtganntgtnggttaantcccgcaacgancgcacccctat

SEQ ID NO: 760 - DNA, 1027 bp, Desulfovibrio sp.
  3_1_syn3
  modified_base (8)..(8): a, c, t, g, unknown or other
  modified_base (12)..(15): a, c, t, g, unknown or other
  modified_base (21)..(21): a, c, t, g, unknown or other
ggatcgtnaacnnnntcagangggaagaaagtgcgtggtgctaatcagccgcgcattgacggtaccttcaaaggaagcaccgggctaactccgtgccagcagccgcggtaatacggagggtgcaagcgttaatcggaattactgggcgtaaagcgcacgtaggctgttgtgtaagtcaggggtgaaatcccacggctcaaccgtggaactgcccttgatactgcatgacttgaatccgggagagggtggcggaattccaggtgtaggagtgaaatccgtagatatctggaggaacatcagtggcgaaggcggccacctggaccggtattgacgctgaggtgcgaaagcgtggggagcaaacaggattagataccctggtagtccacgctgtaaacgatggatgctagatgtcggggagtattcttcggtgtcgtagttaacgcgttaagcatcccgcctggggagtacggtcgcaaggctgaaactcaaagaaattgacgggggcccgcacaagcggtggagtatgtggtttaattcgatgcaacgcgaagaaccttacctaggtttgacatctggggaaccctcccgaaaaggaggggtgcccttcggggagccccaagacaggtgctgcatggctgtcgtcagctcgtgtcgtgagatgttgggttaagtcccgcaacgagcgcaacccctatgcatagttgccagcaagtgaagttgggcactctatgcagactgcccgggttaaccgggaggaaggtggggacgacgtcaagtcatcatggcccttacacctagggctacacacgtactacaatggcgcgcacaaaggggagcgagaccgcgaggtggagccaatcccaaaaaacgcgtcccagtccggattgcagtctgcaactcgactgcatgaagtcggaatcgctagtaattcgagatcagcatgctcgggtgaatgcgttcccgggccttgtacacaccgcccgtcacaccacgaaagtcggttttacccgaagccggtgagccaacc

SEQ ID NO: 761 - DNA, 1542 bp, Desulfovibrio vulgaris
agagtttgattctggctcagattgaacgctggcggcgtgcttaacacatgcaagtcgcgcgtgaaaggacttcggtccgagtaaagcggcgcacgggtgagtaacgcgtggatgatctacccatgagttaggaataacggctggaaacggtcgctaataccaaatacgctccgatttcaacttcgggggaaaggtggcctctgcttgcaagctactgctcatggatgagtccgcgtcccattagctagttggtggggtaacggcccaccaaggcgacgatgggtagccggtctgagaggatgaccggccacactgggactggaacacggcccagactcctacgggaggcagcagtggggaatattgcgcaatgggcgaaagcctgacgcagcgacgccgcgtgagggatgaaggtcctcggatcgtaaacctctgtcaggagggaagaaccgccacggtgctaatcagccgtggtctgacggtacctccaaaggaagcaccggctaactccgtgccagcagccgcggtaatacggagggtgcgagcgttaatcggaatcactgggcgtaaagcgcacgtaggctgcttggtaagtcaggggtgaaagcccgcggctcaaccgcggaattgcctttgatactgccgagctagagtccgggagagggtagtggaattccaggtgtaggagtgaaatccgtagagatctggaggaacatcagtggcgaaggcgactacctggaccggtactgacgctgaggtgcgaaagcgtggggagcaaacaggattagataccctggtagtccacgccgtaaacgatggatgctaggtgtcggggccttgagcttcggtgccgtagttaacgcgttaagcatcccgcctggggagtacggtcgcaaggctgaaactcaaagaaattgacgggggcccgcacaagcggtggagtatgtggtttaattcgatgcaacgcgaagaaccttacctaggtttgacatccggaagaccttcccgaaaaggaagggtgcccttcggggaattccgagacaggtgctgcatggctgtcgtcagctcgtgccgtgaggtgttgggttaagtcccgcaacgagcgcaacccctattgccagttgctaccaggtaatgctgggcactctggtgagactgccccggttaacggggaggaaggtggggacgacgtcaagtcatcatggcccttacgcctagggctacacacgtactacaatggcgcatacaaagggcagcgataccgcgaggtggagccaatcccaaaaagtgcgtcccagtccggattgcagtctgcaactcgactgcatgaagttggaatcgctagtaattcgagatcagcatgctcgggtgaatgcgttcccgggccttgtacacaccgcccgtcacaccacgaaagttggttttacccgacaccggtgagctaaccagcaatggaggcagccgtctacggtagggccgatgattggggtgaagtcgtaacaaggtagccgtaggggaacctgcggctggatcacctccttt

SEQ ID NO: 762 - DNA, 965 bp, Dialister invisus
  modified_base (9)..(10): a, c, t, g, unknown or other
  modified_base (12)..(12): a, c, t, g, unknown or other
  modified_base (16)..(17): a, c, t, g, unknown or other
  modified_base (20)..(22): a, c, t, g, unknown or other
  modified_base (43)..(49): a, c, t, g, unknown or other
  modified_base (700)..(700): a, c, t, g, unknown or other
  modified_base (716)..(716): a, c, t, g, unknown or other
  modified_base (785)..(785): a, c, t, g, unknown or other
  modified_base (940)..(940): a, c, t, g, unknown or other
  modified_base (944)..(944): a, c, t, g, unknown or other
  modified_base (954)..(954): a, c, t, g, unknown or other
gaaaagacnnanagannttnnncttttcagaattgagtggcannnnnnngagtaacacgtaaacaacctgccttcaggatggggacaacagacggaaacgactgctaataccgaataagttccaagagccgcatggcccatggaagaaaaggtggcctctacctgtaagctatcgcctgaagaggggtttgcgtctgattagctggttggaggggtaacggcccaccaaggcgacgatcagtagccggtctgagaggatgaacggccacactggaactgagacacggtccagactcctacgggaggcagcagtggggaatcttccgcaatgggcgaaagcctgacggagcaacgccgcgtgagtgatgacggccttcgggttgtaaaactctgtgatccgggacgaaaaggcagagtgcgaagaacaaactgcattgacggtaccggaaaagcaagccacggctaactacgtgccagcagccgcggtaatacgtaggtggcaagcgttgtccggaattattgggcgtaaagcgcgcgcaggcggcttcccaagtccctcttaaaagtgcggggcttaaccccgtgatgggaaggaaactgggaagctggagtatcggagaggaaagtggaattcctagtgtagcggtgaaatgcgtagagattaggaagaacaccggtggcgaaggcgactttctggacnaaaaactgacgctgangcgcgaaagcgtggggagcaaacaggattagataccctggtagtccacgccgtaaacgatggatactangtgtaggaggtatcgacccctcctgtgccggagttaacgcaataagtatcccgcctgggaaagtacgatcgcaagattaaaactcaaaggaattgacgggggcccgcacaagcggtggagtatgtggtttaattcgacgcaacgcgaagaacctnaccnggtcttgacnttgatcgcgat

SEQ ID NO: 763 - DNA, 1565 bp, Dialister micraerophilus
tggagagtttgatcctggctcaggacgaacgctggcggcgtgcttaacacatgcaagtcgaacgagaggacatgaaaagcttgctttttatgaaatctagtggcaaacgggtgagtaacacgtaaacaacctgccttcaagatggggacaacagacggaaacgactgctaataccgaatacgatccgaaagtcgcatgacatttggatgaaagggtggcctatcgaagaagctatcgcttgaagaggggtttgcgtccgattaggtagttggtgaggtaacggcccaccaagccgacgatcggtagccggtctgagaggatgaacggccacactggaactgagacacggtccagactcctacgggaggcagcagtggggaatcttccgcaatggacgaaagtctgacggagcaacgccgcgtgagtgaagacggccttcgggttgtaaagctctgtgattcgggacgaaaggccatatgtgaataatatatggaaatgacggtaccgaaaaagcaagccacggctaactacgtgccagcagccgcggtaatacgtaggtggcaagcgttgtccggaattattgggcgtaaagcgcgcgcaggcggtcacttaagtccatcttagaagtgcggggcttaaccccgtgatgggatggaaactgggagactggagtatcggagaggaaagtggaattcctagtgtagcggtgaaatgcgtagatattaggaagaacaccggtggcgaaggcgactttctggacgaaaactgacgctgaggcgcgaaagcgtggggagcaaacaggattagataccctggtagtccacgccgtaaacgatggatactaggtgtaggaggtatcgaccccttctgtgccggagttaacgcaataagtatcccgcctgggaagtacgatcgcaagattaaaactcaaaggaattgacgggggcccgcacaagcggtggagtatgtggtttaattcgacgcaacgcgaagaaccttaccaagtcttgacattgatcgccattccaagagattggaagttctccttcgggagacgagaaaacaggtggtgcacggctgtcgtcagctcgtgtcgtgagatgttgggttaagtcccgcaacgagcgcaacccctatcttttgttgccagcacgtagaggtgggaactcagaagagaccgccgcagacaatgcggaggaaggtggggatgacgtcaagtcatcatgccccttatgacttgggctacacacgtactacaatgggctttaacaaagagcagcgaaaccgcgaggtggagcgaaactcaaaaacaagcccccagttcagatcgcaggctgcaactcgcctgcgtgaagcaggaatcgctagtaatcgcgggtcagcataccgcggtgaatacgttcccgggccttgtacacaccgcccgtcacactatgagagtcggaaacacccgaagccggtgaggtaaccgcaaggagccagccgtcgaaggtggggctgatgattggagtgaagtcgtaacaaggtagccgtatcggaaggtgcggctggatcacctcctttct

SEQ ID NO: 764 - DNA, 1328 bp, Dialister microaerophilus
tggagagtttgatcctggctcaggacgaacgctggcggcgtgcttaacacatgcaagtcgaacgagaggacatgaaaagcttgctttttatgaaatctagtggcaaacgggtgagtaacacgtaaacaacctgccttcaagatggggacaacagacggaaacgactgctaataccgaatacgatccgaaagtcgcatgacatttggatgaaagggtggcctatcgaagaagctatcgcttgaagaggggtttgcgtccgattaggtagttggtgaggtaacggcccaccaagccgacgatcggtagccggtctgagaggatgaacggccacactggaactgagacacggtccagactcctacgggaggcagcagtggggaatcttccgcaatggacgaaagtctgacggagcaacgccgcgtgagtgaagacggccttcgggttgtaaagctctgtgattcgggacgaaaggccatatgtgaataatatatggaaatgacggtaccgaaaaagcaagccacggctaactacgtgccagcagccgcggtaatacgtaggtggcaagcgttgtccggaattattgggcgtaaagcgcgcgcaggcggtcacttaagtccatcttagaagtgcggggcttaaccccgtgatgggatggaaactgggagactggagtatcggagaggaaagtggaattcctagtgtagcggtgaaatgcgtagatattaggaagaacaccggtggcgaaggcgactttctggacgaaaactgacgctgaggcgcgaaagcgtggggagcaaacaggattagataccctggtagtccacgccgtaaacgatggatactaggtgtaggaggtatcgaccccttctgtgccggagttaacgcaataagtatcccgcctgggaagtacgatcgcaagattaaaactcaaaggaattgacgggggcccgcacaagcggtggagtatgtggtttaattcgacgcaacgcgaagaaccttaccaagtcttgacattgatcgccattccaagagattggaagttctccttcgggagacgagaaaacaggtggtgcacggctgtcgtcagctcgtgtcgtgagatgttgggttaagtcccgcaacgagcgcaacccctatcttttgttgccagcacgtagaggtgggaactcagaagagaccgccgcagacaatgcggaggaaggtggggatgacgtcaagtcatcatgccccttatgacttgggctacacacgtactacaatgggctttaacaaagagcagcgaaaccgcgaggtggagcgaaactcaaaaacaagcccccagttcagat

SEQ ID NO: 765 - DNA, 1547 bp, Dialister pneumosintes
gagtttgatcctggctcaggacgaacgctggcggcgtgcttaacacatgcaagtcgaacggaaagagatgaaagagcttgctcttttattaatttcagtggcaaacgggtgagtaacacgtaaacaacctgccttaaggatggggataacagacggaaacgactgctaataccgaatacgttctaagcatcgcatggtgcatagaagaaagggtggcctctacaagaaagctatcgccttaagaggggtttgcgactgattaggtagttggtgaggtaacggctcaccaagccgacgatcagtagccggtctgagaggatgaacggccacactggaactgagacacggtccagactcctacgggaggcagcagtggggaatcttccgcaatggacgaaagtctgacggagcaacgccgcgtgaacgaagaaggtcttcggattgtaaagttctgtgattcgggacgaaagggtttgtggtgaataatcatagacattgacggtaccgaaaaagcaagccacggctaactacgtgccagcagccgcggtaatacgtaggtggcaagcgttgtccggaattattgggcgtaaagcgcgcgcaggcggtttcttaagtccatcttaaaagcgtggggctcaaccccatgaggggatggaaactgggaagctggagtatcggagaggaaagtggaattcctagtgtagcggtgaaatgcgtagagattaggaagaacaccggtggcgaaggcgactttctagacgaaaactgacgctgaggcgcgaaagcgtggggagcaaacaggattagataccctggtagtccacgccgtaaacgatggatactaggtgtaggaggtatcgacccctcctgtgccggagttaacgcaataagtatcccgcctgggaagtacgatcgcaagattaaaactcaaaggaattgacgggggcccgcacaagcggtggagtatgtggtttaattcgacgcaacgcgaagaaccttaccaagccttgacattgatcgcaatccatagaaatatggagttcttcttcggaagacgagaaaacaggtggtgcacggctgtcgtcagctcgtgtcgtgagatgttgggttaagtcccgcaacgagcgcaacccctatttcctgttaccagcacgtaaaggtggggactcaggagagaccgccgcggacaacgcggaggaaggcggggatgacgtcaagtcatcatgccccttatggcttgggctacacacgtactacaatgggtgccaacaaagagaagcgaaatcgcgagatggagcggacctcataaacgcacccccagttcagattgcaggctgcaactcgcctgcatgaagtaggaatcgctagtaatcgcgggtcagcataccgcggtgaatacgttcccgggccttgtacacaccgcccgtcacactatgagagttagagacacccgaagccggtgaggtaaccgcaagggaccagccgtctaaggtggagctgatgattggagtgaagtcgtaacaaggtagccgtatcggaaggtgcgg

SEQ ID NO: 766 - DNA, 1396 bp, Dialister propionicifaciens
aaaagactgctcttttcgatccagtggcaaacgggtgagtaacacgtaaacaacctgccttcaggatggggacaacagacggaaacgactgctaataccgaatacgttccacgggccgcatgacctgtggaagaaagggtagcctctacctgtaagctatcgcctgaagaggggtttgcgtctgattaggcagttggtggggtaacggcccaccaaaccaacgatcagtagccggtctgagaggatgaacggccacactggaactgagacacggtccagactcctacgggaggcagcagtggggaatcttccgcaatggacgaaagtctgacggagcaacgccgcgtgagtgaagacggccttcgggttgtaaagctctgtgatccgggacgaaagagcctgaggttaatagcctaaggaagtgacggtaccggaaaagcaagccacggctaactacgtgccagcagccgcggtaatacgtaggtggcaagcgttgtccggaattattgggcgtaaagcgcgcgcaggcggcttcctaagtccatcttaaaagtgcggggcttaaccccgtgatgggatggaaactgggaagctggagtatcggagaggaaagtggaattcctagtgtagcggtgaaatgcgtagagattaggaagaacaccggtggcgaaggcgactttctggacgaaaactgacgctgaggcgcgaaagcgtggggagcaaacaggattagataccctggtagtccacgccgtaaacgatggatactaggtgtaggaggtatcgaccccttctgtgccggagttaacgcaataagtatcccgcctgggaagtacgatcgcaagattaaaactcaaaggaattgacgggggcccgcacaagcggtggagtatgtggtttaattcgacgcaacgcgaagaaccttaccaggtcttgacattgatcgcaattttcagaaatgagaagttctccttcgggagacgagaaaacaggtggtgcacggctgtcgtcagctcgtgtcgtgagatgttgggttaagtcccgcaacgagcgcaacccctatcatttgttgccagcacgtaaaggtggggactcaaatgagaccgccgcagacaatgcggaggaaggtggggatgacgtcaagtcatcatgccccttatgacctgggctacacacgtactacaatgggtgtcaacaaagagaagcgaaagggcgacctggagccaacctcaaaaacacacccccagttcagatcgcaggctgcaactcgcctgcgtgaagcaggaatcgctagtaatcgcgggtcagcataccgcggtgaatacgttcccgggccttgtacacaccgcccgtcacactatgagagtcagaaacacccgaagccggtgaggtaacc

SEQ ID NO: 767 - DNA, 1547 bp, Dialister sp.
  oral taxon 502
gagtttgatcctggctcaggacgaacgctggcggcgtgcttaacacatgcaagtcgaacggaaagagatgaaagagcttgctcttttattaatttcagtggcaaacgggtgagtaacacgtaaacaacctgccttagggatggggataacagacggaaacgactgctaataccgaatacgttctaagcatcgcatgatgcatagaagaaagggtggcctctacaagaaagctatcgccttaagaggggtttgcgactgattaggtagttggtgaggtaacggctcaccaagccgacgatcagtagccggtctgagaggatgaacggccacactggaactgagacacggtccagactcctacgggaggcagcagtggggaatcttccgcaatggacgaaagtctgacggagcaacgccgcgtgaacgaagaaggtcttcggattgtaaagttctgtgattcgggacgaaagggtaaatagtgaataactatagacattgacggtaccgaaaaagcaagccacggctaactacgtgccagcagccgcggtaatacgtaggtggcaagcgttgtccggaattattgggcgtaaagcgcgcgcaggcggtttcttaagtccatcttaaaagcgtggggctcaaccccatgaggggatggaaactgggaagctggagtatcggagaggaaagtggaattcctagtgtagcggtgaaatgcgtagagattaggaagaacaccggtggcgaaggcgactttctagacgaaaactgacgctgaggcgcgaaagcgtggggagcaaacaggattagataccctggtagtccacgccgtaaacgatggatactaggtgtaggaggtatcgacccctcctgtgccggagttaacgcaataagtatcccgcctgggaagtacgatcgcaagattaaaactcaaaggaattgacgggggcccgcacaagcggtggagtatgtggtttaattcgacgcaacgcgaagagccttaccaggtcttgacattgatcgcgatctgcagaaatgcggagttcttcttcggaagacgagaaaacaggtggtgcacggctgtcgtcagctcgtgtcgtgagatgttgggttaagtcccgcaacgagcgcaacccctgtcatttgttgccagcacgtaaaggtggggactcaaatgagaccgccgcggacaacgcggaggaaggcggggacgacgtcaagtcatcatgccccttatgacctgggctacacacgtactacaatgggtgtcaacaaagagaagcgaacccgcgagggagagcaaagctcaaaaacacacccccagttcagatcgcaggctgcaacccgcctgcgtgaagtaggaatcgctagtaatcgcgggtcagcataccgcggtgaatacgttcccgggccttgtacacaccgcccgtcacactatgagagtcagaaacacccgaagccggtgaggtaaccgcaaggagccagccgtcgaaggcggagctgatgattggagtgaagtcgtaacaaggtagccgtatcggaaggtgcgg

SEQ ID NO: 768 - DNA, 1325 bp, Dialister succinatiphilus
gacgaacgctggcggcgtgcttaacacatgcaagtcgaacgagtggcaaacgggtgagtaacacgtaaacaacctgccttcaggatggggacaacagacggaaacgactgctaataccgaatacggaaagtcgcctgaagaggggtttgcgtctgattaggcagttggtgaggtaacggcccaccaaacctacgatcagtagccggtctgagaggatgaacggccacactggaactgagacacggtccagactcctacgggaggcagcagtggggaatcttccgcaatgggcgaaagcctgacggagcaacgccgcgtgagtgatgacggccttcgggttgtaaagctctgtgatcggggacgatgacggtacccgaatagcaagccacggctaactacgtgccagcagccgcggtaatacgtaggtggcaagcgttgtccggaattattgggcgtaaagcgcgcgcaggcggctttctaagtccatcttaaaagtgcggggcttaaccccgtgatgggatggaaactgggaagctggagtatcggagaggaaagtggaattcctagtgtagcggtgaaatgcgtagagattaggaagaacaccggtggcgaaggcgactttctggacgaactgacgctgaggcgcgaaagcgtggggagcaaacaggattagataccctggtagtccacgccgtaaacgatgaatactaggtgtaggagcttctgtgccggagctaacacaataagtattccgcctgggaagtacgatcgcaagattaaaactcaaaggaattgacgggggcccgcacaagcggtggagtatgtggtttaattcgacgcaacgcgaagaaccttaccaggtcttgacattaacaggtggtgcacggctgtcgtcagctcgtgtcgtgagatgttgggttaagtcccgcaacgagcgcaacccctatcttatgttaccagcacgtggggactcatgagagaccgccgcggacaacgcggaggaaggtggggatgacgtcaagtcatcatgccccttatgacctgggctacacacgtactacaatgggtgtcaaagagaagcgaaaccgcgaggtggagcgaacctcaacacccccagttcagatgcaggctgcaacccgcctgcagaagtaggaatcgctagtaatcgcgggtcagcataccgcggtgaatacgttcccgggccttgtacacaccgcccgtcacactatgagagtcggaaacacccgaagccggtaggtagccagccgtcgaaggtggagctgatgattggagtgaagtcgtaacaaggtagccgtatcggaagg

SEQ ID NO: 769 - DNA, 1433 bp, Dietzia natronolimnaea
gcttacacatgcagtcgaacggtaaggccctttcgggggtacacgagtggcgaacgggtgagtaacacgtgggtaatctgccctgcacttcgggataagcctgggaaaccgggtctaataccggatatgagctcctgccgcatggtgggggttggaaagtttttcggtgcaggatgagtccgcggcctatcagcttgttggtggggtaatggcctaccaaggcgacgacgggtagccggcctgagagggtgatcggccacactgggactgagacacggcccagactcctacgggaggcagcagtggggaatattgcacaatgggcgaaagcctgatgcagcgacgccgcgtgggggatgacggtcttcggattgtaaactcctttcagtagggacgaagcgaaagtgacggtacctgcagaagaagcaccggccaactacgtgccagcagccgcggtaatacgtagggtgcaagcgttgtccggaattactgggcgtaaagagctcgtaggcggtttgtcacgtcgtctgtgaaatcctccagctcaactgggggcgtgcaggcgatacgggcagacttgagtactacaggggagactggaattcctggtgtagcggtgaaatgcgcagatatcaggaggaacaccggtggcgaaggcgggtctctgggtagtaactgacgctgaggagcgaaagcatggggagcaaacaggattagataccctggtagtccatgccgtaaacggtgggcgctaggtgtggggtccttccacggattccgtgccgtagctaacgcattaagcgccccgcctggggagtacggccgcaaggctaaaactcaaaggaattgacgggggcccgcacaagcggcggagcatgtggattaattcgatgcaacgcgaagaaccttacctaggcttgacatatacaggacgacggcagagatgtcgtttcccttgtggcttgtatacaggtggtgcatggttgtcgtcagctcgtgtcgtgagatgttgggttaagtcccgcaacgagcgcaacccctgtctcatgttgccagcacgttatggtggggactcgtgagagactgccggggtcaactccggatgaaggtggggatgacgtcaaatcatcatgcccccttatgtctagggcttcacatatgctacaatggctagtacagagggctgcgagaccgcgaggtggagcgaatcccttaaagctagtctcagttcggattggggtctgcaactcgaccccatgaagtcggagtcgctagtaatcgcagatcagcattgctgcggtgaatacgttcccgggccttgtacacaccgcccgtcacgtcatgaaagtcggtaacacccgaagccggtggcctaacccttgtggagggagccgtcgaaggtgggatcggcgattgggacgaagtcgaacaag

SEQ ID NO: 770 - DNA, 1483 bp, Dietzia sp.
  BBDP51
agagtttgatcctggctcaggacgaacgctggcggcgtgcttaacacatgcaagtcgaacggtaaggcccttcggggtacacgagtggcgaacgggtgagtaacacgtgggtaatctgccctgcacttcgggataagcctgggaaactgggtctaataccggatatgaactcctgccgcatggtgggggttggaaagtttttcggtgcaggatgagtccgcggcctatcagcttgttggtggggtaatggcctaccaaggcgacgacgggtagccggcctgagagggtgatcggccacactgggactgagacacggcccagactcctacgggaggcagcagtggggaatattgcacaatgggcgaaagcctgatgcagcgacgccgcgtgggggatgacggtcttcggattgtaaacccctttcagtagggacgaagcgcaagtgacggtacctgcagaagaagcaccggctaactacgtgccagcagccgcggtaatacgtagggtgcgagcgttgtccggaattactgggcgtaaagagctcgtaggcggtttgtcacgtcgtctgtgaaatccctcggcttaaccgggggcgtgcaggcgatacgggcagacttgagtactacaggggagactggaattcctggtgtagcggtgaaatgcgcagatatcaggaggaaccaccggtggcgaagggcgggtctcttgggtagtaactgacgctgaggagcgaaaagcatgggttagcgaacaggattagataccctgggtagtccatgccgtaaaacggtgggcgctaggtgtggggtccttccacggattccgtgccgtagctaacgcattaagcgccccgcctggggagtacggccgcaaggctaaaactcaaaggaattgacgggggcccgcacaagcggcggagcatgtggattaattcgatgcaacgcgaagaaccttacctaggcttgacatatacaggacgacggcagagatgtcgtttcccttgtggcttgtatacaggtggtgcatggttgtcgtcagctcgtgtcgtgagatgttgggttaagtcccgcaacgagcgcaacccctgtctcatgttgccagcacgttatggtggggactcgtgagagactgccggggtcaactcggaggaaggtggggatgacgtcaaatcatcatgccccttatgtctagggcttcacacatgctacaatggctagtacagagggctgcgataccgcgaggtggagcgaatcccttaaagctggtctcagttcggattggggtctgcaactcgaccccatgaagtcggagtcgctggtaatcgcagatcagcaacgctgcggtgaatacgttcccgggccttgtacacaccgcccgtcacgtcatgaaagtcggtaacacccgaagccggtggcctaacccttgtggagggagccgtcgaaggtgggatcggcgattgggacgaagtcgtaacaaggtaacc

SEQ ID NO: 771 - DNA, 1467 bp, Dietzia sp.
  CA149
ttaactgcagtcgacggtaaggccccttcgggggtacacgagtggcgaacgggtgagtaacacgtgggtaatctgccctgcacttcgggataagcttgggaaactgggtctaataccggatatgaactcctgccgcatggtgggggttggaaagtttttcggtgcaggatgagcccgcggcctatcagcttgttggtggggtaatggcctaccaaggcgacgacgggtagccggcctgagagggtgatcggccacactgggactgagacacggcccagactcctacgggaggcagcagtggggaatattgcacaatgggcgaaagcctgatgcagcgacgccgcgtgggggatgacggtcttcggattgtaaacccctttcagtagggacgaagcgcaagtgacggtacctgcagaagaagcaccggctaactacgtgccagcagccgcggtaatacgtagggtgcgagcgttgtccggaattactgggcgtaaagagctcgtaggcggtttgtcacgtcgtctgtgaaatccctcggcttaaccgggggcgtgcaggcgatacgggcagacttgagtactacaggggagactggaattcctggtgtagcggtgaaatgcgcagatatcaggaggaacaccggtggcgaaggcgggtctctgggtagtaactgacgctgaggagcgaaagcatgggtagcgaacaggattagataccctggtagtccatgccgtaaacggtgggcgctaggtgtggggtccttccacggactccgtgccgtagctaacgcattaagcgccccgcctggggagtacggccgcaaggctaaaactcaaaggaattgacgggggcccgcacaagcggcggagcatgtggattaattcgatgcaacgcgaagaaccttacctaggcttgacatcctttgacccttctagagatagaagtttccccttcgggggacaaagtgacaggtggtgcatggttgtcgtcagctcgtgtcgtgagatgttgggttaagtcccgcaacgagcgcaacccttaagcttagttgccatcattaagttgggcactctaagttgactgccggtgacaaaccggaggaaggtggggatgacgtcaaatcatcatgccccttatgatttgggctacacacgtgctacaatggacaatacaaagggcagcgaaaccgcgaggtcaagcaaatcccataaagttgttctcagttcggattgtagtctgcaactcgactacatgaagctggaatcgctagtaatcgtaaatcagcatgctacggtgaatacgttcccgggtcttgtacacaccgcccgtcacgtcatgaaagtcggtaacacccgaagccggtggcctaacccttgtggagggagccgtcgaaggtgggatcggcgattgggacgaagtcgtaacaaggtagccgtaccggaaggtgcggctggatcaaatccataa

SEQ ID NO: 772 - DNA, 1472 bp, Dietzia timorensis
ggggtgcttacacatgcagtcgaacggtaaggcccttcggggtacacgagtggcgaacgggtgagtaacacgtgggtaatctgccctgcacttcgggataagcctgggaaactgggtctaataccggatattcagcttctgccgcatggtggttgttggaaagtttttcggtgcaggatgtgcccgcggcctatcagcttgttggtggggtaatggcctaccaaggcgacgacgggtagccggcctgagagggtgatcggccacattgggactgagacacggcccagactcctacgggaggcagcagtggggaatattgcacaatgggcgcaagcctgatgcagcgacgccgcgtgagggatgacggtcttcggattgtaaacctctttcggcagggacgaagcgcaagtgacggtacctgcagaagaagcaccggccaactacgtgccagcagccgcggtaatacgtagggtgcaagcgttgtccggaattactgggcgtaaagagctcgtaggcggtttgtcgcgtcgtctgtgaaatcctacagcttaactgtgggcgtgcaggcgatacgggcagacttgagtactacaggggagactggaattcctggtgtagcggtgaaatgcgcagatatcaggaggaacaccggtggcgaaggcgggtctctgggtagtaactgacgctgaggagcgaaagcatgggtagcgaacaggattagataccctggtagtccatgccgtaaacggtgggcgctaggtgtgggtttccttccacgggatccgtgccgcagctaacgcattaagcgccccgcctggggagtacggccgcaaggctaaaactcaaaggaattgacgggggcccgcacaagcggcggagcatgtggattaattcgatgcaacgcgaagaaccttacctgggcttgacatatacaggacgacggcagagatgtcgtttcccttgtggcttgtatacaggtggtgcatggttgtcgtcagctcgtgtcgtgagatgttgggttaagtcccgcaacgagcgcaacccttgtctcatgttgccagcaattcggttggggactcgtgagagactgccggggtcaactcggaggaaggtggggatgacgtcaaatcatcatgccccttagtccagggcttcacacatgctacaatggccggtacagagggctgcgatactgtaaagtggagcgaatctcttaaagccggtctcagttcggattggggtctgcaactcgaccccatgaagtcgagtcgctagtaatcgcagatcagcaatgctgcggtgaatacgttcccgggccttgtacacaccgcccgtcacgtcatgagagtcggtaacacccgaagccggtggcctaacccttgtggggggagccgtcgaaggtgggatcggcgattgggacgaagtcgtaacaaggtacccgtaccggagggtgcggctggatcaaatcaata

SEQ ID NO: 773 - DNA, 1392 bp, Dorea formicigenerans
gtcgagcgaagcacttaagtttgattcttcggatgaagacttttgtgactgagcggcggacgggtgagtaacgcgtgggtaacctgcctcatacagggggataacagttagaaatggctgctaataccgcataagaccacagtactgcatggtacagtggtaaaaactccggtggtatgagatggacccgcgtctgattaggtagttggtgaggtaacggcccaccaagccgacgatcagtagccgacctgagagggtgaccggccacattgggactgagacacggcccagactcctacgggaggcagcagtggggaatattgcacaatgggcgaaagcctgatgcagcgacgccgcgtgaaggatgaagtatttcggtatgtaaacttctatcagcagggaagaaaatgacggtacctgactaagaagccccggctaactacgtgccagcagccgcggtaatacgtagggggcaagcgttatccggatttactgggtgtaaagggagcgtagacggctgtgcaagtctgaagtgaaaggcatgggctcaacctgtggactgctttggaaactgtgcagctagagtgtcggagaggtaagtggaattcctagtgtagcggtgaaatgcgtagatattaggaggaacaccagtggcgaaggcggcttactggacgatgactgacgttgaggctcgaaagcgtggggagcaaacaggattagataccctggtagtccacgccgtaaacgatgactgctaggtgtcgggtagcaaagctattcggtgccgcagctaacgcaataagcagtccacctggggagtacgttcgcaagaatgaaactcaaaggaattgacggggacccgcacaagcggtggagcatgtggtttaattcgaagcaacgcgaagaaccttacctgatcttgacatcccgatgaccgcttcgtaatggaagcttttcttcggaacatcggtgacaggtggtgcatggttgtcgtcagctcgtgtcgtgagatgttgggttaagtcccgcaacgagcgcaacccttatcttcagtagccagcatttaggatgggcactctggagagactgccagggataacctggaggaaggtggggatgacgtcaaatcatcatgccccttatgaccagggctacacacgtgctacaatggcgtaaacaaagggaagcagagccgcgaggccgagcaaatctcaaaaataacgtctcagttcggattgtagtctgcaactcgactacatgaagctggaatcgctagtaatcgcagatcagaatgctgcggtgaatacgttcccgggtcttgtacacaccgcccgtcacaccatgggagtcagtaacgcccgaagtcagtgacccaaccgaaaggagggagct

SEQ ID NO: 774 - DNA, 1392 bp, Dorea longicatena
  modified_base (13)..(13): a, c, t, g, unknown or other
  modified_base (18)..(19): a, c, t, g, unknown or other
  modified_base (21)..(22): a, c, t, g, unknown or other
  modified_base (24)..(25): a, c, t, g, unknown or other
  modified_base (41)..(41): a, c, t, g, unknown or other
gtcgagcgaagcngcttnngnnannagattcttcggatganttcctttgtgactgagcggcggacgggtgagtaacgcgtgggtaacctgcctcatacagggggataacagttagaaatgactgctaataccgcataagaccacggtaccgcatggtacagtggtaaaaactccggtggtatgagatggacccgcgtctgattaggtagttggtggggtaacggcctaccaagccgacgatcagtagccgacctgagagggtgaccggccacattgggactgagacacggcccagactcctacgggaggcagcagtggggaatattgcacaatggaggaaactctgatgcagcgacgccgcgtgaaggatgaagtatttcggtatgtaaacttctatcagcagggaagaaaatgacggtacctgactaagaagccccggctaactacgtgccagcagccgcggtaatacgtagggggcaagcgttatccggatttactgggtgtaaagggagcgtagacggcacggcaagccagatgtgaaagcccggggctcaaccccgggactgcatttggaactgctgagctagagtgtcggagaggcaagtggaattcctagtgtagcggtgaaatgcgtagatattaggaggaacaccagtggcgaaggcggcttgctggacgatgactgacgttgaggctcgaaagcgtggggagcaaacaggattagataccctggtagtccacgccgtaaacgatgactgctaggtgtcgggtggcaaagccattcggtgccgcagctaacgcaataagcagtccacctggggagtacgttcgcaagaatgaaactcaaaggaattgacggggacccgcacaagcggtggagcatgtggtttaattcgaagcaacgcgaagaaccttacctgatcttgacttcccgatgaccgcttcgtaatggaagtctttcttcggaacatcggtgacagtgggggcatggatgtcgtcagctcgtgtcgtgagatgttgggttaagtcccgcaacgagcgcaacccctatcttcagtagccagcaggttaagctgggcactctggagagactgccagggataacctggaggaaggtggggatgacgtcaaatcatcatgccccttatgaccagggctacacacgtgctacaatggcgtaaacaaagagaagcgaactcgcgagggtaagcaaatctcaaaaataacgtctcagttcggattgtagtctgcaactcgactacatgaagctggaatcgctagtaatcgcagatcagaatgctgcggtgaatacgttcccgggtcttgtacacaccgcccgtcacaccatgggagtcagtaacgcccgaagtcagtgacccaaccgtaaggagg

SEQ ID NO: 775 - DNA, 1529 bp, Dysgonomonas gadei
acaaagaagagtttgatcctggctcaggatgaacgctagcgataggcctaacacatgcaagtcgaggggcagcatagggtagcaatactttgatggcgaccggcgcacgggtgagtaacgcgtatgcaacctacctataacaggggaataacccggagaaattcggactaataccgcataaaacaggggctccgcatggagatatttgttaaagatttatcggttatagatgggcatgcgttccattagccagttggtgaggtaacggctcaccaaagcaacgatggataggggaactgagaggtttgtcccccacactggaactgagacacggaccagactcctacgggaggcagcagtgaggaatattggtcaatgggcgagagcctgaaccagccaaatcgcgtgaaggaagactgccttatgggttgtaaacttcttttatacaggaataaaaagagttacgtgtaacttattgcatgtactgtatgaataagcatcggctaactccgtgccagcagccgcggtaatacggaggatgcgagcgttatccggatttattgggtttaaagggtgcgcaggcgggaacttaagtcagcggtgaaatctcgacgcttaacgtcgaaactgccgttgaaactgggtttcttgagtatagatgaagtaggcggaattcgttgtgtagcggtgacatgcttagatataacgaggaactccgattgcgtaggcagcttactaagctataactgacgctcaagcacgaaagcgtggggatcaaacaggattagataccctggtagtccacgccgtaaacgatgattactagttgtatgcgatataccgtatgtgactaagcgaaagcgataagtaatccacctggggagtacgccggcaacggtgaaactcaaaggaattgacgggggcccgcacaagcggaggaacatgtggtttaattcgatgatacgcgaggaaccttacccgggcttgaaatgcagaagaataacgttgaaagatgttagccagcaatggcttctgtgtaggtgctgcatggttgtcgtcagctcgtgccgtgaggtgtcggcttaagtgccataacgagcgcaacccacattgttagttactaacaggtcaagctgaggactctaacaagactgccgtcgtaagatgcgaggaaggtgtggatgacgtcaaatcagcacggcccttacgtccggggcgacacacgtgttacaatgggtggtacaaagggcagctacttggtgacaagatgctaatctccaaagccactcccagttcggatcggagtctgcaactcgactccgtgaagctggattcgctagtaatcgcgcatcagccatggcgcggtgaatacgttcccgggccttgtacacaccgcccgtcaagccatggaagctgggggtatctgaagtgcgtaaccgcaaggagcgtcctagggtaaaaccggtgactggggctaagtcgtaacaaggtagccgtaccggaaggtgcggctggaacacctcctttct

SEQ ID NO: 776 - DNA, 1003 bp, Dysgonomonas mossii
  modified_base (879)..(879): a, c, t, g, unknown or other
  modified_base (972)..(974): a, c, t, g, unknown or other
  modified_base (979)..(981): a, c, t, g, unknown or other
  modified_base (991)..(992): a, c, t, g, unknown or other
agtcgaggggcagcatagagtagcaatactttgatggcgaccggcgcacgggtgagtaacacgtatgcaacctacctacatcaggggaataacccggagaaattcggactaataccgcataatacagggatgccgcatggcaatatttgttaaagatttatcggatgtagatgggcatgcgttccattagctagttggtaaggtaacggcttaccaaggcaacgatggataggggaactgagaggtttgtcccccacactggaactgagacacggaccagactcctacgggaggcagcagtgaggaatattggtcaatggacgagagtctgaaccagccaaatcgcgtgaaggaagactgccctacgggttgtaaacttcttttgtacaggaataaaagacattacgtgtaatgtattgcatgtactgtacgaataagcatcggctaactccgtgccagcagccgcggtaatacggaggatgcgagcgttatccggatttattgggtttaaagggtgcgcaggcgggattttaagtcagcggtgaaattttcaggctcaacctgaacactgccgttgaaactgggattcttgagtatggatgaagtaggcggaattcgttgtgtagcggtgacatgcttagatataacgaggaactccgattgcgtaggcagcttactaagccataactgacgctcaagcacgaaagcgtggggatcaaacaggattagataccctggtagtccacgccgtaaacgatgattactagttgtttgcgatataccgtaagtgactaagcgaaagcgataagtaatccacctggggagtacgccggcaacggtgaaactcaaaggaattgacgggggcccgcacaagcggangaacatgtggtttaattcgatgatacgcgaggaaccttacccgggcttgaaatgtacctgaccgtccttgaaaagggacttctagcaatagcnnnatgtnnngctgcatggnngtcgtcagctc

SEQ ID NO: 777 - DNA, 1547 bp, Edwardsiella tarda
tttaattgaagagtttgatcatggctcagattgaacgctggcggcaggcttaacacatgcaagtcgagcggtagcagggagaaagcttgctttctccgctgacgagcggcggacgggtgagtaatgtctggggatctgcctgatggagggggataactactggaaacggtagctaataccgcataacgtcgcaagaccaaagtgggggaccttcgggcctcatgccatcagatgaacccagatgggattagctagtaggtggggtaatggctcacctaggcgacgatccctagctggtctgagaggatgaccagccacactggaactgagacacggtccagactcctacgggaggcagcagtggggaatattgcacaatgggcgcaagcctgatgcagccatgccgcgtgtatgaagaaggccttcgggttgtaaagtactttcagtagggaggaaggtgtgaacgttaatagcgctcacaattgacgttacctacagaagaagcaccggctaactccgtgccagcagccgcggtaatacggagggtgcaagcgttaatcggaattactgggcgtaaagcgcacgcaggcggtttgttaagttggatgtgaaatccccgggcttaacctgggaactgcatccaagactggcaagctagagtctcgtagagggaggtagaattccaggtgtagcggtgaaatgcgtagagatctggaggaataccggtggcgaaggcggcctcctggacgaagactgacgctcaggtgcgaaagcgtggggagcaaacaggattagataccctggtagtccacgctgtaaacgatgtcgatttggaggttgtgcccttgaggcgtggcttccgaagctaacgcgttaaatcgaccgcctggggagtacggccgcaaggttaaaactcaaatgaattgacgggggcccgcacaagcggtggagcatgtggtttaattcgatgcaacgcgaagaaccttacctactcttgacatccagcgaatcctgtagagatacgggagtgccttcgggaacgctgagacaggtgctgcatggctgtcgtcagctcgtgttgtgaaatgttgggttaagtcccgcaacgagcgcaacccttatcctttgttgccagcggttcggccgggaactcaaaggagactgccagtgataaactggaggaaggtggggatgacgtcaagtcatcatggcccttacgagtagggctacacacgtgctacaatggcgtatacaaagagaagcgaactcgcgagagcaagcggacctcataaagtacgtcgtagtccggattggagtctgcaactcgactccatgaagtcggaatcgctagtaatcgtggatcagaatgccacggtgaatacgttcccgggccttgtacacaccgcccgtcacaccatgggagtgggttgcaaaagaagtaggtagcttaaccttcgggagggcgcttaccactttgtgattcatgactggggtgaagtcgtaacaaggtaaccgtaggggaacctgcggttggatcacctccttac

SEQ ID NO: 778 - DNA, 999 bp, Eggerthella lenta
  modified_base (33)..(36): a, c, t, g, unknown or other
  modified_base (57)..(57): a, c, t, g, unknown or other
  modified_base (119)..(119): a, c, t, g, unknown or other
  modified_base (788)..(788): a, c, t, g, unknown or other
  modified_base (848)..(848): a, c, t, g, unknown or other
  modified_base (860)..(860): a, c, t, g, unknown or other
  modified_base (877)..(877): a, c, t, g, unknown or other
  modified_base (887)..(887): a, c, t, g, unknown or other
  modified_base (891)..(891): a, c, t, g, unknown or other
  modified_base (899)..(899): a, c, t, g, unknown or other
  modified_base (933)..(934): a, c, t, g, unknown or other
  modified_base (961)..(961): a, c, t, g, unknown or other
  modified_base (963)..(963): a, c, t, g, unknown or other
  modified_base (978)..(978): a, c, t, g, unknown or other
  modified_base (980)..(980): a, c, t, g, unknown or other
  modified_base (983)..(983): a, c, t, g, unknown or other
cctcgggcggacatgaagtggcgaacgggtgannnncacgtgaccaacctgcccccngctccgggacaaccttgggaaaccgaggctaataccggatactccctcccctgctcctgggngggtcgggaaagcccaggcggagggggatggggtcgcggcccattaggtagtaggcggggtaacggcccacctagcccgcgatgggtagccgggttgagagaccgaccggccacattgggactgagatacggcccagactcctacgggaggcagcagtggggaattttgcgcaatgggggaaaccctgacgcagcaacgccgcgtgcgggacgacggccttcgggttgtaaaccgctttcagcagggaagaaattcgacggtacctgcagaagaagctccggctaactacgtgccagcagccgcggtaatacgtagggagcgagcgttatccggattcattgggcgtaaagagcgcgtaggcggcctctcaagcgggatctctaatccgagggctcaacccccggccggatcccgaactgggaggctcgagttcggtagaggcaggcggaattcccggtgtagcggtggaatgcgcagatatcgggaagaacaccgatggcgaaggcagcctgctgggccgcaactgacgctgaggcgcgaaagctaggggagcgaacaggattagataccctggtagtcctagccgtaaacgatggatactaggtgtggggggctccgccctccgtgccgcagccaacgcattaagtatcccgcctggggagtacggncgcaaggctaaaactcaaggaattgacgggggcccgcacaagcagcggagcatgtggctnaattcgaagcancgcgaagaaccttaccngggcttgacntggnacgtgaanccggggaaacccggtggccgagaggagcgtccgnnagtggtgcatggctgtcgtcagctcgngncgtgagatgttgggntnagntcccgcaacgagcgca

SEQ ID NO: 779 - DNA, 1429 bp, Eggerthella sinensis
gatgaacgctggcggcgtgcctaacacatgcaagtcgaacgattaaaccgtcctcggacggacatagagtggcgaacgggtgagtaacacgtgaccaacctgccccccgctccgggacaaccttgggaaaccgaggctaataccggatactcctcgcccccctcctggggggcccgggaaagcccagacggcgggggatggggtcgcggcccattaggtagacggcggggtaacggcccaccgtgcctgcgatgggtagccgggttgagagaccgaccggccacattgggactgagatacggcccagactcctacgggaggcagcagtggggaattttgcgcaatgggggaaaccctgacgcagcaacgccgcgtgcgggatgacggccttcgggttgtaaaccgctttcagcagggaagaaattcgacggtacctgcagaagaagctccggctaactacgtgccagcagccgcggtaatacgtagggagcgagcgttatccggattcattgggcgtaaagagcgcgtaggcggcctttcaagcgggatctctaatccgagggctcaacccccggccggatcccgaactgggaggctcgagttcggtagaggcaggcggaattcccggtgtagcggtggaatgcgcagatatcgggaagaacaccgatggcgaaggcagcctgctgggccgaaactgacgctgaggcgcgaaagctaggggagcgaacaggattagataccctggtagtcctagccgtaaacgatgggcgctaggtgtggggagggtcatcctctccgtgcccgcagctaacgcattaagcgccccgcctggggagtacggccgcaaggctaaaactcaaaggaattgacgggggcccgcacaagcagcggagcatgtggcttaattcgaagcaacgcgaagaaccttaccagggcttgacatgctagtgaagccggggaaacccggtggccgagaggagctagcgcaggtggtgcatggctgtcgtcagctcgtgtcgtgagatgttgggttaagtcccgcaacgagcgcaacccctatcgcatgttgccagcattcagttggggactcatgcgagactgccggcgtcaagccggaggaaggtggggacgacgtcaagtcatcatgccctttatgccctgggctgcacacgtgctacaatggccggtacaacgggctgcgaactcgcgagagtgagcgaatcccttaaagccggccccagttcggatcggaggctgcaacccgcctccgtgaagtcggagttgctagtaatcgcggatcagcatgccgcggtgaatacgttcccgggccttgtacacaccgcccgtcacaccacccgagtcgtctgcacccgaagccgccggccgaacccgcaaggggcggaggcgtcgaaggtgtggagggtaaggg

SEQ ID NO: 780 - DNA, 1346 bp, Eggerthella sp.
  1_3_56FAA
  modified_base (123)..(123): a, c, t, g, unknown or other
  modified_base (1329)..(1329): a, c, t, g, unknown or other
accgccctcgggcggacatgaagtggcgaacgggtgagtaacacgtgaccaacctgcccccctctccgggacaaccttgggaaaccgaggctaataccggatactccctcccctgctcctggnggggtcgggaaagcccaggcggagggggatggggtcgcggcccattaggtagtaggcggggtaacggcccacctagcccgcgatgggtagccgggttgagagaccgaccggccacattgggactgagatacggcccagactcctacgggaggcagcagtggggaattttgcgcaatgggggaaaccctgacgcagcaacgccgcgtgcgggacgacggccttcgggttgtaaaccgctttcagcagggaagaaattcaggcctgcagaagaagctccggctaactacgtgccagcagccgcggtaatacgtagggagcgagcgttatccggattcattgggcgtaaagagcgcgtaggcggcctctcaagcgggatctctaatccgagggctcaacccccggccggatcccgaactgggaggctcgagttcggtagaggcaggcggaattcccggtgtagcggtggaatgcgcagatatcgggaagaacaccgatggcgaaggcagcctgctgggccgcaactgacgctgaggcgcgaaagctaggggagcgaacaggattagataccctggtagtcctagccgtaaacgatggatactaggtgtggggggctccgccctccgtgccgcagccaacgcattaagtatcccgcctggggagtacggccgcaaggctaaaactcaaaggaattgacgggggcccgcacaagcagcggagcatgtggcttagttcgaagcaacgcgaagaacctcaccaggcctgatcccgaactggaagccggggaaacccggtggccgagaggaacgtccgcaggtggtgcatggctgtcgtcagctcgtgtcgtgacatgttgggttaagtcccgcaacgagcgcaacccctgccccatgttgccagcattaggttggggactcatgggggactgccggcgtcaagccggaggaaggtggggacgacgtcaagtcatcatgccctttatgccctgggctgcacacgtgctacaatggccggtacaacgggctgcgagaccgcgaggtcgagcgaatccctcaaagccggccccagttcggatcggaggctgcaacccgcctccgtgaagtcggagttgctagtaatcgcggatcagcatgccgcggtgaatacgttcccgggccttgtacacaccgcccgtcacaccacccgagtcgtctgcacccgaagccgccntccgaacccgcaagggg

SEQ ID NO: 781 - DNA, 1430 bp, Eggerthella sp.
  HGA1
gaacgctggcggcgtgcctaacacatgcaagtcgaacgatgaaaccgccctcgggcggacatgaagtggcgaacgggtgagtaacacgtgaccaacctgcccccctctccgggacaaccttgggaaaccgaggctaataccggatactccctcccctgctcctgcaggggtcgggaaagcccaggcggagggggatggggtcgcggcccattaggtagtaggcggggtaacggcccacctagcccgcgatgggtagccgggttgagagaccgaccggccacattgggactgagatacggcccagactcctacgggaggcagcagtggggaattttgcgcaatgggggcaaccctgacgcagcaacgccgcgtgcgggacgacggccttcgggttgtaaaccgctttcagcagggaagaaattcgacggtacctgcagaagaagctccggctaactacgtgccagcagccgcggtaatacgtagggagcgagcgttatccggattcattgggcgtaaagagcgcgtaggcggcctctcaagcgggatctctaatccgagggctcaacccccggccggatcccgaactgggaggctcgagttcggtagaggcaggcggaattcccggtgtagcggtggaatgcgcagatatcgggaagaacaccgatggcgaaggcagcctgctgggccgcaactgacgctgaggcgcgaaagctaggggagcgaacaggattagataccctggtagtcctagccgtaaacgatggatactaggtgtggggggctccgccctccgtgccgcagccaacgcattaagtatcccgcctggggagtacggccgcaaggctaaaactcaaaggaattgacgggggcccgcacaagcagcggagcatgtggcttaattcgaagcaacgcgaagaaccttaccagggcttgacatggacgtgaagccggggaaacccggtggccgagaggagcgtccgcaggtggtgcatggctgtcgtcagctcgtgtcgtgagatgttgggttaagtcccgcaacgagcgcaacccctgccccatgttgccagcattaggttggggactcatgggggactgccggcgtcaagccggaggaaggtggggacgacgtcaagtcatcatgccctttatgccctgggctgcacacgtgctacaatggccggtacaacgggctgcgagaccgcgaggtcgagcgaatccctcaaagccggccccagttcggatcggaggctgcaacccgcctccgtgaagtcggagttgctagtaatcgcggatcagcatgccgcggtgaatacgttcccgggccttgtacacaccgcccgtcacaccacccgagtcgtctgcacccgaagccgccggccgaacccgcaaggggcggaggcgtcgaaggtgtggagggtaaggggggtgaa

SEQ ID NO: 782 - DNA, 753 bp, Eggerthella sp.
  YY7918
  modified_base (122)..(122): a, c, t, g, unknown or other
  modified_base (197)..(197): a, c, t, g, unknown or other
  modified_base (341)..(341): a, c, t, g, unknown or other
  modified_base (431)..(431): a, c, t, g, unknown or other
  modified_base (508)..(508): a, c, t, g, unknown or other
  modified_base (602)..(602): a, c, t, g, unknown or other
  modified_base (620)..(621): a, c, t, g, unknown or other
  modified_base (623)..(623): a, c, t, g, unknown or other
  modified_base (627)..(627): a, c, t, g, unknown or other
  modified_base (670)..(670): a, c, t, g, unknown or other
  modified_base (676)..(676): a, c, t, g, unknown or other
  modified_base (709)..(709): a, c, t, g, unknown or other
  modified_base (739)..(739): a, c, t, g, unknown or other
ctacccttctcttcgggacaaccttgggaaaccgaggctaataccgaatactccggtgagtgcgcatgcacacgccgggaaagctttcgcggagaaggatggggtcgcggcccatcaggtanacggcggggtagcggcccaccgtgcttttgacgggtagccgggttgagagaccgaccggccacattgggactganatacggcccagactcctacgggaggcagcagtggggaattttgcgcaatgggggaaaccctgacgcagcaccgccgcgtgcgggatgaaggccttcgggtcgtaaaccgctttcagcagggaagaaattcgacggtacctgcanaagaagccccggctaactacgtgccagcagccgcggtaatacgtagggggcgagcgttatccggattcattgggcgtaaagcgcgcgtangcggccgcctaagcgggacctctaaccttggggctcaacctcaagccgggttccgaactgggtggctcgagtttggnagaggaagatggaattcccggtgtagcggtggaatgcgcagatatcgggaagaacaccgatggcgaaggcagtcttctgggctcataactgacnctgaagcgcgaaagctanngnagcnaacaggattagataccctggtagtcctagccgtaaacgatggncactangtgtggggagatactctttccgtgccgaagcanacgcattaagtgccccgcctggggagtacngccgcaaggctaaa

SEQ ID NO: 783 - DNA, 1510 bp, Ehrlichia chaffeensis
tcaaacttgagagtttgatcctggctcagaacgaacgctggcggcaagcctaacacatgcaagtcgaacggacaattgcttataaccttttggttataaataattgttagtggcagacgggtgagtaatgcgtaggaatctacctagtagtatggaatagccattagaaatgatgggtaatactgtataatccctgcgggggaaagatttatcgctattagatgagcctacgttagattagctagttggtaaggtaatggcttaccaaggctatgatctatagctggtctgagaggacgatcagccacactggaactgagatacggtccagactcctacgggaggcagcagtggggaatattggacaatgggcgaaagcctgatccagctatgccgcgtgagtgaagaaggccttcgggttgtaaaactctttcaatagggaagataatgacggtacctatagaagaagtcccggcaaactctgtgccagcagccgcggtaatacggagggggcaagcgttgttcggaattattgggcgtaaagggcacgtaggtggactagtaagttaaaagtgaaataccaaggcttaactttggagcggcttttaatactgctagactagaggtcgaaagaggatagcggaattcctagtgtagaggtgaaattcgtagatattaggaggaacaccagtggcgaaagcggctatctggttcgatactgacactgaggtgcgaaagcgtggggagcaaacaggattagataccctggtagtccacgctgtaaacgatgagtgctaaatgtgaggattttatctttgtattgtagctaacgcgttaagcactccgcctggggactacggtcgcaagactaaaactcaaaggaattgacggggacccgcacaagcggtggagcatgtggtttaattcgatgcaacgcgaaaaaccttaccactttttgacatgaaggtcgtatccctcctaatagggggagtcagttcggctggaccttacacaggtgctgcatggctgtcgtcagctcgtgtcgtgagatgttgggttaagtcccgcaacgagcgcaaccctcatccttagttaccaacaggtaatgctgggcactctaaggaaactgccagtgataaactggaggaaggtggggatgatgtcaagtcagcacggcccttataaggtgggctacacacgtgctacaatggcaactacaataggtcgcgagaccgcaaggtttagctaatccataaaagttgtctcagttcggattgttctctgcaactcgagagcatgaagtcggaatcgctagtaatcgtggatcatcatgccacggtgaatacgttctcgggtcttgtacacactgcccgtcacgccatgggaattggcttaactcgaagctggtgtgctaaccgcaaggaagcagccatttaaggttgggttagtgactagggtgaagtcgtaacaaggtagctgtaggtgaacctgcggctggattacctccttt

SEQ ID NO: 784 - DNA, 1546 bp, Eikenella corrodens
ttgaacataagagtttgatcctggctcagattgaacgctggcggcatgctttacacatgcaagtcgaacggcagcggggtagtgcttgcactactgtccggcgagtggcgaacgggtgagtaatatatcggaacgtaccgagtaatgggggataaccaatcgaaagattggctaataccgcatacgtcctacgggagaaagcgggggatcgcaagacctcgcgttattcgagcggccgataactgattagctagttggtggggtaaaggcctaccaaggcgacgatcagtagcgggtctgagaggacgatccgccacactgggactgagacacggcccagactcctacgggaggcagcagtggggaattttggacaatgggggcaaccctgatccagccatgccgcgtgtatgaagaaggccttcgggttgtaaagtacttttgttagggaagaaaagggaagtgctaataccactttttgctgacggtacctaaagaataagcaccggctaactacgtgccagcagccgcggtaatacgtagggtgcgagcgttaatcggaattactgggcgtaaagcgagcgcagacggttatttaagcaggatgtgaaatccccgggcttaacctgggaactgcgttctgaactggatagctagagtgtgtcagaggggggtagaattccacgtgtagcagtgaaatgcgtagagatgtggaggaataccgatggcgaaggcagccccctgggataacactgacgttcatgctcgaaagcgtgggtagcaaacaggattagataccctggtagtccacgccctaaacgatgtcgattagctgttgggcaacttgattgcttagtagcgtagctaacgcgtgaaatcgaccgcctggggagtacggtcgcaagattaaaactcaaaggaattgacggggacccgcacaagcggtggatgatgtggattaattcgatgcaacgcgaagaaccttacctggtcttgacatgtacggaaccttccagagacggaagggtgccttcgggagccgtaacacaggtgctgcatggctgtcgtcagctcgtgtcgtgagatgttgggttaagtcccgcaacgagcgcaacccttgtcattagttgccatcatttagttgggcactctaatgagactgccggtgacaaaccggaggaaggtggggatgacgtcaagtcctcatggcccttatgaccagggcttcacacgtcatacaatggtcggtacagagggtagccaagccgcgaggtggagccaatcccagaaaaccgatcgtagtccggattgcactctgcaactcgagtgcatgaagtcggaatcgctagtaatcgcaggtcagcatactgcggtgaatacgttcccgggtcttgtacacaccgcccgtcacaccatgggagtgggggataccagaagcaggtagggtaaccgcaaggagcccgcttgccacggtatgcttcatgactggggtgaagtcgtaacaaggtagccgtaggggaacctgcggctggatcacctcctttct

SEQ ID NO: 785 - DNA, 1533 bp, Enhydrobacter aerosaccus
taaactgaagagtttgatcatggctcagattgaacgctggcggcaggcttaacacatgcaagtcgaacgatgattatctagcttgctagatatgattagtggcggacgggtgagtaacatttaggaatctgcctagtagtgggggatagctcggggaaactcgaattaataccgcatacgacctacgggtgaaagggggcgcaagctcttgctattagatgagcctaaatcagattagctagttggtggggtaaaggcccaccaaggcgacgatctgtaactggtctgagaggatgatcagtcacaccggaactgagacacggtccggactcctacgggaggcagcagtggggaatattggacaatgggggcaaccctgatccagccatgccgcgtgtgtgaagaaggccttttggttgtaaagcactttaagcagggaggagaggctaatggttaatacccattagattagacgttacctgcagaataagcaccggctaactctgtgccagcagccgcggtaatacagagggtgcgagcgttaatcggaattactgggcgtaaagcgagtgtaggtggctcattaagtcacatgtgaaatccccgggcttaacctgggaactgcatgtgatactggtggtgctagaatatgtgagagggaagtagaattccaggtgtagcggtgaaatgcgtagagatctggaggaataccgatggcgaaggcagcttcctggcataatattgacactgagattcgaaagcgtgggtagcaaacaggattagataccctggtagtccacgccgtaaacgatgtctactagccgttggggtccttgagactttagtggcgcagttaacgcgataagtagaccgcctggggagtacggccgcaaggttaaaactcaaatgaattgacgggggcccgcacaagcggtggagcatgtggtttaattcgatgcaacgcgaagaaccttacctggtcttgacatagtgagaatcctgcagagatgcgggagtgccttcgggaattcacatacaggtgctgcatggctgtcgtcagctcgtgtcgtgagatgttgggttaagtcccgcaacgagcgcaacccttttccttatttgccagcgggttaagccgggaactttaaggatactgccagtgacaaactggaggaaggcggggacgacgtcaagtcatcatggcccttacgaccagggctacacacgtgctacaatggtaggtacagagggttgctacacagcgatgtgatgctaatctcaaaaagcctatcgtagtccggattggagtctgcaactcgactccatgaagtcggaatcgctagtaatcgcagatcagaatgctgcggtgaatacgttcccgggccttgtacacaccgcccgtcacaccatgggagtctattgcaccagaagtaggtagcctaacgcaagagggcgcttaccacggtgtggtcgatgactggggtgaagtcgtaacaaggtagccgtaggggaacctgcggctggatcacctcctta

SEQ ID NO: 786 - DNA, 1396 bp, Enterobacter aerogenes
  modified_base (9)..(9): a, c, t, g, unknown or other
  modified_base (13)..(13): a, c, t, g, unknown or other
gcggtaacncaanaagagcttgctctcgggtgacgagcggcggacgggtgagtaatgtctgggaaactgcctgatggagggggataactactggaaacggtagctaataccgcataacgtcgcaagaccaaagtgggggaccttcgggcctcatgccatcagatgtgcccagatgggattagctagtaggtggggtaatggctcacctaggcgacgatccctagctggtctgagaggatgaccagccacactggaactgagacacggtccagactcctacgggaggcagcagtggggaatattgcacaatgggcgcaagcctgatgcagccatgccgcgtgtatgaagaaggccttcgggttgtaaagtactttcagcgaggaggaaggcgttaaggttaataaccttggcgattgacgttactcgcagaagaagcaccggctaactccgtgccagcagccgcggtaatacgggggtgcaagcgttaatcggaattactgggcgtaaagcgcacgcaggcggtctgtcaagtcggatgtgaaatccccgggctcaacctgggaactgcattcgaaactggcaggctagagtcttgtagaggggggtagaattccaggtgtagcggtgaaatgcgtagagatctggaggaataccggtggcgaaggcggccccctggacaaagactgacgctcaggtgcgaaagcgtggggagcaaacaggattagataccctggtagtccacgccgtaaacgatgtcgacttggaggttgtgcccttgaggcgtggcttccggagctaacgcgttaagtcgaccgcctggggagtacggccgcaaggttaaaactcaaatgaattgacgggggcccgcacaagcggtggagcatgtggtttaattcgatgcaacgcgaagaaccttacctactcttgacatccagagaacttagcagagatgctttggtgccttcgggaactctgagacaggtgctgcatggctgtcgtcagctcgtgttgtgaaatgttgggttaagtcccgcaacgagcgcaacccttatcctttgttgccagcgattaggtcgggaactcaaaggagactgccagtgataaactggaggaaggtggggatgacgtcaagtcatcatggcccttacgagtagggctacacacgtgctacaatggcatatacaaagagaagcgacctcgcgagagcaagcggacctcataaagtatgtcgtagtccggattggagtctgcaactcgactccatgaagtcggaatcgctagtaatcgtagatcagaatgctacggtgaatacgttcccgggccttgtacacaccgcccgtcacaccatgggagtgggttgcaaaagaagtaggtagcttaaccttcgggagggcgc

SEQ ID NO: 787 - DNA, 597 bp, Enterobacter asburiae
cagactcctacgggaggcagcagtggggaatattgcacaatgggcgcaagcctgatgcagccatgccgcgtgtatgaagaaggccttcgggttgtaaagtactttcagcggggaggaaggcgataaggttaataaccttgtcgattgacgttacccgcagaagaagcaccggctaactccgtgccagcagccgcggtaatacggagggtgcaagcgttaatcggaattactgggcgtaaagcgcacgcaggcggtctgtcaagtcggatgtgaaatccccgggctcaacctgggaactgcattcgaaactggcaggctagagtcttgtagaggggggtagaattccaggtgtagcggtgaaatgcgtagagatctggaggaataccggtggcgaaggcggccccctggacaaagactgacgctcaggtgcgaaagcgtggggagcaaacaggattagataccctggtagtccacgccgtaaacgatgtcgacttggaggttgtgcccttgaggcgtggcttccggagctaacgcgttaagtcgaccgcctggggagtacggccgcaaggttaaaactcaatgaattgacgggggccc

SEQ ID NO: 788 - DNA, 1495 bp, Enterobacter cancerogenus
attgaacgctggcggcaggcctaacacatgcaagtcgarcggtarcacagagagcttgctctcgggtgacgagyggcggacgggtgagtaatgtctgggaaactgcctgatggagggggataactactggaaacggtagctaataccgcataacgtcgcaagaccaaagagggggaccttcgggcctcttgccatcagatgtgcccagatgggattagctagtaggtggggtaacggctcacctaggcgacgatccctagctggtctgagaggatgaccagccacactggaactgagacacggtccagactcctacgggaggcagcagtggggaatattgcacaatgggcgcaascctgatgcagccatgccgcgtgtatgaagaaggccttcgggttgtaaagtactttcagcggggaggaaggcgataaggttaataaccttgtcgattgacgttacccgcagaaraagcaccggctaactccgtgccagcagccgcggtaatacggagggtgcaagcgttaatcggaattactgggcgtaaagcgcacgcaggcggtctgtcaagtcggatgtgaaatccccgggctcaacctgggaactgcattcgaaactggcaggctagagtcttgtagaggggggtagaattccaggtgtagcggtgaaatgcgtagagatctggaggaataccggtggcgaaggcggccccctggacaaagactgacgctcaggtgcgaaagcgtggggagcaaacaggattagataccctggtagtccacgccgtaaacgatgtcgacttggaggttgtgcccttgaggcgtggcttccggagctaacgcgttaagtcgaccgcctggggagtacggccgcaaggttaaaactcaaatgaattgacgggggcccgcacaagcggtggagcatgtggtttaattcgatgcaacgcgaagaaccttacctactcttgacatccagagaacttagcagagatgctttggtgccttcgggaactctgagacaggtgctgcatggctgtcgtcagctcgtgttgtgaaatgttgggttaagtcccgcaacgagcgcaacccttatcctttgttgccagcggtcmggccgggaactcaaaggagactgccagtgataaactggaggaaggtggggatgacgtcaagtcatcatggcccttacgagtagggctacacacgtgctacaatggcgcatacaaagagaagcgacctcgcgagagcaagcggacctcataaagtgcgtcgtagtccggattggagtctgcaactcgactccatgaagtcggaatcgctagtaatcgtagatcagaatgctacggtgaatacgttcccgggccttgtacacaccgcccgtcacaccatgggagtgggttgcaaaagaagtaggtagcttaacctycgggagggcgcttaccactttgtgattcatgactggggtgaagtcgtaacaaggtaaccgtaggggaacctgc

SEQ ID NO: 789 - DNA, 1395 bp, Enterobacter cloacae
tcgaacggtagcacagagagcttgctctcgggtgacgagtggcggacgggtgagtaatgtctgggaaactgcctgatggagggggataactactggaaacggtagctaataccgcataacgtcgcaagaccaaagagggggaccttcgggcctcttgccatcagatgtgcccagatgggattagctagtaggtggggtaacggctcacctaggcgacgatccctagctggtctgagaggatgaccagccacactggaactgagacacggtccagactcctacgggaggcagcagtggggaatattgcacaatgggcgcaagcctgatgcagccatgccgcgtgtatgaagaaggccttcgggttgtaaagtactttcagcggggaggaagggagtaaggttaataaccttgttcattgacgttacccgcagaagaagcaccggctaactccgtgccagcagccgcggtaatacggagggtgcaagcgttaatcggaattactgggcgtaaagcgcacgcaggcggtctgtcaagtcggatgtgaaatccccgggctcaacctgggaactgcattcgaaactggcaggctggagtcttgtagaggggggtagaattccaggtgtagcggtgaaatgcgtagagatctggaggaataccggtggcgaaggcggccccctggacaaagactgacgctcaggtgcgaaagcgtggggagcaaacaggattagataccctggtagtccacgctgtaaacgatgtcgacttggaggttgttcccttgaggagtggcttccggagctaacgcgttaagtcgaccgcctggggagtacggccgcaaggttaaaactcaaatgaattgacgggggcccgcacaagcggtggagcatgtggtttaattcgatgcaacgcgaagaaccttacctactcttgacatccagagaacttagcagaaatgctttggtgccttcgggaactctgagacaggtgctgcatggctgtcgtcagctcgtgttgtgaaatgttgggttaagtcccgcaacgagcgcaacccttatcctttgttgccagcggtccggccgggaactcaaaggagactgccagtgataaactggaggaaggtggggatgacgtcaagtcatcatggcccttacgagtagggctacacacgtgctacaatggcatatacaaagagaagcgacctcgcgagagcaagcggacctcataaagtatgtcgtagtccggattggagtctgcaactcgactccatgaagtcggaatcgctagtaatcgtggatcagaatgccacggtgaatacgttcccgggccttgtacacaccgcccgtcacaccatgggagtgggttgcaaaagaagtaggtagcttaaccttcgggagg

SEQ ID NO: 790 - DNA, 1362 bp, Enterobacter cowanii
  modified_base (982)..(983): a, c, t, g, unknown or other
ggcggcaggcctaacacatgcaagtcgaacggtaacaggaagcagcttgctgcttgctgacgagtggcggacgggtgagtaatgtctgggaaactgcctgatggagggggataactactggaaacggtagctaataccgcataacgtcgcaagaccaaagagggggaccttcgggcctcttgccatcagatgtgcccagatgggattagctagtaggtggggtaacggctcacctaggcgacgatccctagctggtctgagaggatgaccagccacactggaactgagacacggtccagactcctacgggaggcagcagtggggaatattgcacaatgggcgcaagcctgatgcagccatgccgcgtgtatgaagaaggccttcgggttgtaaagtactttcagcggggaggaaggcgatgggttaataaccgcgtcgattgacgttacccgcagaagaagcaccggctaactccgtgccagcagccgcggtaatacggagggtgcaagcgttaatcggaattactgggcgtaaagcgcacgcaggcggtctgtcaagtcggatgtgaaatccccgggctcaacctgggaactgcatccgaaactggcaggcttgagtctcgtagaggggggtagaattccaggtgtagcggtgaaatgcgtagagatctggaggaataccggtggcgaaggcggccccctggacgaagactgacgctcaggtgcgaaagcgtggggagcaaacaggattagataccctggtagtccacgccgtaaacgatgtcgacttggaggttgtgcccttgaggcgtggcttccggagctaacgcgttaagtcgaccgcctggggagtacggccgcaaggttaaaactcaaatgaattgacgggggcccgcacaagcggtggagcatgtggtttaattcgatgcaacgcgaagaaccttacctggtcttgacatccacagaactttccagagatggannggtgccttcgggaactgtgagacaggtgctgcatggctgtcgtcagctcgtgttgtgaaatgttgggttaagtcccgcaacgagcgcaacccttatcctttgttgccagcggttaggccgggaactcaaaggagactgccagtgataaactggaggaaggtggggatgacgtcaagtcatcatggcccttacgaccagggctacacacgtgctacaatggcgcatacaaagagaagcaatctcgcgagagcaygcggacctcataaagtgcgtcgtagtccggattggagtctgcaactcgactccatgaagtcggaatcgctagtaatcgtgaatcagaatgtcacggtgaatacgttcccgggccttgtacacaccg

SEQ ID NO: 791 - DNA, 943 bp, Enterobacter hormaechei
gtgccagcagccgcggtaatacggagggtgcaagcgttaatcggaattactgggcgtaaagcgcacgcaggcggtctgtcaagtcggatgtgaaatccccgggctcaacctgggaactgcatccgaaactggcaggctagagtcttgtagaggggggtagaattccaggtgtagcggtgaaatgcgtagagatctggaggaataccggtggcgaaggcggccccctggacaaagactgacgctcaggtgcgaaagcgtggggagcaaacaggattagataccctggtagtccacgccgtaaacgatgtcgacttggaggttgtgcccttgaggcgtggcttccggagctaacgcgttaagtcgaccgcctggggagtacggccgcaaggttaaaactcaaatgaattgacgggggcccgcacaagcggtggagcatgtggtttaattcgatgcaacgcgaagaaccttacctactcttgacatccagagaacttagcagagatgctttggtgccttcgggaactctgagacaggtgctgcatggctgtcgtcagctcgtgttgtgaaatgttgggttaagtcccgcaacgagcgcaacccttatcctttgttgccagcgattcggtcgggaactcaaaggagactgccagtgataaactggaggaaggtggggatgacgtcaagtcatcatggcccttacgagtagggctacacacgtgctacaatggcatatacaaagagaagcgacctcgcgagagcaagcggacctcataaagtatgtcgtagtccggattggagtctgcaactcgactccatgaagtcggaatcgctagtaatcgtggatcagaatgccacggtgaatacgttcccgggccttgtacacaccgcccgtcacaccatgggagtgggttgcaaaagaagtaggtagcttaaccttcgggag

SEQ ID NO: 792 - DNA, 1390 bp, Enterobacter sp.
  247BMC
gcacagagagcttgctctcgggtgacgagtggcggacgggtgagtaatgtctgggaaactgcctgatggagggggataactactggaaacggtagctaataccgcataacgtcgcaagaccaaagagggggaccttcgggcctcttgccatcagatgtgcccagatgggattagctagtaggtggggtaacggctcacctaggcgacgatccctagctggtctgagaggatgaccagccacactggaactgagacacggtccagactcctacgggaggcagcagtggggaatattgcacaatgggcgcaagcctgatgcagccatgccgcgtgtatgaagaaggccttcgggttgtaaagtactttcagcggggaggaaggcgataaggttaataaccttgtccattgacgttacccgcagaagaagcaccggctaactccgtgccagcagccgcggtaatacggagggtgcaagcgttaatcggaattactgggcgtaaagcgcacgcaggcggtctgtcaagtcggatgtgaaatccccgggctcaacctgggaactgcattcgaaactggcaggctggagtcttgtagaggggggtagaattccaggtgtagcggtgaaatgcgtagagatctggaggaataccggtggcgaaggcggccccctggacaaagactgacgctcaggtgcgaaagcgtggggagcaaacaggattagataccctggtagtccacgctgtaaacgatgtcgacttggaggttgttcccttgaggagtggcttccggagctaacgcgttaagtcgaccgcctggggagtacggccgcaaggttaaaactcaaatgaattgacgggggcccgcacaagcggtggagcatgtggtttaattcgatgcaacgcgaagaaccttacctactcttgacatccagagaacttagcagagatgctttggtgccttcgggaactctgatacagtgtgaaatcgccgggctccagctcgtgttgtgaaatgttgggttaagtcccgcaacgagcgcaacccttatcctttgttgccagcggtccggccgggaactcaaaggagactgccagtgataaactggaggaaggtggggatgacgtcaagtcatcatggcccttacgagtagggctacacacgtgctacaatggcatatacaaagagaagcgacctcgcgagagcaagcggacctcataaagtatgtcgtagtccggattggagtctgcaactcgactccatgaagtcggaatcgctagtaatcgtggatcagaatgccacggtgaatacgttcccgggccttgtacacaccgcccgtcacaccatgggagtgggttgcaaaagaagtaggtagcttaaccttcgggagggcgct

SEQ ID NO: 793 - DNA, 1532 bp, Enterobacter sp.
  638
agagtttgatcatggctcagattgaacgctggcggcaggcctaacacatgcaagtcgagcggtagcacagggagcttgctcctgggtgacgagcggcggacgggtgagtaatgtctgggaaactgcctgatggagggggataactactggaaacggtagctaataccgcataacgtcgcaagaccaaagagggggaccttcgggcctcttgccatcagatgtgcccagatgggattagctagtaggtggggtaatggctcacctaggcgacgatccctagctggtctgagaggatgaccagccacactggaactgagacacggtccagactcctacgggaggcagcagtggggaatattgcacaatgggcgcaagcctgatgcagccatgccgcgtgtatgaagaaggccttcgggttgtaaagtactttcagcgaggaggaaggcattgtggttaataaccacagtgattgacgttactcgcagaagaagcaccggctaactccgtgccagcagccgcggtaatacggagggtgcaagcgttaatcggaattactgggcgtaaagcgcacgcaggcggtctgtcaagtcggatgtgaaatccccgggctcaacctgggaactgcattcgaaactggcaggctagagtcttgtagaggggggtagaattccaggtgtagcggtgaaatgcgtagagatctggaggaataccggtggcgaaggcggccccctggacaaagactgacgctcaggtgcgaaagcgtggggagcaaacaggattagataccctggtagtccacgccgtaaacgatgtcgacttggaggttgttcccttgaggagtggcttccggagctaacgcgttaagtcgaccgcctggggagtacggccgcaaggttaaaactcaaatgaattgacgggggcccgcacaagcggtggagcatgtggtttaattcgatgcaacgcgaagaaccttacctactcttgacatccagagaacttagcagagatgctttggtgccttcgggaactctgagacaggtgctgcatggctgtcgtcagctcgtgttgtgaaatgttgggttaagtcccgcaacgagcgcaacccttatcctttgttgccagcggttcggccgggaactcaaaggagactgccagtgataaactggaggaaggtggggatgacgtcaagtcatcatggcccttacgagtagggctacacacgtgctacaatggcatatacaaagagaagcgacctcgcgagagcaagcggacctcacaaagtatgtcgtagtccggatcggagtctgcaactcgactccgtgaagtcggaatcgctagtaatcgtagatcagaatgctacggtgaatacgttcccgggccttgtacacaccgcccgtcacaccatgggagtgggttgcaaaagaagtaggtagcttaaccttcgggagggcgcttaccactttgtgattcatgactggggtgaagtcgtaacaaggtaaccgtaggggaacctgcggttggatcacctcctt

SEQ ID NO: 794 - DNA, 943 bp, Enterobacter sp.
  JC163
  modified_base (88)..(88): a, c, t, g, unknown or other
  modified_base (126)..(126): a, c, t, g, unknown or other
  modified_base (129)..(129): a, c, t, g, unknown or other
  modified_base (148)..(148): a, c, t, g, unknown or other
  modified_base (233)..(233): a, c, t, g, unknown or other
  modified_base (475)..(476): a, c, t, g, unknown or other
  modified_base (489)..(490): a, c, t, g, unknown or other
  modified_base (494)..(494): a, c, t, g, unknown or other
  modified_base (497)..(498): a, c, t, g, unknown or other
  modified_base (507)..(508): a, c, t, g, unknown or other
  modified_base (511)..(511): a, c, t, g, unknown or other
  modified_base (527)..(527): a, c, t, g, unknown or other
  modified_base (624)..(624): a, c, t, g, unknown or other
  modified_base (628)..(628): a, c, t, g, unknown or other
  modified_base (781)..(781): a, c, t, g, unknown or other
  modified_base (927)..(927): a, c, t, g, unknown or other
ccgtgccagcagccgcggtaatacggagggtgcaagcgttaatcggaattactgggcgtaaagcgcacgcaggcggtctgtcaagtcngatgtgaaatccccgggctcaacctgggaactgcattnganactggcaggctggagtctngtagaggggggtagaattccaggtgtagcggtgaaatgcgtagagatctggaggaataccggtggcgaaggcggccccctggacnaagactgacgctcaggtgcgaaagcgtggggagcaaacaggattagataccctggtagtccacgctgtaaacgatgtcgacttggaggttgttcccttgaggagtggcttccggagctaacgcgttaagtcgaccgcctggggagtacggccgcaaggttaaaactcaaatgaattgacgggggcccgcacaagcggtggagcatgtggtttaattcgatgcaacgcgaagaaccttacctnntcttgacatccanngaanttnncagagatgnnttngtgccttcgggaactntgagacaggtgctgcatggctgtcgtcagctcgtgttgtgaaatgttgggttaagtcccgcaacgagcgcaacccttatcctttgttgccagcgrtncggncgggaactcaaaggagactgccagtgataaactggaggaaggtggggatgacgtcaagtcatcatggcccttacgasyagggctacacacgtgctacaatggcryatacaaagagaagcgacctcgcgagagcaagcggacctcataaagtrngtcgtagtccggattggagtctgcaactcgactccatgaagtcggaatcgctagtaatcgtggatcagaatgccacggtgaatacgttcccgggccttgtacacaccgcccgtcacaccatgggagtgggttgcaaaagaagtagntagcttaaccttcggg

SEQ ID NO: 795 - DNA, 920 bp, Enterobacter sp.
  SCSS
  modified_base (59)..(60): a, c, t, g, unknown or other
  modified_base (100)..(102): a, c, t, g, unknown or other
  modified_base (107)..(110): a, c, t, g, unknown or other
  modified_base (124)..(124): a, c, t, g, unknown or other
  modified_base (153)..(153): a, c, t, g, unknown or other
  modified_base (179)..(179): a, c, t, g, unknown or other
  modified_base (216)..(216): a, c, t, g, unknown or other
  modified_base (282)..(282): a, c, t, g, unknown or other
  modified_base (295)..(295): a, c, t, g, unknown or other
  modified_base (300)..(300): a, c, t, g, unknown or other
  modified_base (309)..(309): a, c, t, g, unknown or other
  modified_base (314)..(314): a, c, t, g, unknown or other
  modified_base (319)..(319): a, c, t, g, unknown or other
  modified_base (910)..(911): a, c, t, g, unknown or other
aatacggagggtgcaagcgttaatcggaattactgggcgtaaagcgcacgcaggcggtnngtcaagtcagatgtgaaatccccgggctcaacctgggaannngcatnnnnaactggtcaggctngagtctcgtagaggggggtagaattccangtgtagcggtgaaatgcgtagagatntggaggaataccggtggcgaaggcggccccctggacnaagactgacgctcaggtgcgaaagcgtggggagcaaacaggattagataccctggtagtccacgcngtaaacgatgtcnatttngaggttgtnccctngaggngtggcttccggagctaacgcgttaaatagaccgcctggggagtacggccgcaaggttaaaactcaaatgaattgacgggggcccgcacaagcggtggagcatgtggtttaattcgatgcaacgcgaagaaccttacctggtcttgacatccacagaacttggcagagatgcttgggtgccttcgggaactgtgagacaggtgctgcatggctgtcgtcagctcgtgttgtgaaatgttgggttaagtcccgcaacgagcgcaacccttatcctttgttgccagcggttcggccgggaactcaaaggagactgccagtgataaaccggaggaaggtggggatgacgtcaagtcatcatggcccttacgactagggctacacacgtgctacaatggcgtatacaaagagaagcgacctcgcgagagcaagcggacctcataaagtatgtcgtagtccggattggagtctgcaactcgactccatgaagtcggaatcgctagtaatcgtagatcagaatgccacggtgaatacgttcccgggccttgtacacaccgcccgtcacaccatgggagtgggttgcaaaagaagtagnntagcttaac

SEQ ID NO: 796 - DNA, 1377 bp, Enterobacter sp.
  TSE38
  modified_base (1357)..(1363): a, c, t, g, unknown or other
gcacagagagcttgctctcgggtgacgagtggcggacgggtgagtaatgtctgggaaactgcctgatggagggggataactactggaaacggtagctaataccgcataacgtcgcaagaccaaagagggggaccttcgggcctcttgccatcagatgtgcccagatgggattagctagtaggtggggtaatggctcacctaggcgacgatccctagctggtctgagaggatgaccagccacactggaactgagacacggtccagactcctacgggaggcagcagtggggaatattgcacaatgggcgcaagcctgatgcagccatgccgcgtgtatgaagaaggccttcgggttgtaaagtactttcagcggggaggaaggtgttgtggttaataaccacagcaattgacgttacccgcagaagaagcaccggctaactccgtgccagcagccgcggtaatacggagggtgcaagcgttaatcggaattactgggcgtaaagcgcacgcaggcggtctgtcaagtcggatgtgaaatccccgggctcaacctgggaactgcattcgaaactggcaggctagagtcttgtagaggggggtagaattccaggtgtagcggtgaaatgcgtagagatctggaggaataccggtggcgaaggcggccccctggacaaagactgacgctcaggtgcgaaagcgtggggagcaaacaggattagataccctggtagtccacgccgtaaacgatgtcgacttggaggttgtgcccttgaggcgtggcttccggagctaacgcgttaagtcgaccgcctggggagtacggccgcaaggttaaaactcaaatgaattgacgggggcccgcacaagcggtggagcatgtggtttaattcgatgcaacgcgaagaaccttacctactcttgactccagagaacttcagaatgattgggccttcgggaactctgagacaggtgctgcatggctgtcgtcagctcgtgttgtgaaatgttgggttaagtcccgcaacgagcgcaacccttatcctttgttgccagcggtccggccgggaactcaaaggagactgccagtgataaactggaggaaggtggggatgacgtcaagtcatcatggcccttacgagtagggctacacacgtgctacaatggcgcatacaaagagaagcgaactcgcgagagcaagcggacctcataaagtgcgtcgtagtccggattggagtctgcaactcgactccatgaagtcggaatcgctagtaatcgtagatcagaatgctacggtgaatacgttcccgggccttgtacacaccgcccgtcacaccatgggagtgggttgcaaaagaagnnnnnnncttaaccttcggga

SEQ ID NO: 797 - DNA, 1546 bp, Enterobacteriaceae bacterium 9_2_54FAA
tttaattgaagagtttgatcatggctcagattgaacgctggcggcaggcctaacacatgcaagtcgagcggtagcacaagagagcttgctctctgggtgacgagcggcggacgggtgagtaatgtctgggaaactgcctgatggagggggataactactggaaacggtagctaataccgcatgacgtcttcggaccaaagtgggggaccttcgggcctcacgccatcagatgtgcccagatgggattagctagtaggtggggtaatggctcacctaggcgacgatctctagctggtctgagaggatgaccagccacactggaactgagacacggtccagactcctacgggaggcagcagtggggaatattgcacaatgggcgcaagcctgatgcagccatgccgcgtgtatgaagaaggccttcgggttgtaaagtactttcagcgaggaggaaggcattaaggttaataaccttggtgattgacgttactcgcagaagaagcaccggctaactccgtgccagcagccgcggtaatacggagggtgcaagcgttaatcggaattactgggcgtaaagcgcacgcaggcggttgattaagtcagatgtgaaatccccgagcttaacttgggaactgcatttgaaactggtcagctagagtcttgtagaggggggtagaattccaggtgtagcggtgaaatgcgtagagatctggaggaataccggtggcgaaggcggccccctggacaaagactgacgctcaggtgcgaaagcgtggggagcaaacaggattagataccctggtagtccacgctgtaaacgatgtcgacttggaggttgtgcccttgaggcgtggcttccggagctaacgcgttaagtcgaccgcctggggagtacggccgcaaggttaaaactcaaatgaattgacgggggcccgcacaagcggtggagcatgtggtttaattcgatgcaacgcgaagaaccttacctactcttgacatccagagaatttgctagagatagcttagtgccttcgggaactctgagacaggtgctgcatggctgtcgtcagctcgtgttgtgaaatgttgggttaagtcccgcaacgagcgcaacccttatcctttgttgccagcgaataatgtcgggaactcaaaggagactgccggtgataaaccggaggaaggtggggatgacgtcaagtcatcatggcccttacgagtagggctacacacgtgctacaatggcatatacaaagagaagcgaactcgcgagagcaagcggacctcataaagtatgtcgtagtccggattggagtctgcaactcgactccatgaagtcggaatcgctagtaatcgtagatcagaatgctacggtgaatacgttcccgggccttgtacacaccgcccgtcacaccatgggagtgggttgcaaaagaagtaggtagcttaaccttcgggagggcgcttaccactttgtgattcatgactggggtgaagtcgtaacaaggtaaccgtaggggaacctgcggttggatcacctccttac

SEQ ID NO: 798 - DNA, 1314 bp, Enterobacteriaceae bacterium CF01Ent-1
tggctcagattgaacgctggcggcaggcctaacacatgcaagtcgagcgagcggcggacgggtgagtaatgtctgggaaactgcccgatggagggggataactactggaaacggtagctaataccgcataaccaaagttgccatcggatgtgcccagatgggattagctagtaggtggggtaatggctcacctaggcgacgatccctagctggtctgagaggatgaccagccacactggaactgagacacggtccagactcctacgggaggcagcagtggggaatattgcacaatgggcgcaagcctgatgcagccatgccgcgtgtatgaagaaggccttcgggttgtaaagtactttcagcgaggaggatgacgttactcgcagaagaagcaccggctaactccgtgccagcagccgcggtaatacggagggtgcaagcgttaatcggaattactgggcgtaaagcgcacgcaggcggtctgtcaagtcggatgtgaaatccccgggctcaacctgggaactgcattcgaaactggcaggctagagtcttgtagaggggggtagaattccaggtgtagcggtgaaatgcgtagagatctggaggaataccggtggcgaaggcggccccctggacaaactgacgctcaggtgcgaaagcgtggggagcaaacaggattagataccctggtagtccacgccgtaaacgatgtcgacttggaggttgtgcgtggcttccggagctaacgcgttaagtcgaccgcctggggagtacggycgcaaggttaaaactcaaatgaattgacgggggcccgcacaagcggtggagcatgtggtttaattcgatgcaacgcgaagaaccttacctactcttgacatcgacaggtgctgcatggctgtcgtcagctcgtgttgtgaaatgttgggttaagtcccgcaacgagcgcaacccttatcctttgttgccagcggccgggaactcaaaggagactgccagtgataaactggaggaaggtggggatgacgtcaagtcatcatggcccttacgagtagggctacacacgtgctacaatggcgcacaaagagaagcgacctcgcgagagcaagcggacctcattgcgtcgtagtccggatggagtctgcaactcgactccagaagtcggaatcgctagtaatcgtagatcagaatgctacggtgaatacgttcccgggccttgtacacaccgcccgtcacaccatgggagtgggttgcaaaagaagtaggtgcttagggcgcttaccactttgtgattcatgactggggtgaagtcgtaac

SEQ ID NO: 799 - DNA, 1485 bp, Enterobacteriaceae bacterium Smarlab 3302238
tagagtttgatcctggctcagattgaacgctggcggcaggcctaacacatgcaagtcgaacggcagcacagaagagcttgctctttgggtggcgagtggcggacgggtgagtaatgtctgggaaactgcccgatggagggggataactactggaaacggtagctaataccgcataacgtcgcgagaccaaagtgggggaccttcgggcctcacaccatcggatgtgcccagatgggattagctagtaggtggggtaacggctcacctaggcgacgatccctagctggtctgagaggatgaccagccacactggaactgagacacggtccagactcctacgggaggcagcagtggggaatattgcacaatgggcgcaagcctgatgcagccatgccgcgtgtatgaagaaggccttcgggttgtaaagtactttcagcggggaggaaggcgatgtggttaataaccgcgtcgattgacgttacccgcagaagaagcaccggctaactccgtgccagcagccgcggtaatacggagggtgcaagcgttaatcggaattactgggcgtaaagcgcacgcaggcggtctgtcaagtcggatgtgaaatccccgggcttaacctgggaactgcattcgaaactggcaggctagagtcttgtagaggggggtagaattccaggtgtagcggtgaaatgcgtagagatctggaggaataccggtggcgaaggcggccccctggacaaagactgacgctcaggtgcgaaagcgtggggagcaaacaggattagataccctggtagtccacgccgtaaacgatgtcgacttggaggctgttcccctgaggagtggcttccggagctaacgcgttaagtcgaccgcctggggagtacggccgcaaggttaaaactcaaatgaattgacgggggcccgcacaagcggtggagcatgtggtttaattcgatgcaacgcgaagaaccttacctactcttgacatccacggaatttggcagagatgccttagtgccttcgggaaccgtgagacaggtgctgcatggctgtcgtcagctcgtgttgtgaaatgttgggttaagtcccgcaacgagcgcaacccttatcctttgttgccagcgattcggtcgggaactcaaaggagactgccggtgataaaccggaggaaggtggggatgacgtcaagtcatcatggcccttacgagtagggctacacacgtgctacaatggcgcatacaaagagaagcgacctcgcgagagcaagcggacctcataaagtgcgtcgtagtccggatcggagtctgcaactcgactccgtgaagtcggaatcgctagtaatcgtggatcagaatgccacggtgaatacgttcccgggccttgtacacaccgcccgtcacaccatgggagtgggttgcaaaagaagtaggtagcttaaccttcgggagggcgcttaccactttgtgattcatgactggggtg

SEQ ID NO: 800 - DNA, 1403 bp, Enterococcus avium
tttctttcaccggagcttgctccaccgaaagaaaaggagtggcgaacgggtgagtaacacgtgggtaacctgcccatcagaaggggataacacttggaaacaggtgctaataccgtataacaatcgaaaccgcatggtttcggtttgaaaggcgcttttgcgtcactgatggatggacccgcggtgcattagctagttggtgaggtaacggctcaccaaggcaacgatgcatagccgacctgagagggtgatcggccacattgggactgagacacggcccaaactcctacgggaggcagcagtagggaatcttcggcaatggacgcaagtctgaccgagcaacgccgcgtgagtgaagaaggttttcggatcgtaaaactctgttgttagagaagaacaaggatgagagtagaatgttcatcccttgacggtatctaaccagaaagccacggctaactacgtgccagcagccgcggtaatacgtaggtggcaagcgttgtccggatttattgggcgtaaagcgagcgcaggcggtttcttaagtctgatgtgaaagcccccggctcaaccggggagggtcattggaaactgggaaacttgagtgcagaagaggagagtggaattccatgtgtagcggtgaaatgcgtagatatatggaggaacaccagtggcgaaggcggctctctggtctgtaactgacgctgaggctcgaaagcgtggggagcaaacaggattagataccctggtagtccacgccgtaaacgatgagtgctaagtgttggagggtttccgcccttcagtgctgcagctaacgcattaagcactccgcctggggagtacgaccgcaggttgaaactcaaaggaattgacgggggcccgcacaagcggtggacatgtggtttaattcgaagcaacgcgaagaaccttaccaggtcttgacatcctttgaccactctagagatagagcttccccttcgggggcaaagtgacaggtggtgcatggttgtcgtcagctcgtgtcgtgagatgttgggttaagtcccgcaacgagcgcaacccttattgttagttgccatcatttagttgggcactctagcgagactgccggtgacaaaccggaggaaggtggggatgacgtcaaatcatcatgccccttatgacctgggctacacacgtgctacaatgggaagtacaacgagtcgcgaagtcgcgaggctaagctaatctcttaaagcttctctcagttcggattgtaggctgcaactcgcctacatgaagccggaatcgctagtaatcgcggatcagcacgccgcggtgaatacgttcccgggccttgtacacaccgcccgtcacaccacgagagtttgtaacacccgaagtcggtgaggtaaccttttggagcc

SEQ ID NO: 801 - DNA, 1483 bp, Enterococcus caccae
gacgaacgctggcggcgtgcctaatacatgcaagtcgaacgcttcttttctaccgagtgcttgcactcatttgaaaagaggagtggcggacgggtgagtaacacgtgggtaacctacccatcagagggggataacacttggaaacaggtgctaataccgcataatagtcgacaccgcatggtgttgatttgaaagacgctttcgggtgtcactgatggatggacccgcggtgcattagctagttggtgaggtaacggctcaccaaggccatgatgcatagccgacctgagagggtgatcggccacactgggactgagacacggcccagactcctacgggaggcagcagtagggaatcttcggcaatggacgaaagtctgaccgagcaacgccgcgtgagtgaagaaggttttcggatcgtaaaactctgttgttagagaagaacaagtaggagagtaactgctcttaccttgacggtatctaaccagaaagccacggctaactacgtgccagcagccgcggtaatacgtaggtggcaagcgttgtccggatttattgggcgtaaagcgagcgcaggcggtttcttaagtctgatgtgaaagcccccggctcaaccggggagggtcattggaaactgggagacttgagtgcagaagaggagagtggaattccatgtgtagcggtgaaatgcgtagatatatggaggaacaccagtggcgaaggcgactctctggtctgtaactgacgctgaggctcgaaagcgtggggagcaaacaggattagataccctggtagtccacgccgtaaacgatgagtgctaagtgttggagggtttccgcccttcagtgctgcagctaacgcattaagcactccgcctggggagtacgaccgcaaggttgaaactcaaaggaattgacgggggcccgcacaagcggtggagcatgtggtttaattcgaagcaacgcgaagaaccttaccaggtcttgacatcctttgaccactcgagagatcgagctttcccttcggggacaaagtgacaggtggtgcatggttgtcgtcagctcgtgtcgtgagatgttgggttaagtcccgcaacgagcgcaacccttattgttagttgccatcattcagttgggcactctagcgagactgccggtgacaaaccggaggaaggtggggatgacgtcaaatcatcatgccccttatgacctgggctacacacgtgctacaatgggaagtacaacgagtcgctaggccgcgaggtcatgcaaatctcttaaagcttctctcagttcggattgtaggctgcaactcgcctacatgaagccggaatcgctagtaatcgcggatcagcacgccgcggtgaatacgttcccgggccttgtacacaccgcccgtcacaccacgaaagtttgtaacacccgaagtcggtgaggtaacccttgtggagccagccgcctaaggtgggatagatgattggggtg

SEQ ID NO: 802 - DNA, 1559 bp, Enterococcus casseliflavus
tatgagagtttgatcctggctcaggacgaacgctggcggcgtgcctaatacatgcaagtcgaacgctttttctttcaccggagcttgctccaccgaaagaaaaagagtggcgaacgggtgagtaacacgtgggtaacctgcccatcagaaggggataacacttggaaacaggtgctaataccgtataacactattttccgcatggaagaaagttgaaaggcgcttttgcgtcactgatggatggacccgcggtgcattagctagttggtgaggtaacggctcaccaaggcaacgatgcatagccgacctgagagggtgatcggccacactgggactgagacacggcccagactcctacgggaggcagcagtagggaatcttcggcaatggacgaaagtctgaccgagcaacgccgcgtgagtgaagaaggttttcggatcgtaaaactctgttgttagagaagaacaaggatgagagtaaaacgttcatcccttgacggtatctaaccagaaagccacggctaactacgtgccagcagccgcggtaatacgtaggtggcaagcgttgtccggatttattgggcgtaaagcgagcgcaggcggtttcttaagtctgatgtgaaagcccccggctcaaccggggagggtcattggaaactgggagacttgagtgcagaagaggagagtggaattccatgtgtagcggtgaaatgcgtagatatatggaggaacaccagtggcgaaggcggctctctggtctgtaactgacgctgaggctcgaaagcgtggggagcgaacaggattagataccctggtagtccacgccgtaaacgatgagtgctaagtgttggagggtttccgcccttcagtgctgcagcaaacgcattaagcactccgcctggggagtacgaccgcaaggttgaaactcaaaggaattgacgggggcccgcacaagcggtggagcatgtggtttaattcgaagcaacgcgaagaaccttaccaggtcttgacatcctttgaccactctagagatagagcttccccttcgggggcaaagtgacaggtggtgcatggttgtcgtcagctcgtgtcgtgagatgttgggttaagtcccgcaacgagcgcaacccttattgttagttgccatcatttagttgggcactctagcgagactgccggtgacaaaccggaggaaggtggggatgacgtcaaatcatcatgccccttatgacctgggctacacacgtgctacaatgggaagtacaacgagttgcgaagtcgcgaggctaagctaatctcttaaagcttctctcagttcggattgtaggctgcaactcgcctacatgaagccggaatcgctagtaatcgcggatcagcacgccgcggtgaatacgttcccgggccttgtacacaccgcccgtcacaccacgagagtttgtaacacccgaagtcggtgaggtaacctttttggagccagccgcctaaggtgggatagatgattggggtgaagtcgtaacaaggtagccgtatcggaaggtgcggctggatcacctcctttct

SEQ ID NO: 803 - DNA, 1397 bp, Enterococcus durans
tcgtacgcttctttttccaccggagcttgctccaccggaaaaagaagagtggcgaacgggtgagtaacacgtgggtaacctgcccatcagaaggggataacacttggaaacaggtgctaataccgtataacaatcgaaaccgcatggttttgatttgaaaggcgctttcgggtgtcgctgatggatggacccgcggtgcattagctagttggtgaggtaacggctcaccaaggccacgatgcatagccgacctgagagggtgatcggccacattgggactgagacacggcccaaactcctacgggaggcagcagtagggaatcttcggcaatggacgaaagtctgaccgagcaacgccgcgtgagtgaagaaggttttcggatcgtaaaactctgttgttagagaagaacaaggatgagagtaactgttcatcccttgacggtatctaaccagaaagccacggctaactacgtgccagcagccgcggtaatacgtaggtggcaagcgttgtccggatttattgggcgtaaagcgagcgcaggcggtttcttaagtctgatgtgaaagcccccggctcaaccggggagggtcattggaaactgggagacttgagtgcagaagaggagagtggaattccatgtgtagcggtgaaatgcgtagatatatggaggaacaccagtggcgaaggcggctctctggtctgtaactgacgctgagctcgaaagcgtggggagcaaacaggattagataccctggtagtccacgccgtaaacgatgagtgctaagtgttggagggtttccgcccttcagtgctgcagctaacgcattaagcactccgcctggggagtacgaccgcaaggttgaaactcaaaggaattgacgggggcccgcacaagcggtggatcatgtggtttaattcgaagcaacgcgaagaaacttaccaggtcttgacatcctttgaccactctagagatagagcttccccttcgggggcaaagtgacaggtggtgcatggttgtcgtcagctcgtgtcgtgagatgttgggttaagtcccgcaacgagcgcaacccttattgttagttgccatcattcagttgggcactctagcaagactgccggtgacaaaccggaggaaggtggggatgacgtcaaatcatcatgccccttatgacctgggctacacacgtgctacaatgggaagtacaacgagtcgcgaagtcgcgaggctaagctaatctcttaaagcttctctcagttcggattgtaggctgcaactcgcctacatgaagccggaatcgctagtaatcgcggatcagcacgccgcggtgaatacgttcccgggccttgtacacaccgcccgtcacaccacgagagtttgtaacacccgaagtcggtg

SEQ ID NO: 804 - DNA, 1421 bp, Enterococcus faecalis
  modified_base (1411)..(1411): a, c, t, g, unknown or other
gtcgaacgcttctttcctcccgagtgcttgcactcaattggaaagaggagtggcggacgggtgagtaacacgtgggtaacctacccatcagagggggataacacttggaaacaggtgctaataccgcataacagtttatgccgcatggcataagagtgaaaggcgctttcgggtgtcgctgatggatggacccgcggtgcattagctagttggtgaggtaacggctcaccaaggccacgatgcatagccgacctgagagggtgatcggccacactgggactgagacacggcccagactcctacgggaggcagcagtagggaatcttcggcaatggacgaaagtctgaccgagcaacgccgcgtgagtgaagaaggttttcggatcgtaaaactctgttgttagagaagaacaaggacgttagtaactgaacgtcccctgacggtatctaaccagaaagccacggctaactacgtgccagcagccgcggtaatacgtaggtggcaagcgttgtccggatttattgggcgtaaagcgagcgcaggcggtttcttaagtctgatgtgaaagcccccggctcaaccggggagggtcattggaaactgggagacttgagtgcagaagaggagagtggaattccatgtgtagcggtgaaatgcgtagatatatggaggaacaccagtggcgaaggcggctctctggtctgtaactgacgctgagctcgaaagcgtggggagcaaacaggattagataccctggtagtccacgccgtaaacgatgagtgctaagtgttggagggtttccgcccttcagtgctgcagcaaacgcattaagcactccgcctggggagtacgaccgcaaggttgaaactcaaaggaattgacgggggcccgcacaagcggtggagcatgtggcttcagtcgcagtaatacgaagaaccttaccaggtcttgacatcctttgaccactctagagatagagctttcccttcggggacaaagtgacaggtggtgcatggttgtcgtcagctcgtgtcgtgagatgttgggttaagtcccgcaacgagcgcaacccttattgttagttgccatcatttagttgggcactctagcgagactgccggtgacaaaccggaggaaggtggggatgacgtcaaatcatcatgccccttatgacctgggctacacacgtgctacaatgggaagtacaacgagtcgctagaccgcgaggtcatgcaaatctcttaaagcttctctcagttcggattgcaggctgcaactcgcctgcatgaagccggaatcgctagtaatcgcggatcagcacgccgcggtgaatacgttcccgggccttgtacacaccgcccgtcacaccacgagagtttgtaacacccgaagtcggtgaggtaaccttttnggagccagcc

SEQ ID NO: 805 - DNA, 1422 bp, Enterococcus faecium
  modified_base (1411)..(1411): a, c, t, g, unknown or other
tcgtacgcttctttttccaccggagcttgctccaccggaaaaagaggagtggcgaacgggtgagtaacacgtgggtaacctgcccatcagaaggggataacacttggaaacaggtgctaataccgtataacaatcgaaaccgcatggttttgatttgaaaggcgctttcgggtgtcgctgatggatggacccgcggtgcattagctagttggtgaggtaacggctcaccaaggccacgatgcatagccgacctgagagggtgatcggccacattgggactgagacacggcccaaactcctacgggaggcagcagtagggaatcttcggcaatggacgaaagtctgaccgagcaacgccgcgtgagtgaagaaggttttcggatcgtaaaactctgttgttagagaagaacaaggatgagagtaactgttcatcccttgacggtatctaaccagaaagccacggctaactacgtgccagcagccgcggtaatacgtaggtggcaagcgttgtccggatttattgggcgtaaagcgagcgcaggcggtttcttaagtctgatgtgaaagcccccggctcaaccggggagggtcattggaaactgggagacttgagtgcagaagaggagagtggaattccatgtgtagcggtgaaatgcgtagatatatggaggaacaccagtggcgaaggcggctctctggtctgtaactgacgctgaggctcgaaagcgtggggagcaaacaggattagataccctggtagtccacgccgtaaacgatgagtgctaagtgttggagggtttccgcccttcagtgctgcagctaacgcattaagcactccgcctggggagtacgaccgcaaggttgaaactcaaaggaattgacgggggcccgcacaagcggtggagcatgtggtttaattcgaagcaacgcgaagaaccttaccaggtcttgacatcctttgaccactctagagatagagcttccccttcgggggcaaagtgacaggtggtgcatggttgtcgtcagctcgtgtcgtgagatgttgggttaagtcccgcaacgagcgcaacccttattgttagttgccatcattcagttgggcactctagcaagactgccggtgacaaaccggaggaaggtggggatgacgtcaaatcatcatgccccttatgacctgggctacacacgtgctacaatgggaagtacaacgagttgcgaagtcgcgaggctaagctaatctcttaaagcttctctcagttcggattgcaggctgcaactcgcctgcatgaagccggaatcgctagtaatcgcggatcagcacgccgcggtgaatacgttcccgggccttgtacacaccgcccgtcacaccacgagagtttgtaacacccgaagtcggtgaggtaaccttttnggagccagccg

SEQ ID NO: 806 - DNA, 1254 bp, Enterococcus gallinarum
agtggcgaacgggtgagtaacacgtgggtaacctgcccatcagaaggggataacacttggaaacaggtgctaataccgtataacgaaagtcactgatggatggacccgcggtgcattagctagttggtgaggtaacggctcaccaaggccacgatgcatagccgacctgagagggtgatcggccacactgggactgagacacggcccagactcctacgggaggcagcagtagggaatcttcggcaatggacgaaagtctgaccgagcaacgccgcgtgagtgaagaaggttttcggatcgtaaaactctgttgttagagaagatgacggtatctaaccagaaagccacggctaactacgtgccagcagccgcggtaatacgtaggtggcaagcgttgtccggatttattgggcgtaaagcgagcgcaggcggtttcttaagtctgatgtgaaagcccccggctcaaccggggagggtcattggaaactgggagacttgagtgcagaagaggagagtggaattccatgtgtagcggtgaaatgcgtagatatatggaggaacaccagtggcgaaggcggctctctggtctgactgacgctgaggctcgaaagcgtggggagcgaacaggattagataccctggtagtccacgccgtaaacgatgagtgctaagtgttggagcttcagtgctgcagcaaacgcattaagcactccgcctggggagtacgaccgcaaggttgaaactcaaaggaattgacgggggcccgcacaagcggtggagcatgtggtttaattcgaagcaacgcgaagaaccttaccaggtcttgacatcgacaggtggtgcatggttgtcgtcagctcgtgtcgtgagatgttgggttaagtcccgcaacgagcgcaacccttattgttagttgccatcatgggcactctagcgagactgccggtgacaaaccggaggaaggtggggatgacgtcaaatcatcatgccccttatgacctgggctacacacgtgctacaatgggaagcaacgagttgcgaagtcgcgaggctaagctaatctcttcttctctcagttcggatgtaggctgcaactcgcctacagaagccggaatcgctagtaatcgcggatcagcacgccgcggtgaatacgttcccgggccttgtacacaccgcccgtcacaccacgagagtttgtaacacccgaagtcggtaggtagccagccgcctaaggtgggatagatgattggggtg

SEQ ID NO: 807 - DNA, 1295 bp, Enterococcus gilvus
acgctttttctttcaccggagcttgctccaccgaaagaaaaggagtggcgaacgggtgagtaacacgtgggtaacctgcccatcagaaggggataacacttggaaacaggtgctaataccgtataacaatagaaaccgcatggtttctatttgaaaggcgcttttgcgtcactgatggatggacccgcggtgcattagctagttggtgaggtaacggctcaccaaggcaacgatgcatagccgacctgagagggtgatcggccacattgggactgagacacggcccaaactcctacgggaggcagcagtagggaatcttcggcaatggacgaaagtctgaccgagcaacgccgcgtgagtgaagaaggttttcggatcgtaaaactctgttgttagagaagaacaaggatgagagtaaaatgttcatcccttgacggtatctgaccagaaagccacggctaactacgtgccagcagccgcggtaatacgtaggtggcaagcgttgtccggatttattgggcgtaaagcgagcgcaggcggtttcttaagtctgatgtgaaagcccccggctcaaccggggagggtcattggaaactgggaaacttgagtgcagaagaggagagtggaattccatgtgtagcggtgaaatgcgtagatatatggaggaacaccagtggcgaaggcggctctctggtctgtaactgacgctgaggctcgaaagcgtggggagcaaacaggattagataccctggtagtccacgccgtaaacgatgagtgctaagtgttggagggtttccgcccttcagtgctgcagctaacgcattaagcactccgcctggggagtacgaccgcaaggttgaaactcaaaggaattgacgggggcccgcacaagcggtggagcatgtggtttaattcgaagcaacgcgaagaaccttaccaggtcttgacatcctttgaccactctagagatagagcttccccttcgggggcaaagtgacaggtggtgcatggttgtcgtcagctcgtgtcgtgagatgttgggttaagtcccgcaacgagcgcaacccttattgttagttgccatcatttagttgggcactctagcgagactgccggtgacaaaccggaggaaggtggggatgacgtcaaatcatcatgccccttatgacctgggctacacacgtgctacaatgggaagtacaacgagtcgcgaagtcgcgaggctaagctaatctcttaaagcttctctcagttcggattgtaggctgcaactcgcctacatgaagccggaatcg

SEQ ID NO: 808 - DNA, 1295 bp, Enterococcus hawaiiensis
gacgaacgctggcggcgtgcctaatacatgcaagtcgaacgagtggcgaacgggtgagtaacacgtgggtaacctgcccatcagaaggggataacacttggaaacaggtgctaataccgtataatgaaagtcactgatggatggacccgcggtgcattagctagttggtgaggtaacggctcaccaaggcaacgatgcatagccgacctgagagggtgatcggccacattgggactgagacacggcccaaactcctacgggaggcagcagtagggaatcttcggcaatggacgaaagtctgaccgagcaacgccgcgtgagtgaagaaggttttcggatcgtaaaactctgttgttagagaagatgacggtatctaaccagaaagccacggctaactacgtgccagcagccgcggtaatacgtaggtggcaagcgttgtccggatttattgggcgtaaagcgagcgcaggcggtttcttaagtctgatgtgaaagcccccggctcaaccggggagggtcattggaaactgggaaacttgagtgcagaagaggagagtggaattccatgtgtagcggtgaaatgcgtagatatatggaggaacaccagtggcgaaggcggctctctggtctgactgacgctgaggctcgaaagcgtggggagcaaacaggattagataccctggtagtccacgccgtaaacgatgagtgctaagtgttggagcttcagtgctgcagctaacgcattaagcactccgcctggggagtacgaccgcaaggttgaaactcaaaggaattgacgggggcccgcacaagcggtggagcatgtggtttaattcgaagcaacgcgaagaaccttaccaggtcttgacatcgacaggtggtgcatggttgtcgtcagctcgtgtcgtgagatgttgggttaagtcccgcaacgagcgcaacccttattgttagttgccatcatgggcactctagcgagactgccggtgacaaaccggaggaaggtggggatgacgtcaaatcatcatgccccttatgacctgggctacacacgtgctacaatgggaagcaacgagtcgcgaagtcgcgaggctaagctaatctcttcttctctcagttcggatgtaggctgcaactcgcctacagaagccggaatcgctagtaatcgcggatcagcacgccgcggtgaatacgttcccgggccttgtacacaccgcccgtcacaccacgagagtttgtaacacccgaagtcggtaggtagccagccgcctaaggtgggatagatgattggggtg

SEQ ID NO: 809 - DNA, 1395 bp, Enterococcus hirae
  modified_base (950)..(950): a, c, t, g, unknown or other
gtcgaacgcttctttttccaccggagcttgctccaccggaaaaagaggagtggcgaacgggtgagtaacacgtgggtaacctgcccatcagaaggggataacacttggaaacaggtgctaataccgtataacaatcaaaaccgcatggttttgatttgaaaggcgctttcgggtgtcgctgatggatggacccgcggtgcattagctagttggtgaggtaacggctcaccaaggccacgatgcatagccgacctgagagggtgatcggccacattgggactgagacacggcccaaactcctacgggaggcagcagtagggaatcttcggcaatggacgaaagtctgaccgagcaacgccgcgtgagtgaagaaggttttcggatcgtaaaactctgttgttagagaagaacaaggatgagagtaactgttcatcccttgacggtatctaaccagaaagccacggctaactacgtgccagcagccgcggtaatacgtaggggcacttcggatttattgggcgtaaagcgagcgcaggcggtttcttaagtctgatgtgaaagcccccggctcaaccggggagggtcattggaaactgggagacttgagtgcagaagaggagagtggaattccatgtgtagcggtgaaatgcgtagatatatggaggaacaccagtggcgaaggcggctctctggtctgtaactgacgctgaggctcgaaagcgtggggagcaaacaggattagataccctggtagtccacgccgtaaacgatgagtgctaagtgttggagggtttccgcccttcagtgctgcagctaacgcattaagcactccgcctggggagtacgaccgcaggttgaaactcaaaggaattgacgggggcccgcacaagcggtggaccatgtggtttaattcgaagcaacgcgaagatagttgccaggcgttgtccgcnttttactggtctagagatagagcttccccttcgggggcaaagtgacaggtggtgcatggttgtcgtcagctcgtgtcgtgagatgttgggttaagtcccgcaacgagcgcaacccttattgttagttgccatcattcagttgggcactctagcaagactgccggtgacaaaccggaggaaggtggggatgacgtcaaatcatcatgccccttatgacctgggctacacacgtgctacaatgggaagtacaacgagtcgcgaagtcgcgaggctaagctaatctcttaaagcttctctcagttcggattgcaggctgcaactcgcctgcatgaagccggaatcgctagtaatcgcggatcagcacgccgcggtgaatacgttcccgggccttgtacacaccgcccgtcacaccacgagagtttgtaacacccgaagtcggtgaggt

SEQ ID NO: 810 - DNA, 1559 bp, Enterococcus italicus
ttttatgagagtttgatcctggctcaggacgaacgctggcggcgtgcctaatacatgcaagttgaacgcttctttcttatcgaacttcggttcaccaagaaagaagagtagcgaacgggtgagtaacacgtgggtaacctgcccatcagcgggggataacacttggaaacaggtgctaataccgcataatactttttctctcatgagtgaaagttgaaaggcgcttttgcgtcactgatggatggacccgcggtgcattagctagttggtagggtaacggcctaccaaggcaacgatgcatagccgacctgagagggtgatcggccacactgggactgagacacggcccagactcctacgggaggcagcagtagggaatcttcggcaatggacgaaagtctgaccgagcaacgccgcgtgagtgaagaaggttttcggatcgtaaaactctgttgttagagaagaacaaggatgagaagagaatgttcatcccttgacggtatctaaccagaaagccacggctaactacgtgccagcagccgcggtaatacgtaggtggcaagcgttgtccggatttattgggcgtaaagcgagcgcaggcggttctttaagtctgatgtgaaagcccccggctcaaccggggagggtcattggaaactggggaacttgagtgcagaagaggagagtggaattccatgtgtagcggtgaaatgcgtagatatatggaggaacaccagtggcgaaggcggctctctggtctgtaactgacgctgaggctcgaaagcgtggggagcaaacaggattagataccctggtagtccacgccgtaaacgatgagtgctaagtgttggagggtttccgcccttcagtgctgcagctaacgcattaagcactccgcctggggagtacgaccgcaaggttgaaactcaaaggaattgacgggggcccgcacaagcggtggagcatgtggtttaattcgaagcaacgcgaagaaccttaccaggtcttgacatcctttgaccactctagagatagagctttcccttcggggacaaagtgacaggtggtgcatggttgtcgtcagctcgtgtcgtgagatgttgggttaagtcccgcaacgagcgcaacccttattgttagttgccatcatttagttgggcactctagcgagactgccggtgacaaaccggaggaaggtggggatgacgtcaaatcatcatgccccttatgacctgggctacacacgtgctacaatgggaagtacaacgagttgcgaagtcgcgaggctaagctaatctcttaaagcttctctcagttcggattgtaggctgcaactcgcctacatgaagccggaatcgctagtaatcgcggatcagcacgccgcggtgaatacgttcccgggccttgtacacaccgcccgtcacaccacgagagtttgtaacacccgaagtcggtgaggtaaccttttggagccagccgcctaaggtgggatagatgattggggtgaagtcgtaacaaggtagccgtatcggaaggtgcggctggatcacctcctttct

SEQ ID NO: 811 - DNA, 1529 bp, Enterococcus mundtii
acgaacgctggcggcgtgcctaatacatgcaagtcgaacgcttcttttcccaccggagcttgctccaccgggaaaagaggagtggcgaacgggtgagtaacacgtgggtaacctgcccatcagaaggggataacacttggaaacaggtgctaataccgtataacaatcgaaaccgcatggtttcgttttgaaaggcgctttacggtgccgctgatggatggacccgcggtgcattagctagttggtgaggtaacggctcaccaaggccacgatgcatagccgacctgagagggtgatcggccacattgggactgagacacggcccaaactcctacgggaggcagcagtagggaatcttcggcaatggacgaaagtctgaccgagcaacgccgcgtgagtgaagaaggttttcggatcgtaaaactctgttgttagagaagaacaagggtgagagtaactgttcaccccttgacggtatctaaccagaaagccacggctaactacgtgccagcagccgcggtaatacgtaggtggcaagcgttgtccggatttattgggcgtaaagcgagcgcaggcggtttcttaagtctgatgtgaaagcccccggctcaaccggggagggtcattggaaactgggagacttgagtgcagaagaggagagtggaattccatgtgtagcggtgaaatgcgtagatatatggaggaacaccagtggcgaaggcggctctctggtctgtaactgacgctgaggctcgaaagcgtggggagcaaacaggattagataccctggtagtccacgccgtaaacgatgagtgctaagtgttggagggtttccgcccttcagtgctgcagctaacgcattaagcactccgcctggggagtacgaccgcaaggttgaaactcaaaggaattgacgggggcccgcacaagcggtggagcatgtggtttaattcgaagcaacgcgaagaaccttaccaggtcttgacatcctttgaccactctagagatagagcttccccttcgggggcaaagtgacaggtggtgcatggttgtcgtcagctcgtgtcgtgagatgttgggttaagtcccgcaacgagcgcaacccttattgttagttgccatcatttagttgggcactctagcaagactgccggtgacaaaccggaggaaggtggggatgacgtcaaatcatcatgccccttatgacctgggctacacacgtgctacaatgggaagtacaacgagtcgcgaagtcgcgaggctaagctaatctcttaaagcttctctcagttcggattgtaggctgcaactcgcctacatgaagccggaatcgctagtaatcgcggatcagcacgccgcggtgaatacgttcccgggccttgtacacaccgcccgtcacaccacgagagtttgtaacacccgaagtcggtgaggtaacctttttggagccagccgcctaaggtgggatagatgattggggtgaagtcgtaacaaggtagccgtatcggaaggtgcggctggatcacctc

SEQ ID NO: 812 - DNA, 1396 bp, Enterococcus raffinosus
  modified_base (8)..(8): a, c, t, g, unknown or other
  modified_base (13)..(13): a, c, t, g, unknown or other
cgaacgcnttttntttcaccggagcttgctccaccgaaagaaaaggagtggcgaacgggtgagtaacacgtgggtaacctgcccatcagaaggggataacacttggaaacaggtgctaataccgtataacaatagaaaccgcatggtttctatttgaaaggcgcttttgcgtcactgatggatggacccgcggtgcattagctagttggtgaggtaacggctcaccaaggcaacgatgcatagccgacctgagagggtgatcggccacattgggactgagacacggcccaaactcctacgggaggcagcagtagggaatcttcggcaatggacgaaagtctgaccgagcaacgccgcgtgagtgaagaaggttttcggatcgtaaaactctgttgttagagaagaacaaggatgagagtagaatgttcatcccttgacggtatctaaccagaaagccacggctaactacgtgccagcagccgcggtaatacgtaggtggcaagcgttgtccggatttattgggcgtaaagcgagcgcaggcggtttcttaagtctgatgtgaaagcccccggctcaaccggggagggtcattggaaactgggaaacttgagtgcagaagaggagagtggaattccatgtgtagcggtgaaatgcgtagatatatggaggaacaccagtggcgaaggcggctctctggtctgtaactgacgctgaggctcgaaagcgtggggagcaaacaggattagataccctggtagtccacgccgtaaacgatgagtgctaagtgttggagggtttccgcccttcagtgctgcagctaacgcattaagcactccgcctggggagtacgaccgcaaggttgaaactcaaaggaattgacgggggcccgcacaagcggcggtaatacgtgggtggcaagcgttaacgcgaagaaccttaccaggtcttgacatcctttgaccactctagagatagagcttccccttcgggggcaaagtgacaggtggtgcatggttgtcgtcagctcgtgtcgtgagatgttgggttaagtcccgcaacgagcgcaacccttattgttagttgccatcatttagttgggcactctagcgagactgccggtgacaaaccggaggaaggtggggatgacgtcaaatcatcatgccccttatgacctgggctacacacgtgctacaatgggaagtacaacgagtcgcgaagtcgcgaggctaagctaatctcttaaagcttctctcagttcggattgtaggctgcaactcgcctacatgaagccggaatcgctagtaatcgcggatcagcacgccgcggtgaatacgttcccgggccttgtacacaccgcccgtcacaccacgagagtttgtaacacccgaagtcggtg

SEQ ID NO: 813 - DNA, 876 bp, Enterococcus sp.
  BV2CASA2
  modified_base (34)..(34): a, c, t, g, unknown or other
  modified_base (41)..(41): a, c, t, g, unknown or other
  modified_base (47)..(47): a, c, t, g, unknown or other
  modified_base (247)..(247): a, c, t, g, unknown or other
  modified_base (850)..(850): a, c, t, g, unknown or other
  modified_base (853)..(853): a, c, t, g, unknown or other
atttattgggcgtaaagcgagcgcaggcggtttnttaagtntgatgngaaagcccccggctcaaccggggagggtcattggaaactgggagacttgagtgcagaagaggagagtggaattccatgtgtagcggtgaaatgcgtagatatatggaggaacaccagtggcgaaggcggctctctggtctgtaactgacgctgaggctcgaaagcgtggggagcaaacaggattagataccctggtagtncacgccgtaaacgatgagtgctaagtgttggagggtttccgcccttcagtgctgcagcaaacgcattaagcactccgcctggggagtacgaccgcaaggttgaaactcaaaggaattgacgggggcccgcacaagcggtggagcatgtggtttaattcgaagcaacgcgaagaaccttaccaggtcttgacatcctttgaccactctagagatagagctttcccttcggggacaaagtgacaggtggtgcatggttgtcgtcagctcgtgtcgtgagatgttgggttaagtcccgcaacgagcgcaacccttattgttagttgccatcatttagttgggcactctagcgagactgccggtgacaaaccggaggaaggtggggatgacgtcaaatcatcatgccccttatgacctgggctacacacgtgctacaatgggaagtacaacgagtcgctagaccgcgaggtcatgcaaatctcttaaagcttctctcagttcggattgcaggctgcaactcgcctgcatgaagccggaatcgctagtaatcgcggatcagcacgccgcggtgaatacgttcccgggccttgtacacaccgcccgtcncancacgagagtttgtaacacccgaa

SEQ ID NO: 814 - DNA, 1262 bp, Enterococcus sp.
  CCRI-16620
gaaaagaggagtggcggacgggtgagtaacacgtgggtaacctacccatcagagggggataacacttggaaacaggtgctaataccgcataatagtcgacaccgcatggtgttgatttgaaagacgctttcgggtgtcactgatggatggacccgcggtgcattagctagttggtgaggtaacggctcaccaaggccatgatgcatagccgacctgagagggtgatcggccacactgggactgagacacggcccagactcctacgggaggcagcagtagggaatcttcggcaatggacgaaagtctgaccgagcaacgccgcgtgagtgaagaaggttttcggatcgtaaaactctgttgttagagaagaacaagtaggagagtaactgctcttaccttgacggtatctaaccagaaagccacggctaactacgtgccagcagccgcggtaatacgtaggtggcaagcgttgtccggatttattgggcgtaaagcgagcgcaggcggtttcttaagtctgatgtgaaagcccccggctcaaccggggagggtcattggaaactgggagacttgagtgcagaagaggagagtggaattccatgtgtagcggtgaaatgcgtagatatatggaggaacaccagtggcgaaggcgactctctggtctgtaactgacgctgaggctcgaaagcgtggggagcaaacaggattagataccctggtagtccacgccgtaaacgatgagtgctaagtgttggagggtttccgcccttcagtgctgcagctaacgcattaagcactccgcctggggagtacgaccgcaaggttgaaactcaaaggaattgacgggggcccgcacaagcggtggagcatgtggtttaattcgaagcaacgcgaagaaccttaccaggtcttgacatcctttgaccactcgagagatcgagctttcccttcggggacaaagtgacaggtggtgcatggttgtcgtcagctcgtgtcgtgagatgttgggttaagtcccgcaacgagcgcaacycctattgttagttgccatcatttagttgggcactctagcgagactgccggtgacaaaccggaggaaggtggggatgacgtcaaatcatcatgccccttatgacctgggctacacacgtgctacaatgggaagtacaacgagtcgctaggccgcgaggtcatgcaaatctcttaaagcttctctcagttcggattgtaggctgcaactcgcctacatgaagccggaatcg

SEQ ID NO: 815 - DNA, 1522 bp, Enterococcus sp.
  F95
agggtttgatcctggctcaggacgaacgctggcggcgtgcctaatacatgcaagtcgaacgcttctttcctcccgagtgcttgcactcaattggaaagaggagtggcggacgggtgagtaacacgtgggtaacctacccatcagagggggataacacttggaaacaggtgctaataccgcataacagtttatgccgcatggcataagagtgaaaggcgctttcgggtgtcgctgatggatggacccgcggtgcattagctagttggtgaggtaacggctcaccaaggccacgatgcatagccgacctgagagggtgatcggccacactgggactgagacacggcccagactcctacgggaggcagcagtagggaatcttcggcaatggacgaaagtctgaccgagcaacgccgcgtgagtgaagaaggttttcggatcgtaaaactctgttgttagagaagaacaaggacgttagtaactgaacgtcccctgacggtatctaaccagaaagccacggctaactacgtgccagcagccgcggtaatacgtaggtggcaagcgttgtccggatttattgggcgtaaagcgagcgcaggcggtttcttaagtctgatgtgaaagcccccggctcaaccggggagggtcattggaaactgggagacttgagtgcagaagaggagagtggaattccatgtgtagcggtgaaatgcgtagatatatggaggaacaccagtggcgaaggcggctctctggtctgtaactgacgctgaggctcgaaagcgtggggagcaaacaggattagataccctggtagtccacgccgtaaacgatgagtgctaagtgttggagggtttccgcccttcagtgctgcagcaaacgcattaagcactccgcctggggagtacgaccgcaaggttgaaactcaaaggaattgacgggggcccgcacaagcggtggagcatgtggtttaattcgaagcaacgcgaagaaccttaccaggtcttgacatcctttgaccactctagagatagagctttcccttcggggacaaagtgacaggtggtgcatggttgtcgtcagctcgtgtcgtgagatgttgggttaagtcccgcaacgagcgcaacccttattgttagttgccatcatttagttgggcactctagcgagactgccggtgacaaaccggaggaaggtggggatgacgtcaaatcatcatgccccttatgacctgggctacacacgtgctacaatgggaagtacaacgagtcgctataccgcgaggtcatgcaaatctcttaaagcttctctcagttcggattgcaggctgcaactcgcctgcatgaagccggaatcgctagtaatcgcggatcagcacgccgcggtgaatacgttcccgggccttgtacacaccgcccgtcacaccacgagagtttgtaacacccgaagtcggtgaggtaacctttttggagccagccgcctaaggtgggatagatgattggggtgaagtcgtaacaaggtagcc

SEQ ID NO: 816 - DNA, 1406 bp, Enterococcus sp.
  RfL6
tcacttgaaaagaagagtggcggacggggtgagtaacacgtgggtaacctgccccatcagagggggataagacttggaaacaggtgctaataccgcataatagtcgacaccgcatggtgttgatttgaaagacgctttcgggtgtcactgatggatggacccgcggtgcattagctagttggtgaggtaacggctcaccaaggccatgatgcatagccgacctgagagggtgatcggccacactgggactgagacacggccagactcctacgggaggcagcagtagggaatcttcggcaatggacgaagtctgaccgagcaacgccgcgtgagtgaagaaggttttcggatcgtaaaactctgttgttagagaagaacaagtgggagagtaactgctcccgccttgacggtatctaaccagaaagccacggctaactacgtgccagcagccgcggtaatacgtaggtggcaagcgttgtccggatttattgggcgtaaagcgagcgcaggcggtttcttaagtctgatgtgaaagcccccggctcaaccggggagggtcattggaaactgggagacttgagtgcagaagaggagagttgaattccatgtgtagcgtgaaatgcgtagatatatggaggaacaccagtggcgaaggcgactctctggtctgtaactgacgctgaggctcgaaagcgtggggagcaaacaggattagataccctggtagtccacgccgtaaacgatgagtgctaagtgttggagggtttccgcccttcagtgctgcagctaacgcattaagcactccgcctggggagtacgaccgcaaggttgaaactcaaaggaattkacgggggcccgcacaagcggtggagcatgtggtttaattcgaagcaacgcggagaaccttaccaggtcttgacatcctttgaccactctagagatagagctttcccttcggggacaaagtgacaggtggtgcatggttgtcgtcagctcgtgtcgtgagatgttgggttaagtcccgcaacgagcgcaacccttattgttagttgccatcattcagttgggcactctagcgagactgccggtgacaaaccggaggaaggtggggatgacgtcaaatcatcatgccccttatgacctgggctacacacgtgctacaatgggaagtacaacgagtcgctaggccgcgaggtcatgcaaatctcttaaagcttctctcagttcggattgtaggctgcaactcgcctacatgaagccggaatcgctagtaatcgcggatcagcacgccgcggtgaatacgttcccgggccttgtacacaccgcccgtcacaccacgaaagtttgtaacacccgaagtcggtgaggtaaccttttggagccagccgcctaaggtgggatagatg

SEQ ID NO: 817 - DNA, 1295 bp, Enterococcus thailandicus
gacgaacgctggcggcgtgcctaatacatgcaagtcgtacgagtggcgaacgggtgagtaacacgtgggtaacctgcccatcagaaggggataacacttggaaacaggtgctaataccgtataacgaaagtcgctgatggatggacccgcggtgcattagctagttggtgaggtaacggctcaccaaggccacgatgcatagccgacctgagagggtgatcggccacattgggactgagacacggcccaaactcctacgggaggcagcagtagggaatcttcggcaatggacgaaagtctgaccgagcaacgccgcgtgagtgaagaaggttttcggatcgtaaaactctgttgttagagaagatgacggtatctaaccagaaagccacggctaactacgtgccagcagccgcggtaatacgtaggtggcaagcgttgtccggatttattgggcgtaaagcgagcgcaggcggtttcttaagtctgatgtgaaagcccccggctcaaccggggagggtcattggaaactgggagacttgagtgcagaagaggagagtggaattccatgtgtagcggtgaaatgcgtagatatatggaggaacaccagtggcgaaggcgactctctggtctgactgacgctgaggctcgaaagcgtggggagcaaacaggattagataccctggtagtccacgccgtaaacgatgagtgctaagtgttggagcttcagtgctgcagctaacgcattaagcactccgcctggggagtacgaccgcaaggttgaaactcaaaggaattgacgggggcccgcacaagcggtggagcatgtggtttaattcgaagcaacgcgaagaaccttaccaggtcttgacatcgacaggtggtgcatggttgtcgtcagctcgtgtcgtgagatgttgggttaagtcccgcaacgagcgcaacccttattgttagttgccatcatgggcactctagcaagactgccggtgacaaaccggaggaaggtggggatgacgtcaaatcatcatgccccttatgacctgggctacacacgtgctacaatgggaagcaacgagtcgcgaagtcgcgaggctaagctaatctcttcttctctcagttcggatgtaggctgcaactcgcctacagaagccggaatcgctagtaatcgcggatcagcacgccgcggtgaatacgttcccgggccttgtacacaccgcccgtcacaccacgaaagtttgtaacacccgaagtcggtaggtagccagccgcctaaggtgggatagatgattggggtg

SEQ ID NO: 818 - DNA, 1543 bp, Eremococcus coleocola
atgagagtttgatcctggctcaggacgaacgctggcggcgtgcctaatacatgcaagtcgaacgcactgacggagaacttgttctcttaacgtgagtggcggacgggtgagtaacacgtgggaaacctacccttgagcgggggataacggtcggaaacgatcgctaataccgcataacagcaatcatcgcctgatggttgattgaaagatggctctgctatcactcaaggatgggcccgcggtgcattagctagttggtaaggtaacggcttaccaaggccatgatgcatagccgacctgagagggtaatcggccacattgggactgagacacggcccaaactcctacgggaggcagcagtagggaatcttccgcaatggacgcaagtctgacggagcaacgccgcgtgtgtgaagaaggttttcggatcgtaaagcactgttattagccaagaacacccctagtagtaactggctagggattgacggtaactaatcagaaagccacggctaactacgtgccagcagccgcggtaatacgtaggtggcaagcgttgtccggatttattgggcgtaaagggagcgcaggcggtgacttaagtctgatgtgaaagcccacggcttaaccgtggagggtcattggaaactgggtcacttgagtacagaagaggaaagcggaattccatgtgtagcggtgaaatgcgtagatatatggaggaacaccagtggcgaaggcggctttctggtctgatactgacgctgaggctcgaaagcgtggggagcaaacaggattagataccctggtagtccacgccgtaaacgatgagtgctaagtgttggagggtttccacccttcagtgctggcgttaacgcaataagcactccgcctggggagtacggtcgcaagactgaaactcaaaggaattgacggggacccgcacaagcggtggagcatgtggtttaattcgaagcaacgcgaagaaccttaccaggtcttgacatcctatgaccactctagagatagagtttctcttcggagcatagagacaggtggtgcatggttgtcgtcagctcgtgtcgtgagatgttgggttaagtcccgcaacgagcgcaacccttataactagttgccagcattcagatggggactctagttagactgccggtgacaaaccggaggaaggtggggatgacgtcaaatcatcatgccccttatgacctgggctacacacgtgctacaatggacgatacaacgagcagcaaactcgcgagggcaagcgaatctcttaaagtcgttctcagttcggattgcaggctgcaactcgcctgcatgaagccggaatcgctagtaatcgtggatcagcacgccacggtgaatccgttcccgggtcttgtacacaccgcccgtcacaccacgagagtttgtaacacccgaagccggtggcctaacctatgagggagccgtcgaaggtgggatagatgattggggtgaagtcgtaacaaggtagccgtatcggaaggtgcggctggatcacctcctttct

SEQ ID NO: 819 - DNA, 1504 bp, Erysipelothrix inopinata
ggctcaggatgaacgctggcggcgtgcctaatacatgcaagtcgaacgaagttcgaaactagcttgctagattcgaaacttagtggcgaacgggtgagtaatacataagcaacctgcctctatgcctgggataacagatggaaacgtctgctaataccggatacgttaatcgaagacatcttcgattaattaaagttgggatacaacacaaagagatgggcttatggcgcattagttagttggtgaggtaacggctcaccaagacgatgatgcgtagccgacctgagagggtgaccggccacactgggactgagacacggcccagactcctacgggaggcagcagtagggaattttcggcaatgggggaaaccctgaccgagcaacgccgcgtgagtgaagaaggccttcgggttgtaaagctctgttgtaagggaagaacaagtatgagagggaatgctcgtactatgacggtaccttaccagaaagccacggctaactacgtgccagcagccgcggtaatacgtaggtggcgagcgttatccggaattattgggcgtaaagggagcgcaggcggtttattaagtttatggtgaaagttcggggcttaaccccgtgatgccatagaaactggtagactagagtgcaggagaggttagtggaattccatgtgtagcggtaaaatgcgtagatatatggaggaacaccagtggcgaaggcggctaactggcctgtaactgacgctgaggctcgaaagcgtggggagcaaataggattagataccctagtagtccacgccgtaaacgatggatactaagtgttggatagaattcagtgctgtagttaacgcaataagtatcccgcctggggagtatgcgcgcaagcgtaaaactcaaaggaattgacgggggcccgcacaagcggtggagtatgtggtttaattcgaagcaacgcgaagaaccttaccaggtcttgacataccgcgcaaaagcatagagatatgtaatagttatggcggatacaggtggtgcatggttgtcgtcagctcgtgtcgtgagatgttgggttaagtcccgcaacgagcgcaacccttgtcttcagttaccatcattaagttggggactctggagagactgccggtgataaaccggaggaaggtggggatgacgtcaaatcatcatgccccttatgatctgggctacacacgtactacaatggcgtatacagagggaagcgaagcagtgatgtggagcgaatctcagaaagtacgtctcagttcggattggagtctgcaactcgactccatgaagtcggaatcgctagtaatcgcggatcagcatgccgcggtgaatacgttctcgggccttgtacacaccgcccgtcaaaccatgagagttggtaatacccgaagccggtggcctaaccctgtaaagggagggagccgtcgaaggtaggaccgatgattggggttaagtcgtaacaaggtatccctaccggaaggtggg

SEQ ID NO: 820 - DNA, 1545 bp, Erysipelothrix rhusiopathiae
aaatggagagtttgatcctggctcaggatgaacgctggcggcgtgcctaatacatgcaagtcgaacgaagtgaagaggagcttgctccttggaacttagtggcgaacgggtgagtaatacataagcaacctgcctcgatgcctgggataacagagggaaacttctgctaataccggatacgttaatctaagacatcttagattaattaaagatgggatacatcacaacgagatgggcttatggcgcattagttagttggtaaggtaacggcttaccaagacgatgatgcgtagccgacctgagagggtgaccggccacactgggactgagacacggcccagactcctacgggaggcagcagtagggaattttcggcaatgggggaaaccctgaccgagcaacgccgcgtgagtgaagacggccttcgggttgtaaagctctgttgtaagggaagaacgataggaagagggaatgcttcttatatgacggtaccttaccagaaagccacggctaactacgtgccagcagccgcggtaatacgtaggtggcaagcgttatccggaattattgggcgtaaagggagcgcaggcggtttatcaagtttatggttaaagttcggggcttaaccccgtgatgccatagaaactggtagactagagtgcaggagaggttagtggaattccatgtgtagcggtaaaatgcgtagatatatggaggaacaccagtggcgaaggcggctaactggcctgtaactgacgctgaggctcgaaagcgtggggagcaaataggattagataccctagtagtccacgccgtaaacgatggatactaagtgttggagaaattcagtgctgtagttaacgcaataagtatcccgcctggggagtatgcgcgcaagcgtaaaactcaaaggaattgacgggggcccgcacaagcggtggagtatgtggtttaattcgaagcaacgcgaagaaccttaccaggtcttgacataccgcgcaaaagcacagagatgtgtaatagttatggcggatacaggtggtgcatggttgtcgtcagctcgtgtcgtgagatgttgggttaagtcccgcaacgagcgcaacccttgtctttagttaccagcattaagttggggactctaaagagactgccggtgataaaccggaggaaggtggggatgacgtcaaatcatcatgccccttatgatctgggctacacacgtactacaatggcgtatacagagggcagcgaagcagcgatgcggagcgaatctcagaaagtacgtctcagttcggattggagtctgcaactcgactccatgaagtcggaatcgctagtaatcgcggatcagaatgccgcggtgaatacgttctcgggccttgtacacaccgcccgtcaaaccatgagagttggtaatacccgaagccggtggcctaacctagtttactaggagggagccgtcgaaggtaggatcgatgattggggttaagtcgtaacaaggtatccctaccggaaggtggggatggatcacctcctttctaagga

SEQ ID NO: 821 - DNA, 1479 bp, Erysipelothrix tonsillarum
agagtttgatcctggctcaggatgaacgctggcggcgtgcctaatacatgcaagtcgaacgaagtgaagaggagcttgctccttggaacttagtggcgaacgggtgagtaatacataagcaacctgcctcgatgcctgggataacagagggaaacttctgctaataccggatacgttaatctaagacatcttagattaattaaagatgggatacatcacaacgagatgggcttatggcgcattagttagttggtaaggtaacggcttaccaagacgatgatgcgtagccgacctgagagggtgaccggccacactgggactgagacacggcccagactcctacgggaggcagcagtagggaattttcggcaatgggggaaaccctgaccgagcaacgccgcgtgagtgaagacggccttagggttgtaaagctctgttgtaagggaagaacaataagaagagggaatgcttcttatatgacggtaccttaccagaaagccacggctaactacgtgccagcagccgcggtaatacgtaggtggcaagcgttatccggaattattgggcgtaaagggagcgcaggcggtttatcaagtttatggttaaagttcggggcttaaccccgtgatgccatagaaactggtagactagagtgcaggagaggttagtggaattccatgtgtagcggtaaaatgcgtagatatatggaggaacaccagtggcgaaggcggctaactggcctgtaactgacgctgaggctcgaaagcgtggggagcaaataggattagataccctagtagtccacgccgtaaacgatggatactaagtgttggagaaattcagtgctgtagttaacgcaataagtatcccgcctggggagtatgcgcgcaagcgtaaaactcaaaggaattgacgggggcccgcacaagcggtggagtatgtggtttaattcgaagcaacgcgaagaaccttaccaggtcttgacataccgcgcaaaagcacagagatgtgtaatagttatggcggatacaggtggtgcatggttgtcgtcagctcgtgtcgtgagatgttgggttaagtcccgcaacgagcgcaacccttgtctttagttaccagcattaagttggggactctaaagagactgccggtgataaaccggaggaaggtggggatgacgtcaaatcatcatgccccttatgatctgggctacacacgtactacaatggcgtatacagagggcagcgaagcagcgatgcggagcgaatctcagaaagtacgtctcagttcggattggagtctgcaactcgactccatgaagtcggaatcgctagtaatcgcggatcagaatgccgcggtgaatacgttctcgggccttgtacacaccgcccgtcaaaccatgagagttggtaatacccgaagccggtggcctaacctagtttactaggagggagccgtcgaaggtaggatcgatgattgggg

SEQ ID NO: 822 - DNA, 1387 bp, Erysipelotrichaceae bacterium 3_1_53
  modified_base (935)..(936): a, c, t, g, unknown or other
  modified_base (1381)..(1381): a, c, t, g, unknown or other
tctctaggaagcttgcttccaaagagacttagtggcgaacgggtgagtaacacgtaggtaacctgcccatgtgtctgggataactgctggaaacggtagctaaaaccggataggtatacggagcgcatgctctgtatattaaagcacccttcaaggtgtgaacatggatggacctgcggcgcattagctagttggtgaggtaacggcccaccaaggcgatgatgcgtagccggcctgagagggtaaacggccacattgggactgagacacggcccaaactcctacgggaggcagcagtagggaattttcgtcaatggggggaaccctgaacgagcaatgccgcgtgagtgaagaaggtcttcggatcgtaaagctctgttgtaagtgaagaacggctcataggaaatgctatgggagtgaggtagcttaccagaaagccacggctaactacgtgccagcagccgcggtaatacgtaggtggcaagcgttatccggaatcattgggcgtaaagggtgcgtaggtggcgtactaagtctgtagtaaaaggcaatggtcaaccattgtaagctatggaaactggtaggctagagtgcagaagagggcgatggaattccatgtgtagcggtaaaatgcgtagatatatggaggaacaccagtggcgaaggcggtcgcctggtctgtaactgacactgaggcacgaaagcgtggggagcaaataggattagataccctagtagtccacgccgtaaacgatgagaactaagtgttggaggaattcagtgctgcagttaacgcaataagttctccgcctggggagtatgcacgcaagtgtgaaactcaaaggaattgacgggggcccgcacaagcggtggagtatgtggtttaattcgaagcaacgcgaagaaccttaccaggccttgacatggaaacaaannccctagagatagggagataaatatggatcacacaggtggtgcatggttgtcgtcagctcgtgtcgtgagatgttgggttaagtcccgcaacgagcgcaacccttgtcgcatgttaccagcatcaagttggggactcatgcgagactgccggtgacaaaccggaggaaggtggggatgacgtcaaatcatcatgccccttatggcctgggctacacacgtactacaatggcgaccacaaagagcagcgacttggtgacaagaagcgaatctcataaaggccgtctcagttcggattgaagtctgcaactcgacttcatgaagtcggaatcgctagtaatcgcagatcagcatgctgcggtgaatacgttctcgggccttgtacacaccgcccgtcaaaccatgggagtcagtaatacccgaagccggtggcataaccgtaaggagngagccg

SEQ ID NO: 823 - DNA, 1357 bp, Erysipelotrichaceae bacterium 5_2_54FAA
  modified_base (14)..(14): a, c, t, g, unknown or other
  modified_base (1311)..(1312): a, c, t, g, unknown or other
tccaaagagacttngtggggaacgggtgagtaacacgtaggtaacctgcccatgtgcccgggataactgctggaaacggtagctaaaaccggataggtatgagggaggcatcttcctcatattaaagcaccttcgggtgtgaacatggatggacctgcggcgcattagctggttggtgaggtaacggcccaccaaggcgatgatgcgtagccgacctgagagggtgaacggccacattgggactgagacacggcccaaactcctacgggaggcagcagtagggaattttcgtcaatggggggaaccctgaacgagcaatgccgcgtgtgtgaagaaggtcttcggatcgtaaagcactgttgtaagtgaagaatgccatatagaggaaatgctatgtgggtgacggagcttaccagaaagccacggtaactacgtgccagcagccgcggtaatacgtaggtggcaagcgttatccggaatcattgggcgtaaagggtgcgtaggtggcacgataagtctgaagtaaaaggcaacagctcaactgttgtatgctttggaaactgtcgagctagagtgcagaagagggcgatggaattccatgtgtagcggtaaaatgcgtagatatatggaggaacaccagtggcgaaggcggtcgcctggtctgtaactgacactgatgcacgaaagcgtggggagcaaataggattagataccctagtagtccacgccgtaaacgatgagaactaagtgttggagagattcagtgctgcagttaacgcaataagttctccgcctggggagtatgcacgcaagtgtgaaactcaaaggaattgacgggggcccgcacaagcggtggagtatgtggtttaattcgaagcaacgcgaagaaccttaccaggccttgacatgtatataaatgatctagaaatagaaagatagctatatatcacacaggtggtgcatggttgtcgtcagctcgtgtcgtgagatgttgggttaagtcccgcaacgagcgcaacccttgtcttctgttaccagcattaagttggggactcaggagagactgccggtgacaaaccggaggaaggtggggatgacgtcaaatcatcatgccccttatggcctgggctacacacgtactacaatggcgcctacaaagagcagcgacaccgcgaggtggagcgaatctcataaagggcgtctcagttcggattgaagtctgcaactcgacttcatgaagtcggaatcgctagtaatcgcagatcagcatgctgcggtgaatacgttctcgggccttgtacacaccgcccnncaaaccatgggagttggtaatacccgaagccggtggcataaccgc

SEQ ID NO: 824 - DNA, 1545 bp, Escherichia albertii
ttaaattgaagagtttgatcatggctcagattgaacgctggcggcaggcctaacacatgcaagtcgaacggtaacaggaaacagcttgctgtttcgctgacgagtggcggacgggtgagtaatgtctgggaaactgcccgatggagggggataactactggaaacggtagctaataccgcataacgtcgcaagaccaaagagggggaccttagggcctcttgccatcggatgtgcccagatgggattagcttgttggtgaggtaacggctcaccaaggcgacgatccctagctggtctgagaggatgaccagccacactggaactgagacacggtccagactcctacgggaggcagcagtggggaatattgcacaatgggcgcaagcctgatgcagccatgccgcgtgtatgaagaaggccttcgggttgtaaagtactttcagcggggaggaagggagtaaagttaatacctttgctcattgacgttacccgcagaagaagcaccggctaactccgtgccagcagccgcggtaatacggagggtgcaagcgttaatcggaattactgggcgtaaagcgcacgcaggcggttgattaagtcagatgtgaaatccccgggctcaacctgggaactgcatctgatactggtcagcttgagtctcgtagaggggggtagaattccaggtgtagcggtgaaatgcgtagagatctggaggaataccggtggcgaaggcggccccctggacgaagactgacgctcatgtgcgaaagcgtggggagcaaacaggattagataccctggtagtccacgccgtaaacgatgtcgacttggaggttgtgcccttgaggcgtggcttccggagctaacgcgttaagtcgaccgcctggggagtacggccgcaaggttaaaactcaaatgaattgacgggggcccgcacaagcggtggagcatgtggtttaattcgatgcaacgcgaagaaccttacctggtcttgacatccacggaagttttcagagatgagaatgtgccttcgggaaccgtgagacaggtgctgcatggctgtcgtcagctcgtgttgtgaaatgttgggttaagtcccgcaacgagcgcaacccttatcctttgttgccagcggtccggccgggaactcaaaggagactgccagtgataaactggaggaaggtggggatgacgtcaagtcatcatggcccttacgaccagggctacacacgtgctacaatggcgcatacaaagagaagcgacctcgcgagagcaagcggacctcataaagtgcgtcgtagtccggattggagtctgcaactcgactccatgaagtcggaatcgctagtaatcgtggatcagaatgccacggtgaatacgttcccgggccttgtacacaccgcccgtcacaccatgggagtgggttgcaaaagaagtaggtagcttaaccttcgggagggcgcttaccactttgtgattcatgactggggtgaagtcgtaacaaggtaaccgtaggggaacctgcggttggatcacctccttac

SEQ ID NO: 825 - DNA, 1403 bp, Escherichia coli
  modified_base (20)..(20): a, c, t, g, unknown or other
gtcgaacggtaacaggaagncagcttgctgctttgctgacgagtggcggacgggtgagtaatgtctgggaaactgcctgatggagggggataactactggaaacggtagctaataccgcataacgtcgcaagaccaaagagggggaccttcgggcctcttgccatcggatgtgcccagatgggattagctagtaggtggggtaaaggctcacctaggcgacgatccctagctggtctgagaggatgaccagccacactggaactgagacacggtccagactcctacgggaggcagcagtggggaatattgcacaatgggcgcaagcctgatgcagccatgccgcgtgtatgaagaaggccttcgggttgtaaagtactttcagcggggaggaagggagtaaagttaatacctttgctcattgacgttacccgcagaagaagcaccggctaactccgtgccagcagccgcggtaatacggagggtgcaagcgttaatcggaattactgggcgtaaagcgcacgcaggcggtttgttaagtcagatgtgaaatccccgggctcaacctgggaactgcatctgatactggcaagcttgagtctcgtagaggggggtagaattccaggtgtagcggtgaaatgcgtagagatctggaggaataccggtggcgaaggcggccccctggacgaagactgacgctcagtgcgaaagcgtggggagcaaacaggattagataccctggtagtccacgccgtaaacgatgtcgacttggaggttgtgcccttgaggcgtggcttcggagctaacgcgttaagtcgaccgcctggggagtacggccgcaaggttaaaactcaaatgaattgacgggggcccgcacaagcggtggagcatgtggtttaattcgatgcaacgcgaagaaccttacctggtcttgacatccacggaagttttcagagatgagaatgtgccttcgggaaccgtgagacaggtgctgcatggctgtcgtcagctcgtgttgtgaaatgttgggttaagtcccgcaacgagcgcaacccttatcctttgttgccagcggtccggccgggaactcaaaggagactgccagtgataaactggaggaaggtggggatgacgtcaagtcatcatggcccttacgaccagggctacacacgtgctacaatggcgcatacaaagagaagcgacctcgcgagagcaagcggacctcataaagtgcgtcgtagtccggattggagtctgcaactcgactccatgaagtcggaatcgctagtaatcgtggatcagaatgccacggtgaatacgttcccgggccttgtacacaccgcccgtcacaccatgggagtgggttgcaaaagaagtaggtagcttaaccttcgggagggcgcta

SEQ ID NO: 826 - DNA, 1395 bp, Escherichia fergusonii
  modified_base (14)..(16): a, c, t, g, unknown or other
tcgaacggtaacannnagcagcttgctgctttgctgacgagtggcggacgggtgagtaatgtctgggaaactgcctgatggagggggataactactggaaacggtagctaataccgcataacgtcgcaagaccaaagagggggaccttcgggcctcttgccatcggatgtgcccagatgggattagcttgtaggtggggtaacggctcacctaggcgacgatccctagctggtctgagaggatgaccagccacactggaactgagacacggtccagactcctacgggaggcagcagtggggaatattgcacaatgggcgcaagcctgatgcagccatgccgcgtgtatgaagaaggccttcgggttgtaaagtactttcagcggggaggaagggagtaaagttaatacctttgctcattgacgttacccgcagaagaagcaccggctaactccgtgccagcagccgcggtaatacggagggtgcaagcgttaatcggaattactgggcgtaaagcgcacgcaggcggtttgttaagtcagatgtgaaatccccgggctcaacctgggaactgcatctgatactggcaagcttgagtctcgtagaggggggtagaattccaggtgtagcggtgaaatgcgtagagatctggaggaataccggtggcgaaggcggccccctggacgaagactgacgctcaggtgcgaaagcgtggggagcaaacaggattagataccctggtagtccacgccgtaaacgatgtcgacttggaggttgtgcccttgaggcgtggcttccggagctaacgcgttaagtcgaccgcctggggagtacggccgcaaggttaaaactcaaatgaattgacgggggcccgcacaagcggtggagcatgtggtttaattcgatgcaacgcgaaaaaccttacctggtcttgacatccacagaactttccagagatggatgcgtaacgtgcaggaaggcggtttgtgaagtcagatgctgtcgtcagctcgtgttgtgaaatgttgggttaagtcccgcaacgagcgcaacccttatcctttgttgccagcggtccggccgggaactcaaaggagactgccagtgataaactggaggaaggtggggatgacgtcaagtcatcatggcccttacgaccagggctacacacgtgctacaatggcgcatacaaagagaagcgacctcgcgagagcaagcggacctcataaagtgcgtcgtagtccggattggagtctgcaactcgactccatgaagtcggaatcgctagtaatcgtggatcagaatgccacggtgaatacgttcccgggccttgtacacaccgcccgtcacaccatgggagtgggttgcaaaagaagtaggtagcttaaccttcggga

SEQ ID NO: 827 - DNA, 1517 bp, Escherichia hermannii
ctccagagtttgatcatggctcagattgaacgctggcggcaggcctaacacatgcaagtcgaacggtaacaggaagcagcttgctgcttcgctgacgagtggcggacgggtgagtaatgtctgggaaactgcctgatggagggggataactactggaaacggtagctaataccgcataacgtcgcaagaccaaagagggggaccttcgggcctcttgccatcagatgtgcccagatgggattagctagtaggtggggtaacggctcacctaggcgacgatccctagctggtctgagaggatgaccagccacactggaactgagacacggtccagactcctacgggaggcagcagtggggaatattgcacaatgggcgcaagcctgatgcagccatgccgcgtgtatgaagaaggccttcgggttgtaaagtactttcagcggggaggaaggcgatgcggttaataaccgcgtcgattgacgttacccgcagaagaagcaccggctaactccgtgccagcagccgcggtaatacggagggtgcaagcgttaatcggaattactgggcgtaaagcgcacgcaggcggtctgtcaagtcggatgtgaaatccccgggctcaacctgggaactgcatccgaaactggcaggcttgagtctcgtagaggggggtagaattccaggtgtagcggtgaaatgcgtagagatctggaggaataccggtggcgaaggcggccccctggacgaagactgacgctcaggtgcgaaagcgtggggagcaaacaggattagataccctggtagtccacgccgtaaacgatgtcgacttggaggttgtgcccttgaggcgtggcttccggagctaacgcgttaagtcgaccgcctggggagtacggccgcaaggttaaaactcaaatgaattgacgggggcccgcacaagcggtggagcatgtggtttaattcgatgcaacgcgaagaaccttacctggtcttgacatccacagaactttccagagatggattggtgccttcgggaactgtgagacaggtgctgcatggctgtcgtcagctcgtgttgtgaaatgttgggttaagtcccgcaacgagcgcaacccttatcctttgttgccagcggttaggccgggaactcaaaggagactgccagtgataaactggaggaaggtggggatgacgtcaagtcatcatggcccttacgaccagggctacacacgtgctacaatggcgcatacaaagagaagcaatctcgcgagagctagcggacctcataaagtgcgtcgtagtccggattggagtctgcaactcgactccatgaagtcggaatcgctagtaatcgtgaatcagaatgtcacggtgaatacgttcccgggccttgtacacaccgcccgtcacaccatgggagtgggttgcaaaagaagtaggtagcttaaccttcgggagggcgcttaccactttgtgattcatgactggggtgaagtcgtaacaaggtaaccgtaggggaac

SEQ ID NO: 828 - DNA, 1542 bp, Escherichia sp.
  1_1_43
aaattgaagagtttgatcatggctcagattgaacgctggcggcaggcctaacacatgcaagtcgaacggtaacaggaaacagcttgctgtttcgctgacgagtggcggacgggtgagtaatgtctgggaaactgcctgatggagggggataactactggaaacggtagctaataccgcataacgtcgcaagaccaaagagggggaccttcgggcctcttgccatcggatgtgcccagatgggattagctagtaggtggggtaacggctcacctaggcgacgatccctagctggtctgagaggatgaccagccacactggaactgagacacggtccagactcctacgggaggcagcagtggggaatattgcacaatgggcgcaagcctgatgcagccatgccgcgtgtatgaagaaggccttcgggttgtaaagtactttcagcggggaggaagggagtaaagttaatacctttgctcattgacgttacccgcagaagaagcaccggctaactccgtgccagcagccgcggtaatacggagggtgcaagcgttaatcggaattactgggcgtaaagcgcacgcaggcggtttgttaagtcagatgtgaaatccccgggctcaacctgggaactgcatctgatactggcaagcttgagtctcgtagaggggggtagaattccaggtgtagcggtgaaatgcgtagagatctggaggaataccggtggcgaaggcggccccctggacgaagactgacgctcaggtgcgaaagcgtggggagcaaacaggattagataccctggtagtccacgccgtaaacgatgtcgacttggaggttgtgcccttgaggcgtggcttccggagctaacgcgttaagtcgaccgcctggggagtacggccgcaaggttaaaactcaaatgaattgacgggggcccgcacaagcggtggagcatgtggtttaattcgatgcaacgcgaagaaccttacctggtcttgacatccacggaagttttcagagatgagaatgtgccttcgggaaccgtgagacaggtgctgcatggctgtcgtcagctcgtgttgtgaaatgttgggttaagtcccgcaacgagcgcaacccttatcctttgttgccagcggtccggccgggaactcaaaggagactgccagtgataaactggaggaaggtggggatgacgtcaagtcatcatggcccttacgaccagggctacacacgtgctacaatggcgcatacaaagagaagcgacctcgcgagagcaagcggacctcataaagtgcgtcgtagtccggattggagtctgcaactcgactccatgaagtcggaatcgctagtaatcgtggatcagaatgccacggtgaatacgttcccgggccttgtacacaccgcccgtcacaccatgggagtgggttgcaaaagaagtaggtagcttaaccttcgggagggcgcttaccactttgtgattcatgactggggtgaagtcgtaacaaggtaaccgtaggggaacctgcggttggatcacctcctta

SEQ ID NO: 829 - DNA, 1530 bp, Escherichia sp.
  4_1_40B
agagtttgatcatggctcagattgaacgctggcggcaggcctaacacatgcaagtcgaacggtaacaggaaacagcttgctgtttcgctgacgagtggcggacgggtgagtaatgtctgggaaactgcctgatggagggggataactactggaaacggtagctaataccgcataacgtcgcaagaccaaagagggggaccttcgggcctcttgccatcggatgtgcccagatgggattagctagtaggtggggtaacggctcacctaggcgacgatccctagctggtctgagaggatgaccagccacactggaactgagacacggtccagactcctacgggaggcagcagtggggaatattgcacaatgggcgcaagcctgatgcagccatgccgcgtgtatgaagaaggccttcgggttgtaaagtactttcagcggggaggaagggagtaaagttaatacctttgctcattgacgttacccgcagaagaagcaccggctaactccgtgccagcagccgcggtaatacggagggtgcaagcgttaatcggaattactgggcgtaaagcgcacgcaggcggtttgttaagtcagatgtgaaatccccgggctcaacctgggaactgcatctgatactggcaagcttgagtctcgtagaggggggtagaattccaggtgtagcggtgaaatgcgtagagatctggaggaataccggtggcgaaggcggccccctggacgaagactgacgctcaggtgcgaaagcgtggggagcaaacaggattagataccctggtagtccacgccgtaaacgatgtcgacttggaggttgtgcccttgaggcgtggcttccggagctaacgcgttaagtcgaccgcctggggagtacggccgcaaggttaaaactcaaatgaattgacgggggcccgcacaagcggtggagcatgtggtttaattcgatgcaacgcgaagaaccttacctggtcttgacatccacggaagttttcagagatgagaatgtgccttcgggaaccgtgagacaggtgctgcatggctgtcgtcagctcgtgttgtgaaatgttgggttaagtcccgcaacgagcgcaacccttatcctttgttgccagcggtccggccgggaactcaaaggagactgccagtgataaactggaggaaggtggggatgacgtcaagtcatcatggcccttacgaccagggctacacacgtgctacaatggcgcatacaaagagaagcgacctcgcgagagcaagcggacctcataaagtgcgtcgtagtccggattggagtctgcaactcgactccatgaagtcggaatcgctagtaatcgtggatcagaatgccacggtgaatacgttcccgggccttgtacacaccgcccgtcacaccatgggagtgggttgcaaaagaagtaggtagcttaaccttcgggagggcgcttaccactttgtgattcatgactggggtgaagtcgtaacaaggtaaccgtaggggaacctgcggttggatcacct

SEQ ID NO: 830 - DNA, 1334 bp, Escherichia sp.
  B4
gagtttgatcctggctcagattgaacgctggcggcaggcctaacacatgcaagtcgaacgagtggcggacgggtgagtaatgtctgggaaactgcctgatggagggggataactactggaaacggtagctaataccgcataaccaaagttgccatcggatgtgcccagatgggattagctagtaggtggggtaacggctcacctaggcgacgatccctagctggtctgagaggatgaccagccacactggaactgagacacggtccagactcctacgggaggcagcagtggggaatattgcacaatgggcgcaagcctgatgcagccatgccgcgtgtatgaagaaggccttcgggttgtaaagtactttcagcggggaggatgacgttacccgcagaagaagcaccggctaactccgtgccagcagccgcggtaatacggagggtgcaagcgttaatcggaattactgggcgtaaagcgcacgcaggcggtttgttaagtcagatgtgaaatccccgggctcaacctgggaactgcatctgatactggcaagcttgagtctcgtagaggggggtagaattccaggtgtagcggtgaaatgcgtagagatctggaggaataccggtggcgaaggcggccccctggacgaactgacgctcaggtgcgaaagcgtggggagcaaacaggattagataccctggtagtccacgccgtaaacgatgtcgacttggaggttgtgcgtggcttccggagctaacgcgttaagtcgaccgcctggggagtacggccgcaaggttaaaactcaaatgaattgacgggggcccgcacaagcggtggagcatgtggtttaattcgatgcaacgcgaagaaccttacctggtcttgacatcgacaggtgctgcatggctgtcgtcagctcgtgttgtgaaatgttgggttaagtcccgcaacgagcgcaacccttatcctttgttgccagcggccgggaactcaaaggagactgccagtgataaactggaggaaggtggggatgacgtcaagtcatcatggcccttacgaccagggctacacacgtgctacaatggcgcacaaagagaagcgaactcgcgagagcaagcggacctcattgcgtcgtagtccggatggagtctgcaactcgactccagaagtcggaatcgctagtaatcgtggatcagaatgccacggtgaatacgttcccgggccttgtacacaccgcccgtcacaccatgggagtgggttgcaaaagaagtaggtgcttagggcgcttaccactttgtgattcatgactggggtgaagtcgtaacaaggtaacc

SEQ ID NO: 831 - DNA, 1397 bp, Escherichia vulneris
agtcgaacggtagcacagagagcttgctctcgggtgacgagtggcggacgggtgagtaatgtctgggaaactgcctgatggagggggataactactggaaacggtagctaataccgcataacgtcgcaagaccaaagagggggaccttcgggcctcttgccatcagatgtgcccagatgggattagctagtaggtggggtaacggctcacctaggcgacgatccctagctggtctgagaggatgaccagccacactggaactgagacacggtccagactcctacgggaggcagcagtggggaatattgcacaatgggcgcaagcctgatgcagccatgccgcgtgtatgaagaaggccttcgggttgtaaagtactttcagcggggaggaaggcgataaggttaataaccttgtcgattgacgttacccgcagaagaagcaccggctaactccgtgccagcagccgcggtaatacggagggtgcaagcgttaatcggaattactgggcgtaaagcgcacgcaggcggtctgtcaagtcggatgtgaaatccccgggctcaacctgggaactgcattcgaaactggcaggctggagtcttgtagaggggggtagaattccaggtgtagcggtgaaatgcgtagagatctggaggaataccggtggcgaaggcggccccctggacaaagactgacgctcaggtgcgaaagcgtggggagcaaacaggattagataccctggtagtccacgctgtaaacgatgtcgacttggaggttgttcccttgaggagtggcttccggagctaacgcgttaagtcgaccgcctggggagtacggccgcaaggttaaaactcaaatgaattgacgggggcccgcacaagcggtggagcatgtggtttaattcgatgcaacgcgaagaaccttacctactcttgacatccagagaacttagcagagatgctttggtgccttcgggacgcacgcaggcggtctgtcaagtcggatgtcagctcgtgttgtgaaatgttgggttaagtcccgcaacgagcgcaacccttatcctttgttgccagcggtccggccgggaactcaaaggagactgccagtgataaactggaggaaggtggggatgacgtcaagtcatcatggcccttacgagtagggctacacacgtgctacaatggcatatacaaagagaagcgacctcgcgagagcaagcggacctcataaagtatgtcgtagtccggattggagtctgcaactcgactccatgaagtcggaatcgctagtaatcgtggatcagaatgccacggtgaatacgttcccgggccttgtacacaccgcccgtcacaccatgggagtgggttgcaaaagaagtaggtagcttaaccttcgggagg

SEQ ID NO: 832 - DNA, 1497 bp, Ethanoligenens harbinense
agagtttgatcctggctcaggacgaacgctggcggcgcgcctaacacatgcaagtcgagcggagtccttcgggacttagcggcggacgggtgagtaacgcgtgagcaacctggccttcagagggggataacgtctggaaacggacgctaataccgcatgacatggcggagtcgcatggctctgccatcaaaggagtaatccgctgagggatgggctcgcgtccgattaggtagttggtgaggtaacggctcaccaagcccgcgatcggtagccggactgagaggttggccggccacattgggactgagacacggcccagactcctacgggaggcagcagtgggggatattgcacaatggaggaaactctgatgcagcgacgccgcgtgagggaagaaggtcttcggattgtaaacctctgtctttggggacgaatcaatgacggtacccaaggaggaagccacggctaactacgtgccagcagccgcggtaatacgtaggtggcaagcgttgtccggaattactgggtgtaaagggtgcgcaggcggggcggcaagttggatgtgaaaactccgggctcaacccggagcctgcattcaaaactgtcgctcttgagtgaagtagaggcaggcggaattcccggtgtagcggtgaaatgcgtagatatcgggaggaacaccagtggcgaaggcggcctgctgggcttttactgacgctgaggcacgaaagcatgggtagcaaacaggattagataccctggtagtccatgccgtaaacgatgattgctaggtgtggggggtctgaccccttccgtgccggagttaacacaataagcaatccacctggggagtacgggtcgcaaggttgaaactcaaaggaattgacgggggctcgcacaagcagtggagtatgtggtttgattcgaagcaacgcgaagaaccttaccaggtcttgacatccaccgaatcccccagagattggggagtgcccttcggggagcggtgagacaggtggtgcatggttgtcgtcagctcgtgtcgtgagatgttgggttaagtcccgcaacgagcgcaacccttgtgaatagttgctacgaaagagcactctattcagaccgccgttgacaaaacggaggaaggtggggatgacgtcaaatcatcatgccccttatgacctgggctacacacgtactacaatggccatcaacagagggaagcaaggccgcgaggtggagcgaacccctaaaaatggtctcagctcagattgcaggctgaaacccgcctgcatgaagatggaattgctagtaatcgcggatcagcatgccgcggtgaatacgttcccgggccttgtacacaccgcccgtcacaccatgagagccggggacacccgaagtcggttgggtaaccgtaaggagcccgccgccgaaggtggaatcggtaattggggtgaagtcgtaacaaggtagccgtatcggaaggtgcggctggatcacctccta

SEQ ID NO: 833 - DNA, 1318 bp, Eubacteriaceae bacterium P4P_50 P4
gatgaacgctggcggcgtgcctaacacatgcaagtcgaacgagtggcggacgggtgagtaacacgtaagtaatcaacctataacacacgaataactaatagaaatgttagctaatacgagataaacaaaggcggttatagacgagcttgcgtctgattagctagttggtggggtaagagcctaccaaggcgacgatcagtagccgacctgagagggtgaacggccacattggaactgagagacggtccaaactcctacgggaggcagcagtgggggatattgcacaatggggggaaccctgatgcagcaacgccgcgtgaacgaagaaggccctagggtcgtaaagttctgtcgtatgggaagatgacagtaccatacaagaaagccccggctaactacgtgccagcagccgcggtaatacgtagggggcaagcgttatccggaattactgggcgtaaagggtgcgtaggcggcttgttaagtcaaggttaaaaggcagtagctcaactactgttcggccttgaaactattaagcttgagtataggagaggaaagtggaattcccagtgtagcggtgaaatgcgtagatattgggaggaataccggtggcgaaggcgactttctggactaactgacgctgaggcacgaaagtgtgggtagcaaacaggattagataccctggtagtccacaccgtaaacgatgaacactaggtgtcgggatctcggtgccggcgcaaacgcaataagtgttccgcctggggagtacgttcgcaagaataaaactcaaaggaattgacggggacccgcacaagtagcggagcatgtggtttaattcgaagcaacgcgaagaaccttacctaagcttgacatgcacaggtggtgcatggttgtcgtcagctcgtgtcgtgagatgttgggttaagtcccgcaacgagcgcaacccctattaatagttgccagtgcgcaggcactctagtaagacagttagggataacctaaaggaaggtggggatgacgtcaaatcatcatgccccttatgcttagggctacacacgtgctacaatggccgtcaaagagaagcgaatctgtgaagaagagcaaacctgaaacggtccaagttcggatgtaggctgaaactcgcctacagaagtcggagttactagtaatcgcaaatcagaatgttgcggtgaatgcgttcccgggtcttgtacacaccgcccgtcacaccatgggagctgagggcacccaaagtcagtatctaagaagctgcctaaggtgaacttagtaactggggtgaagtcgtaacaaggtagccgta

SEQ ID NO: 834 - DNA, 1527 bp, Eubacterium barkeri
  modified_base (617)..(618): a, c, t, g, unknown or other
  modified_base (1473)..(1473): a, c, t, g, unknown or other
  modified_base (1475)..(1479): a, c, t, g, unknown or other
  modified_base (1488)..(1493): a, c, t, g, unknown or other
  modified_base (1504)..(1512): a, c, t, g, unknown or other
tttaattgagagtttgatcctggctcaggacgaacgctggcggtatgcttaacacatgcaagtcgaacgagaagctttttatggatccttcgggagaaataagagtggaaagtggcgaacgggtgagtaacgcgtgggtaacctgcctcatggaaaggaatagcctcgggaaactgggagtaaagccttatattattaagacatcgcatggtgttttaatgaaaactccggtgccatgagatggacccgcgtcccattagctagttggtgagataacagcccaccaaggcaacgatgggtaaccggtctgagagggcgaacggtcacactggaactgagacacggtccagactcctacgggaggcagcagtggggaatattgcgcaatgggggcaaccctgacgcagcaataccgcgtgagtgaagaaggttttcggatcgtaaaactcttttattggggaagaagaagtgacggtacccaatgaagaagtcccggctaactacgtgccagcagccgcggtaatacgtaggggacaagcgttgtccggaatcactgggcgtaaagggcgcgtaggcggttttataagtcagatgtgaaaggtaccggctcaaccggnnacgtgcatttgaaactgtaagacttgagtactggagaggcaagtggaattcctagtgtagcggtgaaatgcgtagatattaggaggaacaccggtggcgaaggcggcttgctggacagatactgacgctgaggtgcgaaagcgtggggagcgaacaggattagataccctggtagtccacgccgtaaacgatgatgactaggtgttggggaaactcagtgccgcagttaacacattaagtcatccgcctggggagtacgaccgcaaggttgaaactcaaaggaattgacggggacccgcacaagcagcggagcatgtggtttaattcgaagcaacgcgaagaaccttaccaggccttgacatcctctgaccatcctagagataggagatttccttcgggaacagagagacaggtggtgcatggttgtcgtcagctcgtgtcgtgagatgttgggttaagtcccgcaacgagcgcaacccttgcctttagttgccagcattaagttgggcactctaaagggactgccgtagacaatacggaggaaggtggggacgacgtcaaatcatcatgccccttatggcctgggctacacacgtgctacaatgggttgggacaaagggaagcgaagccgcgaggtgaagccaatcccataaaacaacccccagttcggattgcaggctgaaacccgcctgcatgaagttggagttgctagtaatcgcagatcagaatgctgcggtgaatgcgttcccgggtcttgtacacaccgcccgtcacaccacgagagttggcaacacccgaagccagtgagcgaaccgcaaggacgcagctgtcgaaggtggggtcagtaattggggngnnnnngtaacaagnnnnnngtatcggaagnnnnnnnnngatcacctcctttct

SEQ ID NO: 835 - DNA, 1538 bp, Eubacterium biforme
tggagagtttgatcctggctcaggatgaacgctggcggcatgcctaatacatgcaagtcgaacgagaggaaggaaagcttgcttttctgaatctagtggcgaacgggtgagtaacacgtaggtaacctgcccatgtgcccgggataacttctggaaacggatgctaaaaccggataggtagcagacaagcatttgactgctattaaagtggctaaggccatgaacatggatggacctgcggtgcattagctagttggtgaggtaacggcccaccaaggcgacgatgcatagccggcctgagagggcggacggccacattgggactgagacacggcccaaactcctacgggaggcagcagtagggaattttcgtcaatggggggaaccctgaacgagcaatgccgcgtgagtgaggaaggtcttcggatcgtaaagctctgttgtaagagaaaaacgacattcatagggaatgatgagtgagtgatggtatcttaccagaaagtcacggctaactacgtgccagcagccgcggtaatacgtaggtggcgagcgttatccggaatgattgggcgtaaagggtgcgtaggtggcagaacaagtctggagtaaaaggtatgggctcaacccgtactggctctggaaactgttcagctagagaacagaagaggacggcggaactccatgtgtagcggtaaaatgcgtagatatatggaagaacaccggtggcgaaggcggccgtctggtctgttgctgacactgaagcacgaaagcgtggggagcaaataggattagataccctagtagtccacgccgtaaacgatgagaactaggtgttgggggaataactcagtgccgcagttaacgcaataagttctccgcctggggagtatgcacgcaagtgtgaaactcaaaggaattgacgggggcccgcacaagcggtggagtatgtggtttaattcgaagcaacgcgaagaaccttaccaggccttgacatcccttgcagaggtatagagatatatccgaggttatcaaggagacaggtggtgcatggttgtcgtcagctcgtgtcgtgagatgttgggttaagtcccgcaacgagcgcaacccttgtgatatgttactaacattgagttgaggactcatatcagactgccggtgataaaccggaggaaggtggggatgacgtcaaatcatcatgccccttatggcctgggctacacacgtactacaatggcgtctacaaagagcggcaagcctgtgaaggcaagcgaatctcataaaggacgtctcagttcggattgaagtctgcaacccgacttcatgaagctggaatcgctagtaatcgcgaatcagcatgtcgcggtgaatacgttctcgggccttgtacacaccgcccgtcaaaccatgggagttggtaatgcccgaagccggtggcataacctttcgaggagtgagccgtcgaaggcaggaccgatgactggggttaagtcgtaacaaggtatccctacgggaacgtggggatggatcacctcctttct

SEQ ID NO: 836 - DNA, 1438 bp, Eubacterium brachy
gatgaacgctggcggcgtgcttaacacatgcaagtcgagcgagaagttttgaaaagattcttcggatgaaatttaaaatggaaagcggcggacgggtgagtaacgcgtaggcaaccatacaaagggatagcatttggaaacgaatattaataccttatgaaacttaactagtgcatgctaggtaggtcaaagatttatcggtatgggatgggcctgcgtctgactgcccttagctagttggtgaggtaacggctcaccaaggcgacgatcagtagccgacctgagagggtgaacggccacattggaactgagacacggtccaaactcctacgggaggcagcagtggggaatattgcacaatgggggaaaccctgatgcagcaacgccgcgtgaacgatgaaggcctttgggtcgtaaagttctgttctaggtgatgaaaactgacagtaacctaggagaaagccccggctaactccgtgccagcagccgcggtaatactggagggggcaagcgttatccggaattattgggcgtaaagggtacgtaggtggccttttaagcgtagggtataaggcaatggctcaaccattgttcgccctatgaactggaaggcttgagtgcaggagaggaaagcggaattcctagtgtagcggtggaatgcatagatattaggaggaacatcagcggcgaaggcggctttctggactgcaactgacactgaggtacgaaagcgtggggagcaaacaggattagataccctggtagtccacgccgtaaacgatgagcactaggtgtcggggtcgtaaggcttcggtgccgtagttaacgcattaagtgctccgcctggggagtacgcacgcaagtgtgaaactcaaaggaattgacggggacccgcacaagcagcggagcatgtggtttaattcgaagcaacgcgagaaccttaccaggacttgacatccttctgaccggtctttaataggacctttcttttgacagaagagacaggtggtgcatggttgtcgtcagctcgtgtcgtgagatgttgggttaagtcccgcaacgagcgcaacccttgtcattagttgccatcattaagttgggcactctagtgagactgccggggacaactcggaggaaggtggggatgacgtcaaatcatcatgccccttatgttctgggctacacacgtgctacaatggctggtacaaagagaagcaagaccgcaaggtggagcaaagctcaaaaaccagccccagttcggattgtaggctgaaactcgcctacatgaagtcggagttgctagtaatcgcagatcagaatgctgcggtgaatgcgttcccgggtcttgtacacaccgcccgtcacaccatggaagttgggggcgcccaaagttggcagataaatatgctacctaaggtgaaaccaatgactggggtga

SEQ ID NO: 837 - DNA, 1472 bp, Eubacterium budayi
agagtttgatcctggctcaggacgaacgctggcggcgtgcctaacacatgcaagtcgagcgatgaagtttccttcgggaaacggattagcggcggacgggtgagtaacacgtgggtaacctgcctcatagaggggaatagcctcccgaaagggagattaataccgcataacattgcagtttcgcatgaaacagcaattaaaggagcaatccgctatgagatggacccgcggcgcattagctagttggtaaggtaatggcttaccaaggcgacgatgcgtagccgacctgagagggtgatcggccacattgggactgagacacggcccagactcctacgggaggcagcagtggggaatattgcacaatgggggaaaccctgatgcagcaacgccgcgtgagtgatgacggtcttcggattgtaaagctctgtctttgggcacgataatgacgtacccaaggaggaagccacggctaactacgtgccagcagccgcggtaatacgtaggtgccgaacgttgtccggatttactggccgtaaagggagcgtaggcggatttttaagtgggatgtgaaatacccgggctcaacctgggtgctgcattccaaactgggaatctagagtgcaggaggggagagtggaattcctagtgtagcggtgaaatgcgtagagattaggaagaacaccagtggcgaaggcgactctctggactgtaactgacgctgaggctcgaaacgtggggagcgaacaggattagataccctggtagtccacgccgtaaacgatgaatactaggtgtaggggtttcaacacctctgtgccgccctaacgcattaagtattccgcctggggagtacggtcgcaagattaaaactcaaaggaattgacgggggcccgcacaagtagcggagcatgtggtttaattcgaagcaacgcgaagaaccttacctagacttgacatcctctgcattacccttaatcggggaagttccttcgggaacagagtgacaggtggtgcatggttgtcgtcagctcgtgtcgtgagatgttgggttaagtcccgcaacgagcgcaacccctattgttagttgctaccattaagttgagcactctagcgagactgcctgggttaaccaggaggaaggtggggatgacgtcaaatcatcatgccccttatgtctagggctacacacgtgctacaatggcaagtacagagagatgcaataccgcgaggtggagctaaacttcaaaacttgtctcagttcggattgtaggctgaaactcgcctacatgaagctggagttactagtaatcgcgaatcagcatgtcgcggtgaatacgttcccgggccttgtacacaccgcccgtcacaccatgagagttggcaatacccaaagttcgtgagctaacgcgtaagcaggcagctacctaaggtagggtcagcgattggggtgaagtcgtaacaaggtaacc

SEQ ID NO: 838 - DNA, 1338 bp, Eubacterium callanderi
cttcgggtgacattagaactggaaagtggcgaacgggtgagtaacgcgtgggtaacctgccctatggaaaggaatagcctcgggaaactgggagtaaagccttatattatggttttgtcgcatggcaagatcatgaaaactccggtgccataggatggacccgcgtcccattagctagttggtgagataacagcccaccaaggcgacgatgggtaaccggtctgagagggcgaacggtcacactggaactgagacacggtccagactcctacgggaggcagcagtggggaatattgcgcaatgggggcaaccctgacgcagcaataccgcgtgagtgaagaaggttttcggatcaaagctctgttattggggaagaagaatgacggtagagaaccgctaactacgtgccagcagccgcggtaatacgtaggggacaagcgtttccggaatgactgggcgtaaagggcgcgtaggcggtctattaagttgatgtgaaaggtaccggctcaaccggtgaagtgcattggaaactggtaacttgagtattggagaggcaagtggaattcctagtgtacggtgaaatgcgtaatattaggaggaacaccagtggcgaaggcggcttgctggacaaatactgacgctgagtgcgaaagcgtggggagcgaacaggatcagataccctggtagtccacgccgtaaacgatgaatgctaggtgttggggaaactcagtgccgcagttaacacaataagcattccgcctggggagtacgaccgccaggttgaaactcaaaggaattgacggggacccgcacaagcagcggagcatgtggtttaattcgaagcaacgcgaagaagcttaccattggtaactggcagacttgagtcttggagagggaaagtttccttcgggaacagagagacaggtggtgcatggttgtcgtcagctcgtgtcgtgagatgttgggttaagtcccgcaacgagcgcaacccctgcctttagttgccagcattaagttgggcactctagagggactgccgtagacaatacggaggaaggtggggacgacgtcaaatcatcatgccccttatgacctgggctacacacgtgctacaatggtctgaacagagggccgcgaagccgcgaggtgaagcaaatcccttaaaacagatcccagttcggattgcaggctgcaactcgcctgcatgaagttggagttgctagtaatcgcggatcagaatgccgcggtgaatgcgttcccgggtcttgtacacaccgcccgtcacaccacgagagttggcaacacccgaagcctgtgagagaaccgcaaggactcagc

SEQ ID NO: 839 - DNA, 1524 bp, Eubacterium cellulosolvens
  modified_base (1492)..(1492): a, c, t, g, unknown or other
tgagtttgatcctggctcaggatgaacgctggcggcgtgcttaacacatgcaagtcgagctaagcactctggaagattccttcgggatgattccttagtgacttagcggcggacgggtgagtaacgcgtgggcaacctgccttgtacagggggataacagttagaaatgactgctaataccgcataagcgcacagcatggcatcatgcagtgtgaaaaactccggtggtacaagatgggcccgcgttggattagcttgttggtggggtaacggcccaccaaggcgacgatccatagccggactgagaggtcgaacggccacattgggactgagacacggcccagactcctacgggaggcagcagtggggaatattgcacaatggaggaaactctgatgcagcgacgccgcgtgagtgatgaagtatttcggtatgtaaagctctatcagcagggaagaaattgacggtacctgactaagaagccccggctaactacgtgccagcagccgcggtaatacgtagggggcaagcgttatccggatttactgggtgtaaagggagcgtagacggcgatgcaagtctgaagtgaaaacctggggctcaaccccaggattgctttggaaactgtattgctagagtaccggaggggtaagcggaattcctagtgtagcggtgaaatgcgtagatattaggaggaacaccggtggcgaaggcggcttactggacggcaactgacgttgaggctcgaaagcgtggggagcaaacaggattagataccctggtagtccacgccgtaaacgatgaatactaggtgtcagcaggcaaagcctgttggtgccgccgctaacgcattaatgtattccacctggggagtacgttcgcaagaatgaaactcaaaggaattgacggggacccgcacaagcggtggagcatgtggtttaattcgaagcaacgcgaagaaccttaccaaatcttgacatccctctgacagatccttaatcggatccttccttcgggacagaggagacaggtggtgcatggttgtcgtcagctcgtgtcgtgagatgttgggttaagtcccgcaacgagcgcaacccttatccttagtagccagcaggtcaagctgggcactctggggagactgccagggagaacctggaggaaggtggggatgacgtcaaatcatcatgccccttatgatttgggctacacacgtgctacaatggcgtgaacagagggaagcgaagccgcgaggcctggcaaatctcaaaaaacacgtcccagttcggactgtagtctgcaactcgactacacgaagctggaatcgctagtaatcgcagatcagaatgctgcggtgaatacgttcccgggtcttgtacacaccgcccgtcacaccatgggagttggtaatgcccgaagtctgtgacccaaccgcaaggagggagcagccgaaggcagggccagtaactggggtgaagtcgtaacaaggtanccgtatcggaaggtgccggctggatcaccttt

SEQ ID NO: 840 - DNA, 1362 bp, Eubacterium contortum
cggattgaagagttttgcgactgagcggcggacgggtgagtaacgcgtgggtaacctgcctcatacagggggataacagttagaaatgactgctaataccgcataagaccacggtaccgcatggtaccgtgggaaaaactccggtggtatgagatggacccgcgtctgattagctagttggtaaggtaacggcttaccaaggcgacgatcagtagccgacctgagagggtgaccggccacattgggactgagacacggcccaaactcctacgggaggcagcagtggggaatattgcacaatgggggaaaccctgatgcagcgacgccgcgtgaaggatgaagtatttcggtatgtaaacttctatcagcagggaagaaaatgacggtacctgactaagaagccccggctaactacgtgccagcagccgcggtaatacgtagggggcaagcgttatccggatttactgggtgtaaagggagcgtagacggttatgtaagtctgatgtgaaaacccggggctcaaccccgggactgcattggaaactatgtaactagagtgtcggagaggtaagtggaattcctagtgtagcggtgaaatgcgtagatattaggaggaacaccagtggcgaaggcggcttactggacgatgactgacgttgaggctcgaaagcgtggggagcaaacaggattagataccctggtagtccacgccgtaaacgatgcatactaggtgtcgggtggcaaagccattcggtgccgcagcaaacgcaataagtatgccacctggggagtacgttcgcaagaatgaaactcaaaggaattgacggggacccgcacaagcggtggagcatgtggtttaattcgaagcaacgcgaagaaccttacctgctcttgacatccccctgaccggcgcgtaatggtgcctttccttcgggacagggctagtggaggggtgaagttcgtagacagctcgtgtcgtgagatgttgggttaagtcccgcaacgagcgcaacccttatctttagtagccagcggttcggccgggcactctagagagactgccagggataacctggaggaaggtggggatgacgtcaaatcatcatgccccttatgagcagggctacacacgtgctacaatggcgtaaacaaagggaggcgaagccgcgaggtggagcaaatcccaaaaataacgtctcagttcggattgtagtctgcaactcgactacatgaagctggaatcgctagtaatcgcgaatcagaatgtcgcggtgaatacgttcccgggtcttgtacacaccgcccgtcacaccatgggagttggtaacgcccgaagtcagtgacccaaccgtaaggagggag

SEQ ID NO: 841 - DNA, 1446 bp, Eubacterium coprostanoligenes
gtgtgcctaacacatacaagtcagtcgacgagcttgacgaacgattcttcggatgaattctgatatgactgagtggcggacgggtgagtaacgcgtgagcaacctgcccttcagagggggatagcgtctggaaacggacggtaataccgcataatgtacaatgatggcatcattgatgtaccaaagctattgcgctgaaggatgggctcgcgtctgattagatagttggtggggtaacggcctaccaagtcgacgatcagtagccggactgagaggttgaacggccacattgggactgagacacggcccagactcctacgggaggcagcagtggggaatattgcacaatgggcgcaagcctgatgcagcaacgccgcgtggaggaagacggttttcggattgtaaactcctgttcttagtgaagaaaaatgacggtagctaaggagcaagccacggctaactacgtgccagcagccgcggtaatacgtaggtggcaagcgttgtccggaattactgggtgtaaagggagcgcaggcgggggagcaagtcagctgtgaaatctatgggcttaacccataaactgcagttgaaactgttcttcttgagtgaagtagaggttggcggaattccgagtgtagcggtgaaatgcgtagatattcggaggaacaccggtggcgaaggcggccaactgggcttttactgacgctgaggctcgaaagtgtggggagcaaacaggattagataccctggtagtccacactgtaaacgatgataactaggtgtagggggtctgaccccttctgtgccgcagctaacgcaataagttatccacctggggagtacgaccgcaaggttgaaactcaaaggaattgacggggacccgcacaagcagtggattatgtggtttaattcgatgcaacgcgaagaaccttaccagcacttgacatccaactaacgaaatagagatatattaggtgcccctcggggaaagttgagacaggtggtgcatggttgtcgtcagctcgtgtcgtgagatgttgggttaagtcccgcaacgagcgcaacccctgccattagttgctacgcaagagcactctaatgggaccgctaccgacaaggtggaggaaggtggggatgacgtcaaatcatcatgccccttatgtgctgggctacacacgtaatacaatggtcgttaacaaagagaagcaataccgcgaggtggagcaaaacttcaaaaacgatctcagttcggactgtaggctgaaactcgcctgcacgaagttggaattgctagtaatcgtggatcagcatgccacggtgaatacgttcccgggtcttgtacacaccgcccgtcacaccatgggagccggtaatacccgaagtcagtagtctaaccttaatggaggacgctgccgaaggtaggattggcgactggggtgaagtcgt

SEQ ID NO: 842 - DNA, 1541 bp, Eubacterium cylindroides
tggagagtttgatcctggctcaggatgaacgctggcggcatgcctaatacatgcaagtcgaacggaccgaagggaaagcttgcttttcctgaagtcagtggcgaacgggtgagtaacacgtaggtaacctgcccatgtgcccgggacaacgcctggaaacgggtgctaaaaccggataggtagagagatcgcatgaactttctattaaaggggctacggccctgaacatggatggacctgcggtgcattagctagttggtgaggtaacggcccaccaaggcgacgatgcatagccgacctgagagggcgaacggccacattgggactgagacacggcccaaactcctacgggaggcagcagtagggaattttcgtcaatggggggaaccctgaacgagcaatgccgcgtgagtgaagacggtcttcggattgtaaagctctgttgcgagagaaaaacgacacggatagggaatgatccgtgggtgatggtatctcgccagaaagtcacggctaactacgtgccagcagccgcggtaatacgtaggtggcgagcgttatccggaatgattgggcgtaaagggtgcgtaggcggcccgttaagtctggagtcaaagccggcagctcaactgtcgtacgctttggaaactggcgggctggagtgcagaagagggcgatggaactccatgtgtagcggtaaaatgcgtagatatatggaagaacaccagtggcgaaggcggtcgcctggtctgcaactgacgctgaagcacgaaagcgtggggagcaaataggattagataccctagtagtccacgccgtaaacgatgagaactaagtgttgggggaataactcagtgctgcagttaacgcaataagttctccgcctggggagtatgcacgcaagtgtgaaactcaaaggaattgacgggggcccgcacaagcggtggagtatgtggtttaattcgaagcaacgcgaagaaccttaccaggccttgacatcccgggcaagggcgtagagatacgccggaggctatcccggtgacaggtggtgcatggttgtcgtcagctcgtgtcgtgagatgttgggttaagtcccgcaacgagcgcaacccttgtgatatgttactaccagtaagatgaggactcatatcagactgccggtgacaaaccggaggaaggtggggatgacgtcaaatcatcatgccccttatggcctgggctacacacgtactacaatggcgcatacaaagagcagcgaacccgtgagggcaggcgaatctcgcaaagtgcgtctcagttcggattgaagtctgcaacccgacttcatgaagttggaatcgctagtaatcgcgaatcagcatgtcgcggtgaatacgttctcgggccttgtacacaccgcccgtcaaaccatgggagttggtaatacccgaagccggtggcataacccattcagggagtgagccgtcgaaggtaggatcgatgactggggttaagtcgtaacaaggtatccctacgggaacgtggggatggatcacctcctttct

SEQ ID NO: 843 - DNA, 1470 bp, Eubacterium desmolans
  modified_base (1)..(1): a, c, t, g, unknown or other
  modified_base (32)..(32): a, c, t, g, unknown or other
  modified_base (275)..(275): a, c, t, g, unknown or other
  modified_base (401)..(401): a, c, t, g, unknown or other
  modified_base (575)..(575): a, c, t, g, unknown or other
  modified_base (580)..(580): a, c, t, g, unknown or other
  modified_base (602)..(602): a, c, t, g, unknown or other
  modified_base (917)..(919): a, c, t, g, unknown or other
  modified_base (957)..(958): a, c, t, g, unknown or other
  modified_base (980)..(980): a, c, t, g, unknown or other
  modified_base (1017)..(1017): a, c, t, g, unknown or other
  modified_base (1026)..(1026): a, c, t, g, unknown or other
  modified_base (1039)..(1039): a, c, t, g, unknown or other
  modified_base (1080)..(1080): a, c, t, g, unknown or other
  modified_base (1180)..(1181): a, c, t, g, unknown or other
  modified_base (1196)..(1196): a, c, t, g, unknown or other
  modified_base (1374)..(1375): a, c, t, g, unknown or other
ntttttagagagtttgatcctggctcaggatnaacgctggcggcgtgcctaacacatgcaagtcgaacggagttattttggaaatctcttcggagatggaattcataacttagtggcggacgggtgagtaacgcgtgagcaatctgcctttaggtgggggataacagtcggaaacggctgctaataccgcataatacgttttgggggcatccttgaaacgtcaaagatttattgcctttagatgagctcgcgtctgattagctggttggcggggnaacggcccaccaaggcgacgatcagtagccggactgagaggttgaacggccacattgggactgagacacggcccagactcctacgggaggcagcagtggggaatattgcgcaatgggggaaacccngacgcagcaacgccgcgtgattgaagaaggccttcgggttgtaaagatctttaatcagggacgaattttgacggtacctgaagaataagctccggctaactacgtgccagcagccgcggtaatacgtagggagcaagcgttatccggatttactgggtgtaaagggcgcgcagncgggncggcaagttgggagtgaaatcngggggcttaacccccgaactgctttcaaaactgctggtcttgagtgatggagaggcaggcggaattccgtgtgtagcggtgaaatgcgtagatatacggaggaacaccagtggcgaaggcggcctgctggacattaactgacgctgaggcgcgaaagcgtggggagcaaacaggattagataccctggtagtccacgccgtaaacgatggatactaggtgtgggaggtattgaccccttccgtgccgcagttaacacaataagtatcccacctggggagtacggccgcaaggttgaaactcaaaggaattgacgnnngcccgcacaagcagtggagtatgtggtttaattcgaannaacgcgaagaaccttaccaggncttgacatcccggtgaccgtcctagagataggacttnccttcgggncaacggtgacagntggtgcatggttgtcgtcagctcgtgtcgtgagatgttggnttaagtcccgcaacgagcgcaacccttacggttagttgatacgcaagatcactctagccggactgccgttgacaaaacggaggaaggtggggacgacgtnnaatcatcatgccccntatgacctgggctacacacgtactacaatggcagtcatacagagggaagcaaaatcgcgaggtggagcaaatccctaaaagctgtcccagttcagattgcaggctgcaacccgcctgcatgaagtcggaattgctagtaatcgcggatcagcatgccgcggtgaatacgttcccgggnnttgtacacaccgcccgtcacaccatgagagccgtcaatacccgaagtccgtagcctaaccgcaaggggggcgcggccgaaggtaggggtggtaat

SEQ ID NO: 844 - DNA, 1013 bp, Eubacterium dolichum
  modified_base (10)..(10): a, c, t, g, unknown or other
  modified_base (14)..(14): a, c, t, g, unknown or other
  modified_base (49)..(49): a, c, t, g, unknown or other
  modified_base (74)..(76): a, c, t, g, unknown or other
atcgtaaagntctntgtaagagaaaaacgatggatataggaaatgatgnccaagtgatggtatcttaccagaannnacggctaactacgtgccagcagccgcggtaatacgtaggtggcaagcgttatccggaatgattgggcgtaaagggtgcgtaggtggtgcattaagtctgaagtaaaagccagcagctcaactgctgtaagctttggaaactggtgtactagagtgcaggagagggcgatggaattccatgtgtagcggtaaaatgcgtagatatatggaggaacaccagtggcgaaggcggtcgcctggcctgtaactgacactgaggcacgaaagcgtggggagcaaataggattagataccctagtagtccacgccgtaaacgatgagaactaagtgttggagagattcagtgctgcagttaacgcaataagttctccgcctggggagtatgcacgcaagtgtgaaactcaaaggaattgacgggggcccgcacaagcggtggagtatgtggtttaattcgaagcaacgcgaagaaccttaccaggccttgacatggatataaatgttctagagatagaaagatagctatatatcacacaggtggtgcatggttgtcgtcagctcgtgtcgtgagatgttgggttaagtcccgcaacgagcgcaacccttgtcgcatgttaccagcattcagttggggactcatgtgagactgccggtgacaaaccggaggaaggtggggatgacgtcaaatcatcatgccccttatggcctgggctacacacgtactacaatggcgtctacaaagaggagcgacacagtgatgtgaagcaaatctcataaaggacgtctcagttcggattgaagtctgcaactcgacttcatgaagtcggaatcgctagtaatcgcagatcagcatgctgcggtgaatacgttctcgggccttgtacacaccgcccgtcaaaccatgggagttggtaatacccgaagccggtggcataaccgca

SEQ ID NO: 845 - DNA, 1394 bp, Eubacterium eligens
  modified_base (19)..(20): a, c, t, g, unknown or other
  modified_base (44)..(45): a, c, t, g, unknown or other
  modified_base (1382)..(1382): a, c, t, g, unknown or other
tcgaacgaagcatttaggnnacagattatttcggtatgaagttnnttatgactgagtggcggacgggtgagtaacgcgtgggtaacctgccttgtactgggggatagcagctggaaacggctggtaataccgcataagcgcacaatgttgcatgacatggtgtgaaaaactccggtggtataagatggacccgcgtctgattagctagttggtgagataacagcccaccaaggcgacgatcagtagccgacctgagagggtgaccggccacattgggactgagacacggcccagactcctacgggaggcagcagtggggaatattgcacaatggaggaaactctgatgcagcgacgccgcgtgagtgaagaagtaattcgttatgtaaagctctatcagcagggaagatagtgacggtacctgactaagaagctccggctaaatacgtgccagcagccgcggtaatacgtatggagcaagcgttatccggatttactgggtgtaaagggagtgtaggtggccatgcaagtcagaagtgaaaatccggggctcaaccccggaactgcttttgaaactgtaaggctggagtgcaggaggggtgagtggaattcctagtgtagcggtgaaatgcgtagatattaggaggaacaccagtggcgaaggcggctcactggactgtaactgacactgaggctcgaaagcgtggggagcaaacaggattagataccctggtagtccacgccgtaaacgatgaatactaggtgtcggggcccataagggcttcggtgccgcagcaaacgcaataagtattccacctggggagtacgttcgcaagaatgaaactcaaaggaattgacggggacccgcacaagcggtggagcatgtggtttaattcgaagcaacgcgaagaaccttaccaagtcttgacatcccttactgcgggtaaagagagtgtcgttgcctagggacagtggagacaggtggtgcatggttgtcgtcagctcgtgtcgtgagatgttgggttaagtcccgcaacgagcgcaacccctatccttagtagccagcagtaagatgggcactctagggagactgccagggataacctggaggaaggtggggatgacgtcaaatcatcatgccccttatgacttgggctacacacgtgctacaatggcgtaaacaaagtgaagcgaagtcgtgaggccaagcaaatcacaaaaataacgtctcagttcggattgtagtctgcaactcgactacatgaagctggaatcgctagtaatcgcagatcagaatgctgcggtgaatacgttcccgggtcttgtacacaccgcccgtcacaccatgggagtcgaaaatgcccgaagtcggtgacctaacgnaagaaggagccg

SEQ ID NO: 846 - DNA, 1319 bp, Eubacterium fissicatena
  modified_base (23)..(23): a, c, t, g, unknown or other
  modified_base (43)..(45): a, c, t, g, unknown or other
  modified_base (887)..(887): a, c, t, g, unknown or other
ggattgaagagtgttgcgacggngcggcggacgggtgagtgannngtgggtaacctgcctcatacagggggataacagttagaaatgactgctaataccgcataagaccacggtaccgcatggtacagtgggaaaaactccggtggtatgagatggacccgcgtctgattagctagttggtaaggtaacggcttaccaaggcgacgatcagtagccgacctgagagggtgaccggccacattgggactgagacacggcccaaactcctacgggaggcagcagtggggaatattgcacaatgggggaaaccctgatgcagcgacgccgcgtgaaggatgaagtatttcggtatgtaaacttctatcagcagggaagaaaatgacggtacctgactaagaagccccggctaactacgtgccagcagccgcggtaatacgtagggggcaagcgttatccggatttactgggtgtaaagggagcgtagacggttatgtaagtctgatgtgaaaacccggggctcaaccccgggactgcattggaaactatgtaactagagtgtcggagaggtaagtggaattcctagtgtagcggtgaaatgcgtagatattaggaggaacaccagtggcgaaggcggcttactggacgatcactgacgttgaggctcgaaagcgtggggagcaaacaggattagataccctggtagtccacgccgtaaacgatgaatactagtgtcgggtggcaaagccattcggtgccgcagcaaacgcaataagtattccacctggggagtacgttcgcaagaatgaaactcaaaggaattgacggggacccgcacaagcggtggacatgtggtttaattgaagcaacgcgatagggtgcaagcgctntccagaccacactgaccggcgtgtaatggcgccttcccttcggggcagtggagacaggtggtgcatggttgtcgtcagctcgtgtcgtgagatgttgggttaagtcccgcaacgagcgcaacccttatctttagtagccagcggtttggccgggcactctagagagactgccagggataacctggaggaaggtggggaggacgtcaaatcatcatgccccttatgagcagggctacacacgtgctacaatggcgtaaacaaagggaggcaataccgcgaggttgagcaaatcccaaaaataacgtctcagttcggattgtagtctgcaactcgactacatgaagctggaatcgctagtaatcgcgaatcagaatgtcgcggtgaatacgttcccgggtcttgtacacaccccccgtcacaccatgggagttg

SEQ ID NO: 847 - DNA, 937 bp, Eubacterium hadrum
  modified_base (83)..(83): a, c, t, g, unknown or other
  modified_base (890)..(890): a, c, t, g, unknown or other
  modified_base (903)..(903): a, c, t, g, unknown or other
  modified_base (923)..(923): a, c, t, g, unknown or other
acgaaacaccttatttgattttcttcggaactgaagatttggtgattgagtggcggacgggtgagtaacgcgtgggtaacctnccctgtacagggggataacagtcagaaatgactgctaataccgcataagaccacagcaccgcatggtgcaggggtaaaaactccggtggtacaggatggacccgcgtctgattagctggttggtgaggtaacggctcaccaaggcgacgatcagtagccggcttgagagagtgaacggccacattgggactgagacacggcccaaactcctacgggaggcagcagtggggaatattgcacaatgggggaaaccctgatgcagcgacgccgcgtgagtgaagaagtatctcggtatgtaaagctctatcagcagggaagaaaatgacggtacctgactaagaagccccggctaactacgtgccagcagccgcggtaatacgtagggggcaagcgttatccggaattactgggtgtaaagggtgcgtaggtggtatggcaagtcagaagtgaaaacccagggcttaactctgggactgcttttgaaactgtcagactggagtgcaggagaggtaagcggaattcctagtgtagcggtgaaatgcgtagatattaggaggaacatcagtggcgaaggcggcttactggactgaaactgacactgaggcacgaaagcgtggggagcaaacaggattagataccctggtagtccacgccgtaaacgatgaatactaggtgtcggggccgtagaggcttcggtgccgcagccaacgcagtaaagtattccacctggggagtacgttcgcaagaatgaaactcaaaggaattgacggggacccgcacaagcggtggagcatgtggtttaattcnaagcaacgcgaanaaccttacctggtcttgacntccttctgaccggt

SEQ ID NO: 848 - DNA, 1342 bp, Eubacterium hallii
caccttttgagattcttcggatgatcgattggtgactgagtggcggacgggtgagtaacgcgtgggtaacctgccctgtacagggggataacagctggaaacggctgctaataccgcataagcgcacgaggagacatctcctagtgtgaaaaactccggtggtacaggatgggcccgcgtctgattagctggttggcagggtaacggcctaccaaggcaacgatcagtagccggtctgagaggatgaacggccacattggaactgagacacggtccaaactcctacgggaggcagcagtggggaatattgcacaatgggggaaaccctgatgcagcaacgccgcgtgagtgaagaagtatttcggtatgtaaagctctatcagcagggaagataatgacggtacctgactaagaagctccggctaaatacgtgccagcagccgcggtaatacgtatggagcaagcgttatccggatttactgggtgtaaagggtgcgtaggtggcagtgcaagtcagatgtgaaaggccggggctcaaccccggagctgcatttgaaactgctcggctagagtacaggagaggcaggcggaattcctagtgtagcggtgaaatgcgtagatattaggaggaacaccagtggcgaaggcggcctgctggactgttactgacactgaggcacgaaagcgtggggagcaaacaggattagataccctggtagtcacgccgtaaacgatgaatactaggtgtcggggccgtataggcttcggtgccgccgcaacgcagtaagtattccacctggggagtacgttggcaagaatgaaactcaaaggaattgacggggacccgcacaagcggtggagcatgtggtttaattcgaagcaacgcgaagaagcttaccaggtcttgacatccttgtgaccgcaccttaatcggggctttccttcgggacagaagagacaggtggtgcatggttgttgtcagctcgtgtcgtgagatgttgggttaagtcccgcaacgagcgcaacccctattttcagtagccagcaggtaaggctgggcactctggagagactgccagggataacctggaggaaggtggggacgacgtcaaatcatcatgccccttatgatctgggcgacacacgtgctacaatggcggtcacagagtgaggcgaacccgcgagggggagcaaaccacaaaaaggccgtcccagttcggactgtagtttgcaacccgactacccgaagctggaatcgctagtaatcgcgaatcagaatgtcgcggtgaatacgttcccgggttttgtaccccccccccgtcacaccctgggagttggaaat

SEQ ID NO: 849 - DNA, 1494 bp, Eubacterium infirmum
gatgaacgctggcggcgtgcctaacacatgcaagtcgagcgagaagtaaagaaatgaagcttcggtagatttcattatggaaagcggcggacgggtgagtaacgcgtaggcaacctgccctgtacagggggatagccacccgaaaaggtgattaataccccatgatgcaagagatacacatgtatcacttgtcaaagatttatcggtatgggatgggcctgcgtctgattagctagttggtagggtaacggcttaccaaggcaacgatcagtagccgacctgagagggtgatcggccacattggaactgagacacggtccaaactcctacgggaggcagcagtggggaatattgcacaatgggggaaaccctgatgcagcaacgccgcgtgaaggaagaaggccttcgggttgtaaacttctgtcctaggggaagaaacaaatgacattacccttggaggaagccccggctaactacgtgccagcagccgcgggtaatacgtagggggcgagcgttatccggaattattgggcgtaaagagtgcgtaggtggcatcttaagcgcagggtttaaggcaatggctcaaccattgttcgccttgcgaactggggtgcttgagtgcaggaggggaaagtggaattcctagtgtagcggtgaaatgcgtagatattaggaggaacaccagtggcgaaggcgactttctggactgttactgacactgaggcacgaaagcgtggggagcaaacaggattagataccctggtagtccacgccgtaaacgatgagcactaggtgtcggggtcgcaagacttcggtgccgcagttaacgcattaagtgctccgcctgggaagtacgcacgcaagtgtaaaactcaaaggaattgacggggacccgcacaagcagcggagcatgtggtttaattcgaagcaacgcgaagaaccttaccaggaacttgacatcctcttgacagatccttaatcggattcttcttcggacaagagagacaggtggtgcatggttgtcgtcagctcgtgtcgtgagatgttgggttaagtcccgcaacgagcgcaacccttgccattagttgccatcatttagttgggcactctagtgggactgccggggaaaactcggaggaaggtggggatgacgtcaaatcatcatgccccttatgttctgggctacacacgtgctacaatggccggtacaacaggcagcgaacccgtgagggggagcgaatcccaaaagccggtcccagttcggactgtaggctgcaactcgcctacacgaagttggagttgctagtaatcgcggatcagaatgccgcggtgaatgcgttcccgggtcttgtacacaccgcccgtcacaccatggaagttgggggtgcccgaagtcggttatttaatctatcgcctaaggcaaaaccaatgactggggtgaagtcgtaaccaaggtagcccgtatcggaaggtgccggctggatcacctcctta

SEQ ID NO: 850 - DNA, 1377 bp, Eubacterium limosum
  modified_base (1310)..(1310): a, c, t, g, unknown or other
gaacgagaagatcagttaagaaccttcgggggaataagtgattggaaagtggcgaacgggtgagtaacgcgtgggtaacctgccctatggaaaggaatagcctcgggaaactgggagtaaagccttatattatggagagatcgcatggtcatttcatgaaaactccggtgccataggatggacccgcgtcccattagctagttggtgagataacagcccaccaaggcgacgatgggtaaccggtctgagagggcgaacggtcacactggaactgagacacggtccagactcctacgggaggcagcagtggggaatattgcgcaatgggggcaaccctgacgcagcaataccgcgtgagtgaagaaggttttcggatcgtaaagctctgttattggggaagaaaacatgacggtacccaatgaggaagtcccggctaactacgtgccagcagccgcggtaatacgtaggggacaagcgttgtccggaatgactgggcgtaaagggcgcgtaggcggtctgataagtcagatgtgaaaggtaccggctcaaccggtgacgtgcatttgaaactgtcagacttgagtattggagaggcaagtggaattcctagtgtagcggtgaaatgcgtagatattaggaggaacaccagtggcgaaggcggcttgctggacaaatactgacgctgaggtgcgaaagcgtggggagcgaacaggattagataccctggtagtccacgccgtaaacgatgaatgctaggtgttggggaaactcagtgccgcagttaacacaataagcattccgcctggggagtacgaccgcaaggttgaaactcaaaggaattgacggggacccgcacaagcagcggagcatgtggtttaattcgaagcaacgcgaagaaccttaccaggtcttgacgtcctctgacaatcccagagatgggacgtttccttcgggaacagagagacaggtggtgcatggttgtcgtcagctcgtgtcgtgagatgttgggttaagtcccgcaacgagcgcaacccctgcctttagttgccagcattgagttgggcactctagagggactgccgtagacaatacggaggaaggtggggatgacgtcaaatcatcatgccctttatgacctgggctacacacgtgctacaatggtctgatcagagggccgcgaaaccgcgaggtgaagcaaatcccttaaaacagatcccagttcggattgcaggctgcaattcgcctgcatgaagttggagttgctagtaatcgcggatcagaatgccgcggtgaatgcgttcccgggtctngtacacaccgcccgtcacaccacgagagttggcaacacccgaagcctgtgagagaaccgcaaggact

SEQ ID NO: 851 - DNA, 1488 bp, Eubacterium moniliforme
gacgaacgctggcggcgtgcctaacacatgcaagtcgagcgatgaartttccttcgggaaatggattagcggcggacgggtgagtaacacgtgggtaacctgccttgtagaggggaatagccttccgaaaggaagattaataccgcataatattgtactttcgcatgaaagaacaattaaaggagcaatccgctacaagatggacccgcggcgcattagctagttggtaaggtaatggcttaccaaggcgacgatgcgtagccgacctgagagggtgatcggccacattgggactgagacacggcccagactcctacgggaggcagcagtggggaatattgcacaatgggggaaaccctgatgcagcaacgccgcgtgagtgatgacggtcttcggattgtaaagctctgtctttggggacgataatgacggtacccaaggaggaagccacggctaactacgtgccagcagccgcggtaatacgtaggtggcgagcgttgtccggatttactgggcgtaaagggagcgtaggcggattcttaagtgggatgtgaaatactcgggcttaacctgagtgctgcattccaaactgggaatctagagtgcaggaggggagagtggaattcctagtgtagcggtgaaatgcgtagagattaggaagaacaccagtggcgaaggcgactctctggactgtaactgacgctgaggctcgaaagcgtggggagcaaacaggattagataccctggtagtccacgccgtaaacgatgaatactaggtgtaggggtttcaacacctctgtgccgccgctaacgcattaagtattccgcctggggagtacggtcgcaagattaaaactcaaaggaattgacgggggcccgcacaagtagcggagcatgtggtttaattcgaagcaacgcgaagaaccttacctagacttgacatcttctgcattacccttaatcggggaagttccttcgggaacagaatgacaggtggtgcatggttgtcgtcagctcgtgtcgtgagatgttgggttaagtcccgcaacgagcgcaacccctattgttagttgctaccattaagttgagcactctagcgagactgcccgggttaaccgggaggaaggtggggatgacgtcaaatcatcatgccccttatgtctagggctacacacgtgctacaatggcaagtacagagagatgcaataccgtgaggtggagctaaacttcaaaacttgtctcagttcggattgtaggctgaaactcgcctacatgaagctggagttactagtaatcgcgaatcagcatgtcgcggtgaatacgttcccgggccttgtacacaccgcccgtcacaccatgagagttggcaatacccaaagttcgtgagctaacgcgtaagcggggcagcgacctaaggtagggtcagcgattggggtgaagtcgtaacaaggtagccgtaggagaacctgcggctggatcacctccttt

SEQ ID NO: 852 - DNA, 1471 bp, Eubacterium multiforme
agagtttgatcctggctcaggacgaacgctggcggcgtgcctaacacatgcaagtcgagcgatgaagtttcttcgggaaacggattagcggcggacgggtgagtaacacgtgggtaacctgccttgtagagggaaatagccttccgaaaggaagattaataccgcataatattgtaccttcgcatgaaggaacaattaaaggagcaatccgctacaagatggacccgcggcgcattagctagttggtaaggtaatggcttaccaaggcgacgatgcgtagccgacctgagagggtgatcggccacattgggactgagacacggcccagactcctacgggaggcagcagtggggaatattgcacaatgggggaaaccctgatgcagcaacgccgcgtgagtgatgacggtcttcggattgtaaagctctgtctttgggacgataatgacgtacccaagaaggaagccacggctaactacgtgccagcagccgcggtaatacgtaggtggcgagcgttgtccggatttactgggcgtaaagggagcgtaggcggattcttaagtgggatgtgaaatactcgggctcaacctgagtgctgcattccaaactgggaatctagagtgcaggaggggagagtggaattcctagtgtagcggtgaaatgcgtagagattaggaagaacaccagtggcgaaggcgactctctggactgtaactgacgctgaggctcgaaagcgtggggagcaaacaggattagataccctggtagtccacgccgtaaacgatgaatactaggtgtaggggtttaaacacctctgtgccgccctaacgcattaagtattccgcctgggagtacggtcgcaagattaaaactcaaagaaattgacgggggcccgcacaagtagcggagcatgtggtttaattcgaagcaacgcgaagaaccttacctagacttgacatcttctgcattacccttaatcggggaagttcttcgggaacagaatgacaggtggtgcatggttgtcgtcagctcgtgtcgtgagatgttgggttaagtcccgcaacgagcgcaacccctattgttagttgctaccattaagttgagcactctagcgagactgcccgggttaaccgggaggaaggtggggatgacgtcaaatcatcatgccccttatgtctagggctacacacgtgctacaatggcaagtacagagagatgcaataccgtgagtggagctaaacttcaaaacttgtctcagttcggattgtaggctgaaactcgcctacatgaagctggagttactagtaatcgcgaatcagcatgtcgcggtgaatacgttcccgggccttgtacacaccgcccgtcacaccatgagagttggcaatacccaaagttcgtgagctaacgcgtaagcaggggcagccacctaaggtagggtcagccatttgggtgaagtcgttaacaaggtaacc

SEQ ID NO: 853 - DNA, 1477 bp, Eubacterium nitritogenes
agagtttgatcctggctcaggacgaacgctggcggcgtgcctaacacatgcaagtcgagcgatgaagtttccttcgggaaacggattaccgccggacgggtgagtaacacgtgggtaacctgcctcatagaggggaatagcctcccgaaagggagattaataccgcataacattgcagtttcgcatgaaacagcaattaaaggagcaatccgctatgagatggacccgcggcgcattagctagttggtaaggtaatggcttaccaaggcgacgatgcgtagccgacctgagagggtgatcggccacattgggactgagacacggcccagactcctacgggaggcagcagtggggaatattgcacaatgggggaaaccctgatgcagcaacgccgcgtgagtgatgacggtcttcggattgtaaagctctgtctttgggacgataatgacgtacccaaggaggaagccacggctaactacgtgccagcagccgcggtaatacgtaggtggcgagcgttgtccggatttactgggcgtaaagggagcgtaggcggatttttaagtgggatgtgaaatacccgggctcaacctgggtgctgcattccaaactgggaatctagagtgcaggaggggagagtggaattcctagtgtagcggtgaaatgcgtagagattaggaagaacaccagtggcgaaggcgactctctggactgtaactgacgctgaggctcgaaagcgtggggagcgaacaggattagataccctggtagtccacgccgtaaacgataaatactaggtgtaggggtttaaacacctctgtgccgccctaacgcattaagtatcccgcctgggaagtacggtcgcaagattaaaactcaaaggaattgacgggggcccgcacaagtagcggagcatgtggtttaattcgaagcaacgcgaagaaccttacctagacttgacatcctctgcattacccttaatcggggaagttcttcgggaacagagtgacaggtggtgcatggttgtcgtcagctcgtgtcgtgagatgttgggttaagtcccgcaacgagcgcaacccctattgttagttgctaccattaagttgagcactctagcgagactgcctgggttaaccaggaggaaggtggggatgacgtcaaatcatcatgccccttatgtctagggctacacacgtgctacaatggcaagtacagagagatgcaataccgcgaggtggagctaaacttcaaaactcgtctcagttcggattgtaggctgaaactcgcctacatgaagctggagttactagtaatccgcgaatcagcatgtcgcggtgaatacgttcccgggccttgtacacaccgcccgtcacaccatgagagttggcaatacccaaagttcgtgagctaacgcgtaagcaggggcagccacctaaggtagggttcagccatttggcctgaagtgcgtaacaaggtaacc

SEQ ID NO: 854 - DNA, 1351 bp, Eubacterium nodatum
gatgaacgctggcggcgtgcctaacacatgcaagttgagcgagaaatcacttaaagaagcttcggtagacttaagagatggagagcagcggacgggtgaggaacgcgtgggaaacctgcccttgacaggaggatagccgagagaaatttcgatttaatacttcataaagcagagcattcgcatggatgaactgccaaagaattatcggtcaaggatggtccagcgtctgattagctggttggtaaggtaccggcttaccaaggcgacgatcagtagccggcctgagagggtgaacggccacattggaactgagacacggtccagactctacgggaggcagcagtggggaatattgcacaatgggcgaagcctgatgcagcaacgccgcgtgaaggaagaaggctttcgagtcgtaaacttctgtccaaagggaagaataatgacggtacctttgaagaaagccccggctaactacgtgccagcagccgcggtaatacgtagggggcgagcgttatccggaattactgggcgtaaagagtatgtaggtggttaagtaagcgtagggtttaaggcgacagcccaactgtcgtatgccccgcgagctgtttaacttgagtacaggaggggaaggcggaattcctagtgtagcgctgaaatgcgtagatattaggaggaacaccagtggcgaaggcggccttctggactgtaactgacactgagatacgaaagcgtgggtagcaaacaggattagataccctggtagtccacgccgtaaacgatgagcactaggtgtcgggctcgcaagagttcggtgccggagcaaacgcattaagtgctccgcctggggagtacgcacgcaagtgtgaaactcaaaggaattgacggggacccgcacaagcagcggagcatgtggtttaattcgaagcaacgcgaagaaccttaccaggacttgacatcccactgaaagctcggttaaaactgagcccttcttcggaacagtggagacaggtggtgcatggttgtcgtcagctcgtgtcgtgagatgttgggttaagtcccgcaacgagcgcaacccttgccgttagttgccatcattaagttgggcactctaatgggactgccggggagaacccggaggaaggcggggatgacgtcaaatcatcatgccccttatgttctgggctacacacgtgctacaatggccgtcacagagggaagcgagagagcgatcttaagcgaaaccaaaaaggcggtcccagttcggactgcaggctgcaactcgcctgcacgaagccggagttgctagtaatcgcggatcagaatgtcgcggtgaatgcgttcccgggtcttg

SEQ ID NO: 855 - DNA, 1386 bp, Eubacterium ramulus
  modified_base (1339)..(1339): a, c, t, g, unknown or other
gcactttacctgatttccttcggggatgattgttctgtgactgagtggcggacgggtgagtaacgcgtggataacctgcctcacacagggggataacagttggaaacggctgctaataccgcataagcgcacagcaccgcatggtgcagtgtgaaaaactccggtggtgtgagatggatccgcgtctgattagcttgttggcggggtaacggcccaccaaggcgacgatcagtagccggcctgagagggcgaccggccacattgggactgagacacggcccagactcctacgggaggcagcagtggggaatattgcacaatgggggaaaccctgatgcagcgacgccgcgtgagcgatgaagtatttcggtatgtaaagctctatcagcagggaagataatgacggtacctgactaagaagctccggctaaatacgtgccagcagccgcggtaatacgtatggagcaagcgttatccggatttactgggtgtaaagggagcgtaggcggtcctgcaagtctgatgtgaaaggccggggctcaaccccgggactgcattggaaactgtaggactagagtgtcggaggggtaagtggaattcctagtgtagcggtgaaatgcgtagatattaggaggaacaccagtggcgaaggcggcttactggacgactactgacgctgaggctcgaaagcgtggggagcaaacaggattagataccctggtagtccacgccgtaaacgatgaatactaggtgttggcaggtaagacctgtcggtgccgcagcaaacgcaataagtattccacctggggagtacgttcgcaagaatgaaactcaaaggaattgacggggacccgcacaagcggtggagcatgtggtttaattcgaagcaacgcgaagaaccttaccaagtcttgacctcccggtgacagatgaaagaccgggttttcccttcggggcaccggtgacaggtggtgcatggttgtcgtcagctcgtgtcgtgagatgttgggttaagtcccgcaacgagcgcaacccttatccccagtagccagcatttcggatgggcactctgtggagactgccagggacaacctggaggaaggtggggatgacgtcaaatcatcatgccccttatgacttgggctacacacgtgctacaatggcgtaaacaaagggaagcgagaccgcgaggtggagcaaatcccaaaaataacgtcccagttcggattgtagtctgcaactcgactacatgaagctggaatcgctagtaatcgcagatcagaatgctgcggtgaatacgttcccgggtcttgtacacaccgcccgtcacaccatgggnagtcggaaatgcccgaagccggtggcctaaccgcaaggaaggagccg

SEQ ID NO: 856 - DNA, 1387 bp, Eubacterium rectale
tcgaacgaagcactttatttgatttccttcgggactgattattttgtgactgagtggcggacgggtgagtaacgcgtgggtaacctgccttgtacagggggataacagttggaaacggctgctaataccgcataagcgcacagcatcgcatgatgcagtgtgaaaaactccggtggtataagatggacccgcgttggattagctagttggtgaggtaacggcccaccaaggcgacgatccatagccgacctgagagggtgaccggccacattgggactgagacacggcccaaactcctacgggaggcagcagtggggaatattgcacaatgggcgaaagcctgatgcagcgacgccgcgtgagcgaagaagtatttcggtatgtaaagctctatcagcagggaagataatgacggtacctgactaagaagcaccggctaaatacgtgccagcagccgcggtaatacgtatggtgcaagcgttatccggatttactgggtgtaaagggagcgcaggcggtgcggcaagtctgatgtgaaagcccggggctcaaccccggtactgcattggaaactgtcgtactagagtgtcggaggggtaagcggaattcctagtgtagcggtgaaatgcgtagatattaggaggaacaccagtggcgaaggcggcttactggacgataactgacgctgaggctcgaaagcgtggggagcaaacaggattagataccctggtagtccacgccgtaaacgatgaatactaggtgttgggaagcattgcttctcggtgccgtcgcaaacgcagtaagtattccacctggggagtacgttcgcaagaatgaaactcaaaggaattgacggggacccgcacaagcggtggagcatgtggtttaattcgaagcaacgcgaagaaccttaccaagtcttgacatccttctgaccggtacttaaccgtaccttctcttcggagcaggagtgacaggtggtgcatggttgtcgtcagctcgtgtcgtgagatgttgggttaagtcccgcaacgagcgcaacccttatctttagtagccagcggtccggccgggcactctagagagactgccagggataacctggaggaaggcggggatgacgtcaaatcatcatgccccttatgacttgggctacacacgtgctacaatggcgtaaacaaagggaagcaaagctgtgaagccgagcaaatctcaaaaataacgtctcagttcggactgtagtctgcaacccgactacacgaagctggaatcgctagtaatcgcagatcagaatgctgcggtgaatacgttcccgggtcttgtacacaccgcccgtcacaccatgggagttgggaatgcccgaagccagtgacctaaccgaaaggaa

SEQ ID NO: 857 - DNA, 929 bp, Eubacterium ruminantium
  modified_base (12)..(15): a, c, t, g, unknown or other
  modified_base (36)..(36): a, c, t, g, unknown or other
tcgaacgaagannnnctggagtgcttgcacttgganggactgagtggcggacgggtgagtaacgcgtgggtaacctgccttatacagggggataacagttggaaacgactgctaataccgcataagcgcacggtatcgcatgatacagtgtgaaaaactccggtggtataagatggacccgcgtctgattagcttgttggtgaggtaacggcccaccaaggcgacgatcagtagccggcctgagagggtgaacggccacattgggactgagacacggcccaaactcctacgggaggcagcagtggggaatattgcacaatgggggaaaccctgatgcagcgacgccgcgtgagtgatgaagtatttcggtatgtaaaactctatcagcagggaagataatgacggtacctgactaagaagcaccggctaaatacgtgccagcagccgcggtaatacgtatggtgcaagcgttatccggatttactgggtgtaaagggtgcgtaggtggtatggcaagtcagaagtgaaaggctggggctcaaccccgggactgcttttgaaactgtcaaactagagtacaggagaggaaagcggaattcctagtgtagcggtgaaatgcgtagatattaggaggaacaccagtggcgaaggcggctttctggactgaaactgacactgaggcacgaaagcgtggggagcaaacaggattagataccctggtagtccacgccgtaaacgatgaatactaggtgtcgggcagcatagctgttcggtgccgcagcaaacgcattaagtattccacctggggagtacgttcgcaagaatgaaactcaaaggaattgacggggacccgcacaagcggtggagcatgtggtttaattcgaagcaacgcgaagaaccttaccaggtcttgacatcccgatgaccgc

SEQ ID NO: 858 - DNA, 1384 bp, Eubacterium saburreum
  modified_base (17)..(18): a, c, t, g, unknown or other
  modified_base (1375)..(1375): a, c, t, g, unknown or other
tcgaacgaagctgttannaggaagtcttcggatggaattttaacagacttagtggcggacgggtgagtaacgcgtggataacctgccttatacagggggataacggagagaaatttccgctaagaccgcataagaccacagcaccgcatggtgcaggggtaaaatattaataggtataagatggatccgcgtccgattagcttgttggtgaggtagaggctcaccaaggcgacgatcggtagccggcctgagagggtgaacggccacattgggactgagacacggcccaaactcctacgggaggcagcagtggggaatattggacaatgggggaaaccctgatccagcgacgccgcgtgagtgaagaagtatttcggtatgtaaagctctatcagcagggaagaaaatgacggtacctgactaagaagccccggctaactacgtgccagcagccgcggtaatacgtagggggcaagcgttatccggatttactgggtgtaaagggagcgcagacggccaagcaagtctgaagtgaaatgcatgggctcaacccatgaattgctttggaaactgttggcttgagtgtcggaggggtaagcggaattcctagtgtagcggtgaaatgcgtagatattaggaggaacaccggaggcgaaggcggcttactggacgacaactgacgttgaggctcgaaggcgtggggagcaaacaggattagataccctggtagtccacgcagtaaacgatgaatacttggtgtcggggagataaactcttcggtgccgcaagcaaacgcattaagtattccacctggggagtacgttcgcaagaatgaaactcaaaggaattgacggggacccgcacaagcggtggagcatgtggtttaattcgaagcaacgcgaagaaccttaccaaatcttgacatactcttgaatagttttgtaatgagactagtctttcgggacaagggatacaggtggtgcatggttgtcgtcagctcgtgtcgtgagatgttgggttaagtcccgcaacgagcgcaacccttgtcgtcagtagccagcagtaagatgggcactctgacgagacagccggagataatccggaggaaggtggggatgacgtcaaatcatcatgccccttatgatttgggctacacacgtgctacaatggcgtaaacaaagtgaagcaagaccgcgaggttaagcaaatcacagaaataacgtctcagttcggattgtagtctgcaactcgactatatgaagccggaatcgctagtaatcgcagatcagaatgctgcggtgaatacgttcccgggtcttgtacacaccgcccgtcacaccatgggagtcatcaatgcccgaagtcagtgacctanccgtaagga

SEQ ID NO: 859 - DNA, 1343 bp, Eubacterium saphenum
gatgaacgctggcggcgtgcttaacacatgcaagtcgagcgagaaactacatgcagacacttcggtagaagcgagtagcggaaagcggcggacgggtgagtaacgcgtggcaacctgcccttcacagaggtatagcctcgggaaaccgggattaaaaccacataaaatcataggttcgcatgaaccaaaggtcaaagatttatcggtgaaggatgggcctgcgtctgattagctggttggtagggtaaaagcctaccaaggcgacgatcagtagccgacctgagagggtgatcggccacattggaactgagacacggtccaaactctacgggaggcagcagtgggggatattgcacaatgggggaaaccctgatgcagcaacgccgcgtgaggtatgaaggcctttgggttgtaagcctctgtcctaggggaagaaaaaaatgacggtacccgaggaggaagccccggctaactacgtgccagcagccgcggtaatacgtagggggcaagcgttatccggaattattgggcgtaaagagtgcgtaggtggtctactaagcgcggggtgaaaggcaatggctcaaccattgttagccttgcgaactggcagacttgagtgcaagagaggaaagcggaattcctagtgtagcggtgaaatgcgcagatattaggaggaacaccggcggcgaaggcggctttctggattgtaactgacactgaggcacgaaagcgtgggtagcaaacaggattagataccctggtagtccacgccgtaaacgacgagcactaggtgtcgggacatgagtctcggtgccgcagttaacgcaataagtgtccgcctggggagtacgcacgcaagtgtaaaactcaaaggaattgacggggacctgcgcaagcagcggagcatgtggtttaattcgaagcaacgcgaagaaccttaccaagacttgacatccctctgacgtacccttaatcgggtatttcttcggacagaggagacaggtggtgcatggttgtcgtcagctcgtgtcgtgagatgttgggttaagtcccgcaacgagcgcaacccttgtctttagttgccatcattaagttgggcactctaaagagactgccggggaaactcggaggaaggtggggatgacgtcaaatcatcatgccccttatgtcttgggctacacacgtgctacaatggccggtacaaagagaagcgataccgcaagggggagcaaatcttaaaaaccggtcccagttcggattgcaggctgcaactcgcctgcatgaagtcggagttgctagtaatcgcagatcagaatgctgcggtgaatgcgttcccgggtctt

SEQ ID NO: 860 - DNA, 1368 bp, Eubacterium siraeum
  modified_base (901)..(901): a, c, t, g, unknown or other
gtcgaacggtgaagaggagcttgctcctcggaacagtggcggacgggtgagtaacacgtgagcaacctggctctaagagggggacaacagttggaaacgactgctaataccgcataacgtatcgggatggcatcttcctgataccaaagattttatcgcttagagatgggctcgcgtctgattagatagttggcggggtaacggcccaccaagtcgacgatcagtagccggactgagaggttgaacggccacattgggactgagacacggcccagactcctacgggaggcagcagtgggggatattggacaatgggggcaaccctgatccagcgacgccgcgtgagggaagaaggttttcggattgtaaacctctgttgacggagaaaaaaatgatggtatccgtttagaaagccacggctaactacgtgccagcagccgcggtaatacgtaggtggcaagcgttgtccggaattactgggtgtaaagggagtgtaggcgggatatcaagtagaagtgaaaattacgggctcaactcgtaacctgcttttgaaactgacattcttgagtgaagtagaggcaagcggaattcctagtgtagcggtgaaatgcgtagatattaggaggaacaccagtggcgaaggcggcttgctgggcttttactgacgctgaggctcgaaagcgtggggagcaaacaggattagataccctggtagtccacgccgtaaacgatgattactaggtgtggggggattgaccccttccgtgccggagtaaacacaataagtaatccacctggggagtacgaccgcaaggttgaaactcaaaggaattgacgggggcccgcacaagcagtggagtatgtggtttaattcgacgcaacgcgaagaaccttaccagtnataagtgaaaattaccggctcaactcgtaagcttttccttaaggggacataattgagggaggtagaggcaagcggaaagctcgtgtcgtgagatgttgggttaagtcccgcaacgagcgcaacccttatcattagttgctacgcaagagcactctaatgagactgccgttgacaaaacggaggaaggtggggatgacgtcaaatcatcatgccctttatgacctgggctacacacgtactacaatggcgtttaacaaagagaagcaaagccgcgaggcagagcaaatctccaaaaaacgtctcagttcggattgtaggctgcaactcgcctacatgaagtcggaattgctagtaatcgtaggtcagcatactacggtgaatacgttcccgggccttgtacacaccgcccgtcaaaccatgagagttggcaacacccgaagtcggtagtctaaccgcaaggaggacgc

SEQ ID NO: 861 - DNA, 965 bp, Eubacterium sp.
  3_1_31
  modified_base (39)..(39): a, c, t, g, unknown or other
  modified_base (41)..(41): a, c, t, g, unknown or other
  modified_base (842)..(842): a, c, t, g, unknown or other
  modified_base (875)..(875): a, c, t, g, unknown or other
  modified_base (904)..(904): a, c, t, g, unknown or other
  modified_base (915)..(915): a, c, t, g, unknown or other
  modified_base (934)..(934): a, c, t, g, unknown or other
tttaggaagcttgcttccaaagagacttagtggcgaacngntgagtaacacgtaggtaacctgcccatgtgcccgggataactgctggaaacggtagctaaaaccggataggtatgagggaggcatcttcctcatattaaagcaccttcgggtgtgaacatggatggacctgcggcgcattagctggttggtgaggtaacggcccaccaaggcgatgatgcgtagccgacctgagagggtgaacggccacattgggactgagacacggcccaaactcctacgggaggcagcagtagggaattttcgtcaatggggggaaccctgaacgagcaatgccgcgtgtgtgaagaaggtcttcggatcgtaaagcactgttgtaagtgaagaatgccatatagaggaaatgctatgtgggtgacggtagcttaccagaaagccacggctaactacgtgccagcagccgcggtaatacgtaggtggcaagcgttatccggaatcattgggcgtaaagggtgcgtaggtggcacgataagtctgaagtaaaaggcaacagctcaactgttgtatgctttggaaactgtcgagctagagtgcagaagagggcgatggaattccatgtgtagcggtaaaatgcgtagatatatggaggaacaccagtggcgaaggcggtcgcctggtctgtaactgacactgatgcacgaaagcgtggggagcaaataggattagataccctagtagtccacgccgtaaacgatgagaactaagtgttggagagattcagtgctgcagttaacgcaataagttctccgcctggggagtatgcacgcaagtgtgaaactcanaggaattgacgggggcccgcacaagcggtggantatgtggtttaattcgaagcaacgcgaanaaccttaccangccttgacatggatataantgttctagagatagaaagatagctatatatc

SEQ ID NO: 862 - DNA, 1229 bp, Eubacterium sp.
  AS15b
tgagtttgatcctggctcaggatgaacgctggcggcgtgcctaacacatgcaagtcgaacgagtggcggacgggtgagtaacgcgtaagtaatcaacctgtgacacacggataactgatagaaatgtcagctaatacgagatgaacaaaggcggtcacagacgagcttgcgtctgattagctagttggtggggtaagagcctaccaaggcgacgatcagtagccggcctgagagggtgaacggccacattggaactgagacacggtccaaactcctacgggaggcagcagtgggggatattgcacaatggggggaaccctgatgcagcaacgccgcgtgagtgaagaaggccctagggtcgtaaagctctgtcgtatgggaagatgactgtaccatacaagaaagccccggctaactacgtgccagcagccgcggtaatacgtagggggcaagcgttatccggaattactgggcgtaaagggtgcgtaggcggctagttaagtcgaggttaaaaggcagtagctcaactactgttgggccttgaaactaattagcttgagtataggagaggaaagtggaattcccggtgtggcggtgaaatgcgtagatatcgggaggaataccggtggcgaaggcgactttctggactaactgacgctgaggcacgaaagcgtgggtagcaaacaggattagataccctggtagtccacgccgtaaacgatgaacactaggtgtcgggatttcggtgccggcgcaaacgcaataagtgttccgcctggggagtacgttcgcaagaataaaactcaaaggaattgacggggacccgcacaagtagcggagcatgtggtttaattcgaagcaacgcgaagaaccttacctaagcttgacatgcacaggtggtgcatggttgtcgtcagctcgtgtcgtgagatgttgggttaagtcccgcaacgagcgcaacccctattgatagttgccagtgcgtaggcactctatcaagacagttatggataacataaaggaaggtggggatgacgtcaaatcatcatgccccttatgcttagggctacacacgtgctacaatggctgtcaaagagaagcaaggtcgcaaggcggagcaaacctgaagcagtccaagttcggatgtgggctgaaactcgcccacagaagtcggagttactagtaatcgcgaatcagaatgtcgcggtgaatgcgttcccgggtcttgt

SEQ ID NO: 863 - DNA, 1253 bp, Eubacterium sp.
  OBRC9
  modified_base (1234)..(1234): a, c, t, g, unknown or other
agtggcggacgggtgagtaacgcgtaagtaatcaacctgtgacacacggataactgatagaaatgtcagctaatacgagatgaacaaaggcggtcacagacgagcttgcgtctgattagctagttggtggggtaagagcctaccaaggcgacgatcagtagccggcctgagagggtgaacggccacattggaactgagacacggtccaaactcctacgggaggcagcagtgggggatattgcacaatggggggaaccctgatgcagcaacgccgcgtgagtgaagaaggccctagggtcgtaaagctctgtcgtatgggaagatgactgtaccatacaagaaagccccggctaactacgtgccagcagccgcggtaatacgtagggggcaagcgttatccggaattactgggcgtaaagggtgcgtaggcggctagttaagtcgaggttaaaaggcagtggctcaactactgttgggccttgaaactaattagcttgagtataggagaggaaagtggaattcccggtgtagcggtgaaatgcgtagatatcgggaggaataccggtggcgaaggcgactttctggactaactgacgctgaggcacgaaagcgtgggtagcaaacaggattagataccctggtagtccacgccgtaaacgatgaacactaggtgtcgggatttcggtgccggcgcaaacgcaataagtgttccgcctggggagtacgttcgcaagaataaaactcaaaggaattgacggggacccgcacaagtagcggagcatgtggtttaattcgaagcaacgcgaagaaccttacctaagcttgacatgcacaggtggtgcatggttgtcgtcagctcgtgtcgtgagatgttgggttaagtcccgcaacgagcgcaacccctattgatagttgccagtacgtaggcactctattaagacagttatggataacataaaggaaggtggggatgacgtcaaatcatcatgccccttatgcttagggctacacacgtgctacaatggctgtcaaagagaagcaaggtcgtaaggcggagcaaacctgaagcagtccaagttcggatgtgggctgaaactcgcccacagaagtcggagttactagtaatcgcgaatcagaatgtcgcggtgaatgcgttcccgggtcttgtacacaccgcccgtcacaccatgggagctgagggtacccaaagtcagtatctaagaagctgcctaangtaaacttagtgactgggg

SEQ ID NO: 864 - DNA, 1371 bp, Eubacterium sp.
  WAL 14571
  modified_base (925)..(925): a, c, t, g, unknown or other
  modified_base (1268)..(1268): a, c, t, g, unknown or other
tcgagcgagaagccattgactgaaacttcggtagaaggatatggtggaaagcggcggacgggtgagtaacgcgtaggcaacctgccccttacagagggatagccattggaaacgatgattaaaacctcataacgcatcccccccacatggaggggaagccaaagattcatcggtaagggatgggcctgcgtctgattagcttgttggcggggtaacggcccaccaaggcgacgatcagtagccgacctgagagggtgatcggccacattggaactgagacacggtccaaactcctacgggaggcagcagtggggaatattgcacaatgggcgaaagcctgatgcagcaacgccgcgtgagggatgaaggccttcgggtcgtaaacctctgtccttggggaagaaacaaatgacggtacccatggaggaagccccggctaactacgtgccagcagccgcggtaatacgtagggggcgagcgttatccggaattattgggcgtaaagagtgcgtaggtggttacctaagcgcagggtctaaggcaatggctcaaccattgttcgccctgcgaactgggctacttgagtgcaggagaggaaagcggaattcctagtgtagcggtgaaatgcgtagatattaggaggaacaccagtggcgaaggcggctttctggactgttactgacactgaggcacgaaagcgtggggagcaaacaggattagataccctggtagtccacgccgtaaacgatgagcactaggtgtcggggccgcaaggcttcggtgccgcagttaacgcattaagtgctccgcctggggagtacgcacgcaagtgtgaaactcaaaggaattgacggggacccgcacaagcagcggagcatgtggtttaattcgaagcaacgcgaagaagcttaaccagtgttcgccntccgaactgggctacctaaccggatccttcttcggacagtggagacaggtggtgcatggttgtcgtcagctcgtgtcgtgagatgttgggttaagtcccgcaacgagcgcaacccttgccattagttgccatcattcagttgggcactctaatgggactgccggggacaactcggaggaaggtggggatgacgtcaaatcatcatgccccttatgttctgggctacacacgtgctacaatggccggtacagcaagaagcaaaaccgcgaggtggagcaaatctcaaaaaccggtcccagttcggactgcaggctgaaacccgcctgcacgaagccggagttgntagtaatcgtggatcagaatgccacggtgaatgcgttcccgggtcttgtacacaccgcccgtcacaccatggaagttgggggtgcccgaagccggcagggaaa

SEQ ID NO: 865 - DNA, 1363 bp, Eubacterium sp.
  oral clone GI038
gagtttgattctggctcaggatgaacgctggcggcgtgcctaacacatgcaagtcgaacgagtggcggacgggtgagtaacgcgtgggcaacctgccccataccgggggatagcagttggaaacggctggtaaaaccgcataagaaaaagtggtatgggatgggcccgcgtctgattagccagttggtgaggtaacggctcaccaaagcgacgatcagtagccggcctgagagggcggacggccacattgggactgagacacggcccagactcctacgggaggcagcagtgggggatattgcacaatggaggaaactctgatgcagcgacgccgcgtgagtgaagaagtatttcggtatgtaaagctctatcagcagggaagatgacggtacctgagtaagaagctccggctaaatacgtgccagcagccgcggtaatacgtatggagcaagcgttatccggatttactgggtgtaaagggagcgcagacggatatgcaagtctgaagtgaaaccccacggctcaaccgtgggcttgctttggaaactgtagatctagagtactggagaggtaagcggaattcctggtgtagcggtgaaatgcgtagatatcaggaagaacatcggcggcgaaggcggcttactggacagactgacgttgaggctcgaaggcgtggggagcaaacaggattagataccctggtagcccacgcggtaaacgatgaatactaggtgttgggatttcagtgccgaagcaaacgtgataagtattccacctggggagtacgttcgcaagaatgaaactcaaaggaattgacggggacccgcacaagcggtggagcatgtggtttaattcgaagcaacgcgaagaaccttaccagaccttgaatcgacaggtggtgcatggttgtcgtcagctcgtgtcgtgagatgttgggttaagtcccgcaacgagcgcaacccttgcgtatagtagccagcaattgggaactctatacggactgccggggataacccggaggaaggtggggatgacgtcaaatcatcatgccccttatggtctgggctacacacgtgctacaatgtcgcagagggaagcgaaagggtgacctgaagcgaatctcaaaacgacccagttcggatgcaggctgcaacccgcctgcagaagctggaatcgctagtaatcgcgaatcagcatgtcgcggtgaatacgttcccgggtcttgtacacaccgcccgtcacaccatgggagtcgggaatgcccgaagccggtacctaaggagccgtcgaaggcaggccggatgactggggtgaagtcgtaacaaggtagccgtaggagaacctgcggctggaacacctcctt

SEQ ID NO: 866 - DNA, 1364 bp, Eubacterium sp.
  oral clone IR009
gagtttgatcctggctcaggatgaacgcgggcggcatgcttaacacatgcaagtcgaacgagtggcggacgggtgagtaacgcgtggataacctgccttatacagggggataacggagagaaatttccgctaagaccgcataagaaaattaggtataagatggatccgcgtccgattagcttgttggtgaggtagaggctcaccaaggcgacgatcggtagccggcccgagagggtgaacggccacattgggactgagacacggcccaaactcctacgggaggcagcagtggggaatattggacaatgggggaaaccctgatccagcgacgccgcgtgagtgaagaagtatttcggtatgtaaagctctatcagcagggaagatgacggtacctgactaagaagccccggctaactacgtgccagcagccgcggtaatacgtagggggcaagcgttatccggatttactgggtgtaaagggagcgcagacggccaagcaagtctgaagtgaaatgcatgggctcaacccatgaattgctttggaaactgttaggcttgagtgtcggaggggtaagcggaattcctagtgtagcggtgaaatgcgtagatattaggaggaacaccggaggcgaaggcggcttactggacgaactgacgttgaggctcgaaggcgtggggagcaaacaggattagataccctggtagtccacgcagtaaacgatgaatacttggtgtcggggcttcggtgccgcagcaaacgcattaagtattccacctggggagtacgttcgcaagaatgaaactcaaaggaattgacggggacccgcacaagcggtggagcatgtggtttaattcgaagcaacgcgaagaaccttaccaaatcttgacatatacaggtggtgcatggttgtcgtcagctcgtgtcgtgagatgttgggttaagtcccgcaacgagcgcaacccttgtcgtcagtagccagcatgggaactctgacgagacagccggagataatccggaggaaggtggggatgacgtcaaatcatcatgccccttatgatttgggctacacacatgctacaatggcgtacaaagtgaagcaagaccgcgaggttaagcaaatcacagaacgtctcagttcggatgtagtctgcaactcgactatagaagccggaatcgctagtaatcgcagatcagaatgctgcggtgaatacgttcccgggtcttgtacacaccgcccgtcacaccatgggagtcatcaatgcccgaagtcagtacctaaggagctgccgaaggcagggaggataactggggtgaagtcgtaacaaggtagccgtatcggaaggtgcggttggatcacctcctt

SEQ ID NO: 867 - DNA, 1360 bp, Eubacterium sp.
  oral clone JH012
ggagtttgatcctggctcaggaggaacgctggcggcgtgcctaacacatgcaagtcgagcgagcggcggacgggtgagtaacgcgtaggcaacctgccctttgcacagggatagcctcgggaaaccgggattaaaacctgataatcaaattaggcaaaggatgggcctgcgtctgattagcttgttggtgaggtaacggctcaccaaggcgacgatcagtagccgacctgagagggtaaacggccacattggaactgagacacggtccaaactcctacgggaggcagcagtggggaatattgcacaatgggcgaaagcctgatgcagcaacgccgcgtgagtgaagaaggcccttgggtcgtaaaactctgttgagagggaagatgacggtacctcttgaggaagccccggctaactacgtgccagcagccgcggtaatacgtagggggcgagcgttatccggaattattgggcgtaaagagtgcgtaggtggttatctaagcgtggggtgaaaggcagtggcttaaccattgtaagccttgcgaactggatagcttgagtgcaggaggggaaagtggaattcctagtgtagcggtgaaatgcgtagatattaggaggaacaccggtggcgaaggcggctttctggactgactgacactgaggcacgaaagcgtgggtagcaaacaggattagataccctggtagtccacgccgtaaacgatgagcactaggtgttggggcctcagtgccgcagttaacgcaataagtgctccgcctggggagtacgcacgcaagtgtaaaactcaaaggaattgacggggacccgcacaagcagcggagcatgtggtttaattcgaagcaacgcgaagaaccttaccaggacttgacatcgacaggtggtgcatggttgtcgtcagctcgtgtcgtgagatgttgggttaagtcccgcaacgagcgcaacccttgtcaatagttgccagcatgggcactctattgagactgccgtggataacacggaggaaggtggggatgacgtcaaatcatcatgccccttatgttttgggctacacacgtgctacaatggccggcaacgagaagcaagaccgcaaggtggagcaaaacttaaccggtcccagttcggatgtaggctgcaactcgcctacagaagatggagttgctagtaatcgcagatcagaatgctgcggtgaatgcgttcccgggtcttgtacacaccgcccgtcacaccatggaagttgggggtgcccgaagtcggttaggagctgccgaaggcaaaaccaatgactggggtgaagtcgtaacaaggtagccgtatcggaaggtgcggctggatcacctcctt

SEQ ID NO: 868 - DNA, 1365 bp, Eubacterium sp.
  oral clone JI012
ggagtttgattctggctcaggatgaacgctggcggcgtgcttaacacatgcaagtcgaacgagtggcggacgggtgagtaacgcgtgggcaacctgccttatacagggggataacagagagaaatttccgctaataccccataagaaaagttggtataagatggacccgcgtctgattagctggttggtgaggtaaaggctcaccaaggcgacgatcagtagccggcctgagagggtgaacggccacattgggactgagacacggcccaaactcctacgggaggcagcagtggggaatattggacaatggggggaaccctgatccagcgacgccgcgtgagtgaagaagtatttcggtatgtaaagctctatcagcagggaagatgacggtacctgactaagaagccccggctaactacgtgccagcagccgcggtaatacgtagggggcaagcgttatccggatttactgggtgtaaagggagcgtagacggtactgcaagtctggagtgaaacccgcgggctcaacctgcggcatgctttggaaactgtggtactggagtgtcggagaggtaagcggaattcccagtgtagcggtgaaatgcgtagatattgggaagaacacctggggcgaaggcggcttactggacgaactgacgttgaggctcgaaggcgtggggagcaaacaggattagataccctggtagtccacgcagtaaacgatgaatactaggtgtcgggatttcggtgccgtcgcaaacgcaataagtattccacctggggagtacgttcgcaagaatgaaactcaaaggaattgacggggacccgcacaagcggtggagcatgtggtttaattcgaagcaacgcgaagaaccttaccaagtcttgacatatacaggtggtgcatggttgtcgtcagctcgtgtcgtgagatgttgggttaagtcccgcaacgagcgcaacccttgtgatcagtagccagcatggggactctgatcagacagccggagataatccggaggaaggtggggatgacgtcaaatcatcatgccccttatgatttgggctacacacgtgctacaatggcggacaaagagaagcgagtgtgcgaacataagcaaacctcaagccgtctcagttcggatgtagtctgcaactcgactatagaagctggaatcgctagtaatcgcaaatcagaatgttgcggtgaatacgttcccgggtcttgtacacaccgcccgtcacaccatgggagtcatcaatgcccgaagtcagtacctaaggagctgccgaaggcagggaggataactggggtgaagtcgtaacaaggtagccgtatcggaaggtgcggctggatcacctcctt

SEQ ID NO: 869 - DNA, 1364 bp, Eubacterium sp.
  oral clone JN088
gagtttgattctggctcaggatgaacgctggcggcgtgcctaacacatgcaagtcgaacgagtggcggacgggtgagtaacacgtgggtaacctgccttatggagggggataacagagagaaatcactgctaataccgcataagaaaagtcgccataagatggacccgcgtctgattagccagttggcagggtaaaagcctaccaaagcaacgatcagtagccgatctgagaggatgaccggccacattgggactgagacacggcccaaactcctacgggaggcagcagtggggaatattgcacaatgggggaaaccctgatgcagcgacgccgcgtgagtgaagaagtatttcggtatgtaaagctctatcagcagggaagatgacagtacctgactaataagccccggctaactacgtgccagcagccgcggtaatacgtatggggcgagcgttatccggatttactgggtgtaaagggagcgtagacggaatggcaagtctgaagtgaaatacccgggctcaacctggggactgctttggaaactgttgttctacagtgttggagaggtaagtggaattcctggtgtagcggtgaaatgcgtatatatcaagaagaacaccggaggcgaaggcggcttactggacaaactgacgttgaggctcgaaagcgtggggatcaaacaggattagataccctggtattccacgctgtaaacgatgaatactaggtgtcggggtctcggtgccgtcgctaacgcaataagtattccacctggggagtacgttcgcaagaatgaaactcataggaattgacggggacccgcacaagcggtggagcatgtggtttaattcgaagcaacgcgaagaaccttaccaagtcttgagatcgacaggtggtgcatggttgtcgtcagctcgtgtcgtgagatgttgggttaagtcccgcaacgagcgcaacccctatagttagtatccagcatgggcactctaactagactgccagggataacctggaggaaggcggggatgacgtccaatcatcatgccccttatgacttgggctacacacgtgctacaatggcgtacaaagggaagcgagagggtgaccttaagcaaatctcaaaacgtctcagttcggatgtagtctgcaacccgactacagaagctggaatcgctagtaatcgcagatcagcatgctgcggtgaatacgttcccgggtcttgtacacaccgcccgtcacaccatgggagttggtaatgcccgaagtcagttcccagggagctgccgaaggcaggactgatgactggggtgaagtcataacaaggtagccgtatcggaaggtgcggctggatcacctcctt

SEQ ID NO: 870 - DNA, 1354 bp, Eubacterium sp.
  oral clone JS001
ggagtttgatcctggctcaggatgaacgctggcggcgtgcctaacacatgcaagtcgagcgagcggcggacgggtgagtaacgcgtaggcaacctacccttcacccagggacagcctccggaaacggggattaatacctgatgaccaaagttggtgagggatgggcctgcgtctgattagttagttggtgaggtaacggctcaccaaggcgacgatcagtagccgacctgagagggtgaccggccacattggaactgagacacggtccagactcctgcgggaggcagcagtggggaatattgcacaatgggcgaaagcctgatgcagcaacgccgcgtgaaggatgaaggtccttggattgtaaacttctgtccatagggaagatgacggtacctatggaggaagccccggctaactacgtgccagcagccgcggtaatacgtagggggcaagcgttatccggaattattgggcgtaaagcgtgcgtaggcggctttttaagcgtggggtttaaggctatggctcaaccatagtatgccctgcgaactggaaggcttgagtacaggagaggaaagcggaattcctagtgtagcggtgaaatgcgtagatattaggaggaacaccagtggcgaaggcggctttctggactgactgacgctgaggtacgaaagcgtggggagcaaacaggattagataccctggtagtccacgctgtaaacgatgagcactaggtgtcggggcttcggtgccgcagttaacgcaataagtgctccgcctggggagtacgttcgcaagaatgaaactcaaaggaattgacggggacccgcacaagcagcggagcatgtggtttaattcgaagcaacgcgaagaaccttaccaggacttgacatcgacaggtggtgcatggttgtcgtcagctcgtgtcgtgagatgttgggttaagtcccgcaacgagcgcaacccttgttactagttgccatcatgggcactctagtgagactgccggggacaactcggaggaaggtggggatgacgtcaaatcatcatgccccttatgttctgggctacacacgtgctacaatggctggcaaagagaagcgagaccgtgaggtggagcaaaactcaccagccccagttcggatgcaggctgcaactcgcctgcagaagccggagttgctagtaatcgcagatcagaatgctgcggtgaatgcgttcccgggtcttgtacacaccgcccgtcacaccatggaagttgggggcgcccgaagttggtattacctaaggcgaaaccgatgactggggtgaagtcgtaacaaggtagccgtaggagaacctgcggctggatcacctcctt

SEQ ID NO: 871 - DNA, 1427 bp, Eubacterium sp.
  oral clone OH3A
  modified_base (11)..(11): a, c, t, g, unknown or other
tcgacgaaggnatatataggaagtcttcggatggaatatgtataacttagtggcggacgggtgagtaacgcgtaagtaatcaacctgtgacacacggataactgatagaaatgtcagctaatacgagatgaactgtttaaattgggaaatggaaacagcaaagcgaaagcggtcacagacgagcttgcgtctgattagctagttggtggggtaagagcctaccaaggcgacgatcagtagccggcctgagagggtgaacggccacattggaactgagacacggtccaaactcctacgggaggcagcagtgggggatattgcacaatggggggaaccctgatgcagcaacgccgcgtgagtgaagaaggccctagggtcgtaaagctctgtcgtatgggaagaaacaaatgactgtaccatacaagaaagccccggctaactacgtgccagcagccgcggtaatacgtagggggcaagcgttatccggaattactgggcgtaaagggtgcgtaggcggctagttaagtcgaggttaaaaggcagtagctcaactactgttgggccttgaaactaattagcttgagtataggagaggaaagtggaattcccggtgtagcggtgaaatgcgtagatatcgggaggaataccggtggcgaaggcgactttctggactataactgacgctgaggcacgaaagcgtgggtagcaaacaggattagataccctggtagtccacgccgtaaacgatgaacactaggtgtcgggaggaatttcggtgccggcgcaaacgcaataagtgttccgcctggggagtacgttcgcaagaataaaactcaaaggaattgacggggacccgcacaagtagcggagcatgtggtttaattcgaagcaacgcgaagaaccttacctaagcttgacatggggatgaaaagcaatgtaaagttgtaatgatactttcgggtatacatcccacacaggtggtgcatggttgtcgtcagctcgtgtcgtgagatgttgggttaagtcccgcaacgagcgcaacccctattgatagttgccagtgcgttaagataggcactctatcaagacagttatggataacataaaggaaggtggggatgacgtcaaatcatcatgccccttatgcttagggctacacacgtgctacaatggctgtaacaaagagaagcaaagtcgcaaggcggagcaaacctgaaaaaagcagtccaagttcggattgtgggctgaaactcgcccacatgaagtcggagttactagtaatcgcgaatgagaatgtcgcggtgaatgcgttcccgggtcttgtacacaccgcccgtcacaccatgggagctgagggtacccaaagtcagtgatctaacgtaagaagaagctgcctaaggtaaagttagtgactggggggaagtcgt

SEQ ID NO: 872 - DNA, 1356 bp, Eubacterium tenue
  modified_base (1343)..(1343): a, c, t, g, unknown or other
  modified_base (1349)..(1349): a, c, t, g, unknown or other
tcgagcgattctcttcggagaagagcggcggacgggtgagtaacgcgtgggtaacctgccctgtacacacggataacataccgaaaggtatgctaatacgagatgatatataattgttgcatgatttttatatcaaagcttttgcggtacaggatggacccgcgtctgattatctagttggtaaggtaacggcttaccagggcgacgatcagtagccgacctgagagggtgatcggccacactggaactgagacacggtccagactcctacgggaggcagcagtggggaatattgcacaatgggcgaaagcctgatgcagcaacgccgcgtgagcgatgaaggccttcgggtcgtaaagctctgtcctcaaggaagataatgacggtacttgaggaggaagccccggctaactacgtgccagcagccgcggtaatacgtagggggctagcgttatccggaattactgggcgtaaagggtgcgtaggcggtctttcaagccagaagtgaaaggctacggctcaaccgtagtaagcttttggaactgtagacttgagtgcaggagaggagagtggaattcctagtgtagcggtgaaatgcgtagatattaggaggaacaccagtagcgaagcggctctctggactgtactgacgctgaggcacgaaagcgtggggagcaaacaggattagataccctggtagtccacgccgtaaacgatgagtactagtgtcgggggttacccccctcggtgccgcagctaacgcattaagtactccgcctgggaagtacgctcgcaagagtgaaactcacaggaattgacggggacccgcacaagtagcggatcatgtggtttaattcgaagcaacgcgaacaaccttacctaaacttgacatccccttgacctctcccgtatcggatatttcccgtcggggacagtggtgacaggtggtgcatgattgccgtcagctcgtgtcgtgagatgatgggttaagtcccgcaacgagcgcaacccttgcctttagttgccagcattaagttgggcactctagagggactgccgaggataactcggaggaaggtggggatgacgtcaaatcatcatgccccttatgcttagggctacacacgtgctacaatgggtggtacagagggttgccaaaccgtgaggtggagctaatcccttaaagccattctcagttcggattgtaggctgaaactcgcctacatgaagctggagttactagtaatcgcagatcagaatgctgcggtgaatgcgttcccgggtcttgtacacaccgcccgtcacaccatgggagttgggggcgcccgaagccggttagctancctttnggaagcg

SEQ ID NO: 873 - DNA, 1486 bp, Eubacterium tortuosum
  modified_base (1)..(1): a, c, t, g, unknown or other
  modified_base (123)..(123): a, c, t, g, unknown or other
  modified_base (347)..(347): a, c, t, g, unknown or other
  modified_base (970)..(970): a, c, t, g, unknown or other
  modified_base (1026)..(1026): a, c, t, g, unknown or other
  modified_base (1051)..(1051): a, c, t, g, unknown or other
ncaaatggagagtttgatcctggctcaggatgaacgctggcggcatgcctaatacatgcaagtcgaacgaagtcaattgaaagcttgcttttaaaagacttagtggcgaacgggtgagtaacncgtaggtaacctacccatgtaactgggataactgctggaaacggtagctaaaaccggataggtaagattgaggcatcttaatcttatgaaaaaagctttcgggctttgaacatggatggacctgcggcgcattagctagttggtgaggtaacggctcaccaaggcgatgatgcgtagccgacctgagagggtgaacggccacattgggactgagacacggcccnaactcctacgggaggcagcagtagggaattttcgtcaatggggggaaccctgaacgagcaatgccgcgtgagtgaagaaggtcttcggatcgtaaagctctgttgtaagtgaagaaagatgtatataggaaatgatatacaagtgacggtagcttaccagaaagccacggctaactacgtgccagcagccgcggtaatacgtaggtggcaagcgttatccggaatcattgggcgtaaagggtgcgtaggtggtacattaagtctgaagtaaaaggcatcagctcaactgatgttagctttggaaactgatgaactagagtgcagaagagggcaatggaattccatgtgtagcggtaaaatgcgtagatatatggaggaacaccagtggcgaaggcggttgcctggtctgtaactgacactgatgcacgaaagcgtggggagcaaataggattagataccctagtagtccacgccgtaaacgatgagaactaagtgttggggaaactcagtgctgcagttaacgcaataagttctccgcctggggagtatgcacgcaagtgtgaaactcaaaggaattgacgggggcccgcacaagcggtggagtatgtggtttaattcgaagnaacgcgaagaaccttaccaggccttgacatggatgtaaaagccctagagatagggnaataggtatacatcacacaggtggngcatggttgtcgtcagctcgtgtcgtgagatgttgggttaagtcccgcaacgagcgcaacccttgtcacatgttaccaatattaagttagggactcatgtgagactgccggtgacaaaccggaggaaggtggggatgacgtcaaatcatcatgccccttatggcctgggctacacacgtactacaatggcgactacaaagagcagcgaacctgcgaaggcaagcgaatctcataaaggtcgtctcagttcggattgaagtctgcaactcgacttcatgaagtcggaatcgctagtaatcgcagatcagcatgctgcggtgaatacgttctcgggccttgtacacaccgcccgtcaaaccatgggagttggtaatacccgaagccggtggcataaccgcaaggagtgagccgtcgaaggtaggaccgatgactggg

SEQ ID NO: 874 - DNA, 1378 bp, Eubacterium ventriosum
caccttggacagaatccttcgggaggaagaccattgtgactgagtggcggacgggtgagtaacgcgtgggtaacctgccttgtacagggggataacagttggaaacgactgctaataccgcataagcgcacagtaccgcatggtacggtgtgaaaaactccggtggtacaagatggacccgcgtctgattagctagttggtgaggtaacggcccaccaaggcgacgatcagtagccgacttgagagagtgatcggccacattgggactgagacacggcccaaactcctacgggaggcagcagtagggaatattgcacaatgggggaaaccctgatgcagcgacgccgcgtgaagaagaagtatttcggtatgtaaacttctatcagcaaggaagaaaatgacggtacttgactaagaagccccggctaaatacgtgccagcagccgcggtaatacgtatggggcaagcgttatccggatttactgggtgtaaagggagcgtaggcggcatggcaagtcagaagtgaaagcctggggctcaaccccggaattgcttttgaaactgtcaggctagagtgtcggaggggtaagcggaattcctagtgtagcggtgaaatgcgtagatattaggaggaacaccggtggcgaaggcggcttactggacgattactgacgctgaggctcgaaagcgtggggagcaaacaggattagataccctggtagtccacgccgtaaacgatgaatactacgtgtcgggggacaatagttcctcggtgccgaagcaaacgcattaagtattccacctggggagtacgttcgcaagaatgaaactcaaaggaattgacggggacccgcacaagcggtggagcatgtggtttaattcgaagcaacgcgaagaaccttacctgctcttgacatcccactgacaggtcagtaatgtgaccctttcctcggaacagtggagacaggtggtgcatggttgtcgtcagctcgtgtcgtgagatgttgggttaagtcccgcaacgagcgcaacccttgtctttagtagccagcagtccggctgggcactctagagagactgccagggataacctggaggaaggcggggatgacgtcaaatcatcatgccccttacgagcagggctacacacgtgctacaatggcgtaaacaaagggaagcgaccccgtgagggcaagcaaatctcaaaaataacgtctcagttcggattgtagtctgcaactcgactacatgaagctggaatcgctagtaatcgcgaatcagaatgtcgcggtgaatacgttcccgggtcttgtacacaccgcccgtcacaccatgggagttggatatgcccgaagtcagtgacccaaccgtaaggagg

SEQ ID NO: 875 - DNA, 1496 bp, Eubacterium xylanophilum
  modified_base (1)..(2): a, c, t, g, unknown or other
  modified_base (267)..(267): a, c, t, g, unknown or other
  modified_base (366)..(366): a, c, t, g, unknown or other
  modified_base (551)..(552): a, c, t, g, unknown or other
  modified_base (618)..(618): a, c, t, g, unknown or other
  modified_base (634)..(635): a, c, t, g, unknown or other
  modified_base (854)..(854): a, c, t, g, unknown or other
  modified_base (972)..(973): a, c, t, g, unknown or other
  modified_base (1201)..(1202): a, c, t, g, unknown or other
  modified_base (1391)..(1392): a, c, t, g, unknown or other
  modified_base (1409)..(1409): a, c, t, g, unknown or other
  modified_base (1448)..(1448): a, c, t, g, unknown or other
  modified_base (1456)..(1456): a, c, t, g, unknown or other
nnaatttgagagtttgatcctggctcaggatgaacgctggcggcgtgcttaacacatgcaagtcgaacgaagcatctctcccgaagattgaagtagcttgctacagattgattcatttgagatgacttagtggcggacgggtgagtaacgcgtgggtaacctgcctcatagagggggacaacagttggaaacgactgctaataccgcataacatgtgactgtcacatgacagacacatcaaagcttttgcgctatgagatggacccncgtctgattagctagttggtaaggtaacggcttaccaaggcgacgatcagtagccggcttgagagagtgaacggccacattgggactgagacacggccnagactcctacgggaggcagcagtggggaatattgcacaatgggggaaaccctgatgcagcgacgccgcgtgagtgaagaagtatttcggtatgtaaagctctatcagcagggaagataatgacggtacctgactaagaagccccggctaactacgtgccagcagccgcggtaatacgtagggggnnagcgttatccggatttactgggtgtaaagggagcgtaggtggcaaggcaagtcagatgtgaaatgncggggctcaaccccgnnactgcatttgaaactgtctagctagagtgcaggagaggtaagtggaattcctagtgtagcggtgaaatgcatagatattaggaggaacaccagtggcgaaggcggcttactggactgtaactgacactgaggctcgaaagcgtggggagcaaacaggattagataccctggtagtccacgccgtaaacgatgaatactaggtgtcggggcccacagggnttcggtgccgcagcaaacgcattaagtattccacctggggagtacgttcgcaagaatgaaactcaaaggaattgacggggacccgcacaagcggtggagcatgtggattaattcgaannaacgcgaagaaccttaccaagtcttgacatcctgctgaccgttccttagtcggaacttctcttcggagcagcagagacaggtggtgcatggttgtcgtcagctcgtgtcgtgagatgttgggttaagtcccgcaacgagcgcaacccttattcttagtagccagcattttggatgggcactctagggagactgccggagacaatccggaggaaggtggggatgacgtnnaatcatcatgccccttatgacttgggcttcacacgtgctacaatggtgactacaaagtgaagcgaccctgtgaaggtaagccaaccacaaaaaggtcatctcagttcggattgtagtctgcaactcgactacatgaagctggaatcgctagtaatcgcaaatcagcatgttgcggtgaatacgttcccnngtcttgtacacaccgcncgtcacaccatgggagttggatatgcccgaagccggtgncccaaccntaaggagggagccgtcgaaggtggagccaatgactggggt

SEQ ID NO: 876 - DNA, 1536 bp, Eubacterium yurii
ttttaattgagagtttgatcctggctcaggatgaacgctggcggcgtgcctaacacatgcaagtcgaacgaagtatatatatgaagtcttcggatggaatataaataacttagtggcggacgggtgagtaacgcgtaagtaatcaacctgtgacacacggataactgatagaaatgtcagctaatacgagatgaactgtttagattgggaaatggaaacagcaaagcgaaagcggtcacagacgagcttgcgtctgattagctagttggtggggtaagagcctaccaaggcgacgatcagtagccggcctgagagggtgaacggccacattggaactgagacacggtccaaactcctacgggaggcagcagtgggggatattgcacaatggggggaaccctgatgcagcaacgccgcgtgagtgaagaaggccctagggtcgtaaagctctgtcgtatgggaagaaacaaatgactgtaccatacaagaaagccccggctaactacgtgccagcagccgcggtaatacgtagggggcaagcgttatccggaattactgggcgtaaagggtgcgtaggcggctagttaagtcgaggttaaaaggcagtagctcaactactgttgggccttgaaactaattagcttgagtataggagaggaaagtggaattcccggtgtagcggtgaaatgcgtagatatcgggaggaataccggtggcgaaggcgactttctggactataactgacgctgaggcacgaaagcgtgggtagcaaacaggattagataccctggtagtccacgccgtaaacgatgaacactaggtgtcgggaggaatttcggtgccggcgcaaacgcaataagtgttccgcctggggagtacgttcgcaagaataaaactcaaaggaattgacggggacccgcacaagtagcggagcatgtggtttaattcgaagcaacgcgaagaaccttacctaagcttgacatggggatgaaaagcaatgtaaagttgtaatgatactttcgggtatacatcccacacaggtggtgcatggttgtcgtcagctcgtgtcgtgagatgttgggttaagtcccgcaacgagcgcaacccctattgatagttgccagtgcgttatggtaggcactctatcaagacagttatggataacataaaggaaggtggggatgacgtcaaatcatcatgccccttatgcttagggctacacacgtgctacaatggctgtaacaaagagaagcaaggtcgcaaggcggagcaaacctgaaaaaagcagtccaagttcggattgtgggctgaaactcgcccacatgaagtcggagttactagtaatcgcgaatcagaatgtcgcggtgaatgcgttcccgggtcttgtacacaccgcccgtcacaccatgggagctgagggtacccaaagtcagtgatctaacgaaagaagaagctgcctaaggtaaacttagtgactggggtgaagtcgtaacaaggtagccgtatcggaaggtgcggctggatcacctcctttct

SEQ ID NO: 877 - DNA, 1534 bp, Ewingella americana
agagtttgatcatggctcagattgaacgctggcggcaggcctaacacatgcaagtcgagcggcagcgggaagtagcttgctactttgccggcgagcggcggacgggtgagtaatgtctgggaaactgcctgatggagggggataactactggaaacggtagctaataccgcatgacctcgaaagagcaaagtgggggaccttcgggcctcacgccatcggatgtgcccagatgggattagctagtaggtgaggtaatggctcacctaggcgacgatccctagctggtctgagaggatgaccagccacactggaactgagacacggtccagactcctacgggaggcagcagtggggaatattgcacaatgggcgcaagcctgatgcagccatgccgcgtgtgtgaagaaggccttcgggttgtaaagcactttcagcgaggaggaaggcgttaaggttaataaccttagcgattgacgttactcgcagaagaagcaccggctaactccgtgccagcagccgcggtaatacggagggtgcaagcgttaatcggaattactgggcgtaaagcgcacgcaggcggtttgttaagtcagatgtgaaatccccgagcttaacttgggaactgcatttgaaactggcaagctagagtcttgtagaggggggtagaattccaggtgtagcggtgaaatgcgtagagatctggaggaataccggtggcgaaggcggccccctggacaaagactgacgctcaggtgcgaaagcgtggggagcaaacaggattagataccctggtagtccacgctgtaaacgatgtcgatttggaggttgtgggcttgacccgtggcttccggagctaacgcgttaaatcgaccgcctggggagtacggccgcaaggttaaaactcaaatgaattgacgggggcccgcacaagcggtggagcatgtggtttaattcgatgcaacgcgaagaaccttacctactcttgacatccagagaattcgctagagatagcttagtgccttcgggaactctgagacaggtgctgcatggctgtcgtcagctcgtgttgtgaaatgttgggttaagtcccgcaacgagcgcaacccttatcctttgttgccagcgagtaatgtcgggaactcaaaggagactgccggtgataaaccggaggaaggtggggatgacgtcaagtcatcatggcccttacgagtagggctacacacgtgctacaatggcatatacaaagagaagcgaactcgcgagagcaagcggacctcataaagtatgtcgtagtccggattggagtctgcaactcgactccatgaagtcggaatcgctagtaatcgtagatcagaatgctacggtgaatacgttcccgggccttgtacacaccgcccgtcacaccatgggagtgggttgcaaaagaagtaggtagcttaaccttcgggagggcgcttaccactttgtgattcatgactggggtgaagtcgtaacaaggtaaccgtaggggaacctgcggttggatcacctcct

SEQ ID NO: 878 - DNA, 1412 bp, Exiguobacterium acetylicum
  modified_base (1360)..(1362): a, c, t, g, unknown or other
  modified_base (1364)..(1365): a, c, t, g, unknown or other
gcgcaggaagctgacggaactcttcggagggaaggcagtggaatgagcggcggacgggtgagtaacacgtaaggaacctgcctcaaggattgggataactccgagaaatcggagctaataccggatagttcaacggaccgcatggtccgctgatgaaaggcgctccggcgtcaccttgagatggccttgcggtgcattagctagttggtggggtaacggcccaccaaggcgacgatgcatagccgacctgagagggtgatcggccacactgggactgagacacggcccagactcctacgggaggcagcagtagggaatcttccacaatggacgaaagtctgatggagcaacgccgcgtgagtgatgaaggttttcggatcgtaaaactctgttgtaagggaagaacacgtacgagagggaatgctcgtaccttgacggtaccttacgagaaagccacggctaactacgtgccagcagccgcggtaatacgtaggtggcaagcgttgtccggaattattgggcgtaaagcgcgcgcaggcggccttttaagtctgatgtgaaagcccccggctcaaccggggagggccattggaaactggaaggcttgagtacagaagagaagagtggaattccacgtgtagcggtgaaatgcgtagagatgtggaggaacaccagtggcgaaggcgactctttggtctgtaactgacgctgaggcgcgaaagcgtggggagcaaacaggattagataccctggtagtccacgccgtaaacgatgagtgctaggtgttggggggtttccgcccctcagtgctgaagctaacgcattaagcactccgcctggggagtacggccgcaaggctgaaactcaaaggaattgacggggacccgcacaagcggtggagcatgtggtttaattcgaagcaacgcgaagaaccttaccaactcttgacatcccattgaccgcttgagagatcaagttttcccttcggggacaatggtgacaggtggtgcatggttgtcgtcagctcgtgtcgtgagatgttgggttaagtcccgcaacgagcgcaacccctatccttagttgccagcattcagttgggcactctagggagactgccggtgacaaaccggaggaaggtggggatgacgtcaaatcatcatgccccttatgagttgggctacacacgtgctacaatggacggtacaaagggcagcgagaccgcgaggtggagccaatcccataaagccgttcccagttcggattgcaggctgcaactcgcctgcatgaagtcggaatcgctagtaatcgcaggtcagcatactgcggtgaatacgttcccgggtcttgtacacaccgcccnnnannccacgagagtttgcaacacccgaagccggtgaggtaaccgcaaggag

SEQ ID NO: 879 - DNA, 1505 bp, Facklamia hominis
  modified_base (344)..(344): a, c, t, g, unknown or other
  modified_base (364)..(365): a, c, t, g, unknown or other
  modified_base (638)..(638): a, c, t, g, unknown or other
  modified_base (652)..(652): a, c, t, g, unknown or other
cgaacgctggcggcgtgcctaatacatgcaagtcgaacgaacggagctaggaactgaacccggcaaagttagtggcgcacgggtgagtaacacgtggagaacctacccttttgcgggggataaccattggaaacgatgactaataccgcatagaatcgcagatcgcatgatcaacgaaggaaagacggcttcggctgtcgcaaaaggatggctccgcggtgcattagctagatggtggggtaacggcctaccatggcaatgatgcatagccgacctgagagggtgatcggccacattgggactgagacacggcccaaactcctacgggaggcagcagtagggantcttccgcaatgggcgcaannctgacggagcaacgccgcgtgtgtgaagaaggtcttcggatcgtaaagcactgttgttagagaagaacgaccgctagagtaactgttagcggagtgacggtatctaaccagaaagccacggctaactacgtgccagcagccgcggtaatacgtaggtggcaagcgttgtccggatttattgggcgtaaagggagcgcaggcggtgacttaagtctgatgtgaaagcccacggctcaaccgtggagggtcattggaaactgggtcacttgagtncagaagaggaaagnggaattccatgtgtagcggtgaaatgcgtagatatatggaggaacaccagtggcgaaggcgactttctggtctgtaactgacgctgaggctcgaaagcgtggggagcaaacaggattagataccctggtagtccacgccgtaaacgatgagtgctaagtgttggagggtttccacccttcagtgctggagttaacgcaataagcactccgcctggggagtacggccgcaaggctgaaactcaaaggaattgacggggacccgcacaagcggtggagcatgtggtttaattcgaagcaacgcgaagaaccttaccaggtcttgacatctcttgcatagcctagagataggtgaagcccttcggggcaagaagacaggtggtgcatggttgtcgtcagctcgtgtcgtgagatgttgggttaagtcccgcaacgagcgcaacccttatcactagttgccagcattcagatggggactctagtgagactgccggtgacaaaccggaggaaggtggggatgacgtcaaatcatcatgccccttatgacctgggctacacacgtgctacaatggatggtacaacgagcagcgaactcgcaagggcaagcgaatctcttaaagccattctcagttcggattgttctctgcaactcgagaacatgaagccggaatcgctagtaatcgcggatcagcacgccgcggtgaatacgttcccgggtcttgtacacaccgcccgtcacaccacgagagtttgtaacacccgaagccggtggcctaactttatgaagccgtcgaaggtgggacagatgattggggtgaagtcgtaacaaggtagccgtatcggaaggtgcggctgg

SEQ ID NO: 880 - DNA, 1367 bp, Faecalibacterium prausnitzii
tcgaacgagcgagagagagcttgctttctcagagcgagtggcgaacgggtgagtaacgcgtgaggaacctgcctcaaagagggggacaacagttggaaacgactgctaataccgcataagcccacaggtcggcatcgagcagagggaaaaggagcaatccgctttgagatggcctcgcgtccgattagctagttggtgaggtaacggcccaccaaggcaacgatcggtagccggactgagaggttgaacggccacattgggactgagacacggcccagactcctacgggaggcagcagtggggaatattgcacaatgggggaaaccctgatgcagcgacgccgcgtggaggaagaaggtcttcggattgtaaactcctgttgttgaggaagataatgacggtactcaacaaggaagtgacggctaactacgtgccagcagccgcggtaaaacgtaggtcacaagcgttgtccggaattactgggtgtaaagggagcgcaggcgggaagacaagttggaagtgaaatctatgggctcaacccataaactgctttcaaaactgtttttcttgagtagtgcagaggtaggcggaattcccggtgtagcggtggaatgcgtagatatcgggaggaacaccagtggcgaaggcggcctactgggcaccaactgacgctgaggctcgaaagtgtgggtagcaaacaggattagataccctggtagtccacaccgtaaacgatgattactaggtgttggaggattgaccccttcagtgccgcagttaacacaataagtaatccacctggggagtacgaccgcaaggttgaaactcaaaggaattgacgggggcccgcacaagcagtggagtatgtggtttaattcgacgcaacgcgaagaaccttaccaagtcttgacatcctgcgacgatgctggaaacagtattttccttcgggacgcagagacaggtggtgcatggttgtcgtcagctcgtgtcgtgagatgttgggttaagtcccgcaacgagcgcaacccttactgtcagttactacgcaagaggactctggcaggactgccgttgacaaaacggaggaaggtggggatgacgtcaaatcatcatgccctttatgacttgggctacacacgtactacaatggcgttaaacaaagagaagcaagaccgcgaggtggagcaaaactcagaaacaacgtcccagttcggactgcaggctgcaactcgcctgcacgaagtcggaattgctagtaatcgtggatcagcatgccacggtgaatacgttcccgggccttgtacacaccgcccgtcacaccatgagagccggggggacccgaagtcggtagtctaaccgcaaggagg

SEQ ID NO: 881 - DNA, 1530 bp, Filifactor alocis
agagtttgatcctggctcaggatgaacgctggcggcgtgcttaacacatgcaagtcgaacgaacgactattaacagaacctttcggggcgaagaatatagaagttagtggcggacgggtgcgtaacgcgtgggtaatctgcctttgtcaaaggaataactattcgaaagaatagctaaaaccgtataacatattaatagggcatcctaataatatcaaaactgaggtggacaaagatgagcccgcgtctgattagctagttggtgagataaaagcccaccaaggcaacgatcagtagccgacctgagagggtgaacggccacattggaactgagacacggtccaaactcctacgggaggcagcagtggggaatattgcacaatggggggaaccctgatgcagcaacgccgcgtgagtgaagaaggcattcgtgtcgtaaaactctgtagtaggggaagaaagaaatgacagtaccctaaaagaaagccccggctaactacgtgccagcagccgcggtaatacgtagggggcaagcgttatccggaataactgggcgtaaagggtgcgcaggtggtttaacaagttagtggtgaaaggcataggctcaaccaatgtaagccattaaaactgtttaacttgagtgcaggagaggaaagtggaattcctagtgtagcggcgaaatgcgtagatattaggaggaataccagtggcgaaggcgactttctggactgcaactgactctgaggcacgaaagcgtggggagcaaacaggattagataccctggtagtccacgccgtaaacgatgagtactaggtgtcgagtgaagaactcggtgccgaagttaacacattaagtactccgcctggggagtacgctcgcaagagtaaaactcaaaggaattgacggggacccgcacaagcagcggagcatgtggtttaattcgaagcaacgcgaagaaccttacctaaacttgacataccaatgacagccttttaatcgaggacttttaccttcgggtagacaatggatacaggtggtgcatggttgtcgtcagctcgtgtcgtgagatgttgggttaagtcccgcaacgagcgcaacccttgtcgatagttaccagcagtaagatggggactctatcgagacagctaaggacaacttagaggaaggtggggatgacgtcaaatcatcatgccccttatgtttagggctacacacgtgctacaatggtcattacagagagaagcgaaactgcgaagtcaagcaaacctcaaaaagatgatccaagttcggattgtaggctgaaactcgcctacatgaagttggagttgctagtaatcgcgaatcagaatgtcgcggtgaatgcgttcccgggtcttgtacacaccgcccgtcacaccatgggagtttggggggcccaaagtcagcgactcaaccgcaaggagagagctgcccaaggcaaaacaaatgactggggtgaagtcgtaacaaggtagccgtatcggaaggtgcggctggatcacctcctttct

SEQ ID NO: 882 - DNA, 1450 bp, Filifactor villosus
gatgaacgctggcggcgtgcttaacacatgcaagtcgaacgggcgaattatatcggaggtcttcgggccaaagagataataagctagtggcggacgggtgcgtaacgtgtgggtaatctgcctttgtcataggaataactgcttgaaaaagtagctaataccaaataacatatcgtataggcatctataagatatcaaagagaaatcggacaaagatgagcccgcatctgattagctggttggtagggtaaaagcctaccaaggcgacgatcagtagccggcctgagagggtgaacggccacattggaactgagacacggtccaaactcctacgggaggcagcagtggggaatattgcacaatggggggaaccctgatgcagcaacgccgcgtgagtgaagaaggctttcgagtcgtaaaactctgttgtaagggaagataatgacggtaccttaaaagaaagccccggctaactacgtgccagcagccgcggtaatacgtagggggcaagcgttatccggaataactgggcgtaaagggtgcgcaggtggtctgtcaagttagtggtgaaaggcataggctcaaccaatgtaagccattaaaactgacggacttgagtgcaggagaggaaagtggaattcctagtgtagcggtgaaatgcgtagatattaggaggaataccggtggcgaaggcgactttctggactgtaactgacactgaggcacgaaagcgtggggagcaaacaggattagataccctggtagtccacgccgtaaacgatgagtactaggtgtcgggaggaatctcggtgccgaagttaacacattaagtactccgcctggggagtacgctcgcaagagtaaaactcaaaggaattgacggggacccgcacaagcagcggagcatgtggtttaattcgaagcaacgcgaagaaccttacctaaacttgacataccgatgccgattcggtaatgcgaattttcctttcggggacattggatacaggtggtgcatggttgtcgtcagctcgtgtcgtgagatgttgggttaagtcccgcaacgagcgcaacccttgtcaatagttgccagcatataaggtggggactctattgagacagctaaggacaacttagaggaaggtggggatgacgtcaaatcatcatgccccttatgtttagggctacacacgtgctacaatggtcattacagagggaagcgagattgtgaaatggagcaaaccccaaaaagatgatctaagttcggattgtaggctgaaactcgcctacatgaagttggagttgctagtaatcgcaaatcaaaatgttgcggtgaatgcgttcccgggtcttgtacacaccgcccgtcacaccatgggagttcggggggcccaaagtcagtgagcaaaccgcgagggtgcagctgcctaaggcaaaacgaatgactggggtg

SEQ ID NO: 883 - DNA, 1525 bp, Finegoldia magna
ttaaattgagagtttgatcctggctcaggacgaacgctggcggcgtgcttaacacatgcaagtcgaacgggatttagtaaacagaagcttcggtggaagattactaatgagagtggcgaacgggtgagtaacgcgtgagcaacctgcctatgacagtgggatagcctcgggaaaccgggattaataccgcataaaatcgtagaaacacatgttttaacggtcaaagatttatcggtcatagatgggctcgcgtctgattagctagttggtgagataacagcccaccaaggcgacgatcagtagccggtctgagaggatgaacggccacattggaactgagacacggtccaaactcctacgggaggcagcagtggggaatattgcacaatgggggaaaccctgatgcagcgacgccgcgtgaacgaagaaggtattcgtatcgtaaagttctgtcctatgggaagataatgacagtaccatagaagaaagctccggctaaatacgtgccagcagccgcggtaatacgtatggagcgagcgttgtccggaattattgggcgtaaagggtacgcaggcggtttaataagtcgaatgttaaagatcggggctcaaccccgtaaagcattggaaactgataaacttgagtagtggagaggaaagtggaattcctagtgtagtggtgaaatacgtagatattaggaggaataccagtagcgaaggcgactttctggacacaaactgacgctgaggtacgaaagcgtggggagcaaacaggattagataccctggtagtccacgccgtaaacgatgaatgctaggtgttgggggtcaaacctcggtgccgaagttaacacattaagcattccgcctggggagtacgcacgcaagtgtgaaactcaaaggaattgacggggacccgcacaagcagcggagcatgtggtttaattcgatgcaacgcgaagaaccttaccagggcttgacatgtgggtgaaaggtatagagatatacccctctctttatgagacatccatacaggtggtgcatggttgtcgtcagctcgtgtcgtgagatgttgggttaagtcccgcaacgagcgcaacccctatacttagttaccagcgagtaatgtcggggactctaagtagactgccgatgacaaatcggaggaaggtggggatgacgtcaaatcatcatgccctttatgtcctgggctacacacgtgctacaatggttggtacagagggaagctatatagtgatataatgcaaaactccaaagccaatcccagttcggattgtaggctgcaactcgcctacatgaagtcggagttgctagtaatcgcggatcagaatgtcgcggtgaatgcgttcccgggtcttgtacacaccgcccgtcacaccatgggagttgataatacccgaagcctgtgacctaattgaggagcagtcgaaggtaggattgatgactggggtgaagtcgtaacaaggtagccgtatcggaaggtgcggctggatcacctcctttct

SEQ ID NO: 884 - DNA, 1291 bp, Flavobacteriaceae sp.
  C1
gatgaacgctagcgggaggcctaacacatgcaagctgagcgagcggcgtacgggtgcggaacacgtgtgcgacctgcctttatctgggggatagcctttcgaaaggaagattaatactccataatgaaaggcggatagagatgggcacgcgcaagattagctagttggtgaggtaacggctcaccaaggcaatgatctttagggggcctgagagggtgatcccccacactggtactgagacacggaccagactcctacgggaggcagcagtgaggaatattggtcaatgggtgcaagcctgaaccagccatcccgcgtgaaggacgactgcctatgggttgtaaacttcttttgtatagggatatgaaggtactatacgaataagcaccggctaactccgtgccagcagccgcggtaatacggagggtgcaagcgttatccggatttattgggtttaaagggtccgtaggcggacttataagtcagtggtgaaatcctgtcgcttaacgatagaactgccattgatactgtaagtcttgagtatatttgaggtagctggaataagtagtgtagcggtgaaatgcatagatattacttagaacaccaattgcgaaggcaggttaccaagataactgacgctgagggacgaaagcgtggggagcgaacaggattagataccctggtagtccacgccgtaaacgatgctaactcgtttttggagcttcagagaccaagcgaaagtgataagttagccacctggggagtacgctcgcaagagtgaaactcaaaggagttgacgggggcccgcacaagcggtggattatgtggtttaattcgatgatacgcgaggaaccttaccaagacttaaatggtcaaggtgctgcatggttgtcgtcagctcgtgccgtgaggtgttaggttaagtcctgcaacgagcgcaacccctgtcactagttgccatcatggggactctagtgagactgcctacgcaagtaggaggaaggtggggatgacgtcaaatcatcacggcccttacgtcttgggccacacacgtaatacaatggccggcagagggcagctacacagcgatgtgatgcaaatctcgccggtctcagttcggatggagtctgcaactcgactctagaagctggaatcgctagtaatcgcgcatcagccatggcgcggtgaatacgttcccgggccttgtacacaccgcccgtcaagccatggaagctgggggtacctgaagtcggtaccaggagctgcctagggtaaaactagtaactagggc

SEQ ID NO: 885 - DNA, 1480 bp, Flavobacterium sp.
  NF2-1
agagtttgatcctggctcaggatgaacgctagcggcaggcttaacacatgcaagtcgaggggtaggagaagcttgcttttctgagaccggcgcacgggtgcgtaacgcgtatgcaatctacctttcacagagggatagcccagagaaatttggattaataccttatagtattatagaatggcatcattttataattaaagatttatcggtgaaagatgagcatgcgtcccattagctagttggtatggtaacggcataccaaggcaacgatgggtaggggtcctgagagggagatcccccacactggtactgagacacggaccagactcctacgggaggcagcagtgaggaatattggacaatgggcgcaagcctgatccagccatgccgcgtgcaggatgacggtcctatggattgtaaactgcttttatacaggaagaaacccctctacgtgtagagacttgacggtactgtaagaataaggatcggctaactccgtgccagcagccgcggtaatacggaggatccaagcgttatccggaatcattgggtttaaagggtccgtaggcggtcagataagtcagtggtgaaagcccatcgctcaacggtggaacggccattgatactgtctgacttgaattattaggaagtaactagaatatgtagtgtagcggtgaaatgcttagagattacatggaataccaattgcgaaggcaggttactactaatatattgacgctgatggacgaaagcgtgggtagcgaacaggattagataccctggtagtccacgccgtaaacgatggatactagctgttgggcgcaagttcagtggctaagcgaaagtgataagtatcccacctggggagtacgaacgcaagtttgaaactcaaaggaattgacgggggcccgcacaagcggtggagcatgtggtttaattcgatgatacgcgaggaaccttaccaaggcttaaatgtagattgaccggtttggaaacagatctttcgcaagacaatttacaaggtgctgcatggttgtcgtcagctcgtgccgtgaggtgtcaggttaagtcctataacgagcgcaacccctgttgttagttgccagcgagtcatgtcgggaactctaacgagactgccagtgcaaactgtgaggaaggtggggatgacgtcaaatcatcacggcccttacgccttgggctacacacgtgctacaatggccggtacagagagcagccactgggtgaccaggagcgaatctataaaaccggtcacagttcggatcggagtctgcaactcgactccgtgaagctggaatcgctagtaatcggatatcagccatgatccggtgaatacgttcccgggccttgtacacaccgcccgtcaagccatggaagctgggggtgcctgaagtcggtgaccgcaaggagctgcctagggtaaaactggtaactagggctaagtcgtaacaaggtagccgta

SEQ ID NO: 886 - DNA, 1465 bp, Flavonifractor plautii
cgctggcggcgtgcttaacacatgcaagtcgaacggggtgctcatgacggaggattcgtccaatggattgagttacctagtggcggacgggtgagtaacgcgtgaggaacctgccttggagaggggaataacactccgaaaggagtgctaataccgcatgaagcagttgggtcgcatggctctgactgccaaagatttatcgctctgagatggcctcgcgtctgattagctagtaggcggggtaacggcccacctaggcgacgatcagtagccggactgagaggttgaccggccacattgggactgagacacggcccagactcctacgggaggcagcagtggggaatattgggcaatgggcgcaagcctgacccagcaacgccgcgtgaaggaagaaggctttcgggttgtaaacttcttttgtcggggacgaaacaaatgacggtacccgacgaataagccacggctaactacgtgccagcagccgcggtaatacgtaggtggcaagcgttatccggatttactgggtgtaaagggcgtgtaggcgggattgcaagtcagatgtgaaaactgggggctcaacctccagcctgcatttgaaactgtagttcttgagtgctggagaggcaatcggaattccgtgtgtagcggtgaaatgcgtagatatacggaggaacaccagtggcgaaggcggattgctggacagtaactgacgctgaggcgcgaaagcgtggggagcaaacaggattagataccctggtagtccacgccgtaaacgatggatactaggtgtggggggtctgaccccctccgtgccgcagttaacacaataagtatcccacctggggagtacgatcgcaaggttgaaactcaaaggaattgacgggggcccgcacaagcggtggagtatgtggtttaattcgaagcaacgcgaagaaccttaccagggcttgacatcccactaacgaggcagagatgcgttaggtgcccttcggggaaagtggagacaggtggtgcatggttgtcgtcagctcgtgtcgtgagatgttgggttaagtcccgcaacgagcgcaacccttattgttagttgctacgcaagagcactctagcgagactgccgttgacaaaacggaggaaggtggggacgacgtcaaatcatcatgccccttatgtcctgggccacacacgtactacaatggtggttaacagagggaggcaataccgcgaggtggagcaaatccctaaaagccatcccagttcggattgcaggctgaaacccgcctgtatgaagttggaatcgctagtaatcgcggatcagcatgccgcggtgaatacgttcccgggccttgtacacaccgcccgtcacaccatgagagtcgggaacacccgaagtccgtagcctaaccgcaaggagggcgcggccgaaggtgggttcgataattggggtgaagtcgtaacaaggtag

SEQ ID NO: 887 - DNA, 1467 bp, Flexispira rappini
  modified_base (1062)..(1062): a, c, t, g, unknown or other
  modified_base (1075)..(1075): a, c, t, g, unknown or other
agagtttgatcctggctcagagtgaacgctggcggcgtgcctaatacatgcaagtcgaacgatgaagcttctagcttgctagaagtggattagtggcgcacgggtgagtaatgcataggttatgtgccctttagtctgggatagccactggaaacggtgattaatactggatactccctacgggggaaaggtttttcgctaaaggatcagcctatgtcctatcagcttgttggtgaggtaatggctcaccaaggctatgacgggtatccggcctgagagggtgatcggacacactggaactgagacacggtccagactcctacgggaggcagcagtagggaatattgctcaatgggggaaaccctgaagcagcaacgccgcgtggaggatgaaggttttaggattgtaaactccttttgtaagagaagattatgacggtatcttacgaataagcgccggctaactccgtgccagcagccgcggtaatacggagggtgcaagcgttactcggaatcactgggcgtaaagagcgcgtaggcgggtggtcaagtcagatgtgaaatcctgtagcttaactacagaactgcatttgaaactgaccatctagagtatgggagaggtaggtggaattcttggtgtaggggtaaaatccgtagagatcaagaggaatactcattgcgaaggcgacctgctggaacattactgacgctgatgcgcgaaagcgtggggagcaaacaggattagataccctggtagtccacgccctaaacgatgaatgctagttgttgccctgcttgtcagggcagtaatgcagctaacgcattaagcattccgcctggggagtacggtcgcaagattaaaactcaaaggaatagacggggacccgcacaagcggtggagcatgtggtttaattcgaagctacgcgaagaactcttacctaggcttgacattgatagaatccgctagagatagtggagtgctggcttgccagagcttgaaaacaggtgctgcacggctgtcgtcagctcgtgtcgtgagatgttgggttaagtcccgcaacngagcgcaaccctnggtcccttagttgctagcagttcggctgagcactctaaggagactgccttcgtaaggaggaggaaggtgaggacgacgtcaagtcatcatggcccttacgcctagggctacacacgtgctacaatgggacatacaaaaagatgcaataccgcgaggtggagcaaatctctaaaatgtctctcagttcggattgtagtctgcaactcgactacataaagctggaatcgctagtaatcgtgaatcagcaatgtcacggtgaatacgttcccgggtcttgtactcaccgcccgtcacaccatgggagttgtattcgccttaagtcgggatactaaattggttaccgcccacggcggatgcagcgactggggtgaagtcgtaacaaggtaaccgta

SEQ ID NO: 888 - DNA, 1541 bp, Flexistipes sinusarabici
agagtttgatcctggctcagaacgaacgctggcggcgtgcttaacacatgcaagtcagggggaatcctcccttcggggaggtagtacaccggcgcacgggtgagtaacgcgtgagtgacctacccattagacctggataacccggcgaaagttgggctaagacaggatgtgttaatacacttcatggtgtattgataaaggcaggtttcggcttgtgctaatggatgggctcgcgtctgattagctagttggtaaggtaaaggcttaccaaggcgacgatcattaggcggcctgagagggtggtcgcccacactggaactgagacacggtccagactcctacgggaggcagcagtggggaattttgcgcaatgggcgagagcctgacgcagcgacgccgcgtggacgaggaaggccttcgggtcgtaaagtccttttttacgggaagaaagttattaacagtaactggttaatatttgacggtaccgtaagaataagccccggctaactccgtgccagcagccgcggtaatacggagggggcgagcgttgttcggaattactgggcgtaaagcgtacgtaggcggcgtggtaagtcggaggttaaaggctacggctcaaccgtagtagggcctttgatactatcatgctagagtgtcggagggggtagcggaattccctgtgtagcggtgaaatgcgtagatatagggaagaacaccagtagcgaaggcggctacctggccgatcactgacgctgaggtacgagagcgtgggtagcaaacaggattagataccctggtagtccacgctgtaaacgatggacgctaggtgttggaggaaccgaccccttcagtgccgaagccaacgcgttaagcgtcccgcctggggagtacgaccgcaaggttaaaactcaaaggaattgacgggggcccgcacaagcggtggagcacgtggtttaattcgatgctaaccgaagaaccttacctggtcttgacatcctccggagggactagagatagttctgtgcccgcctttggcgggagcggagagacaggtgctgcatggctgtcgtcagctcgtgccgtgaggtgttgggttaagtcccgcaacgagcgcaacccctattcatagttgccatcggtaaggccgggcactctatggatactgcccgtgataaacgggaggaaggtggggacgacgtcaagtcatcatggcctttatgaccagggctacacacgtgctacaatggtacgtacagagggcagcgaagccgcgaggtgtagcgaatccctaaaagcgtgccttagttcggattgtagtctgcaattcgactacatgaaggcggaatcgctagtaatcgcaggtcagcaaaactgcggtgaatacgttcccgggccttgtacacaccgcccgtcacaccacgggagttggttgtacctgaagccggtggcccaactgcggagggagccgtttatggtatgactggcaactggggtgaagtcgtaacaaggtagccgtaccggaaggtgtggctggatcacct

SEQ ID NO: 889 - DNA, 1530 bp, Francisella novicida
ttaaactgaagagtttgatcctggctcagattgaacgctggtggcatgcttaacacatgcaagtcgaacggtaacaggtcttcggatgctgacgagtggcggacgggtgagtaacgcgtaggaatctgcccatttgagggggataccagttggaaacgactgttaataccgcataatatctgtggattaaaggtggctttcgggctgtcgcagatggatgagcctgcgttggattagctagttggtggggtaagggcccaccaaggctacgatccatagctgatttgagaggatgatcagccacattgggactgagacacggcccaaactcctacgggaggcagcagtggggaatattggacaatgggggcaaccctgatccagcaatgccatgtgtgtgaagaaggccctagggttgtaaagcactttagttggggaggaaagcctcaaggttaatagccttgggggaggacgttacccaaagaataagcaccggctaactccgtgccagcagccgcggtaatacggggggtgcaagcgttaatcggaattactgggcgtaaagggtctgtaggtggtttgttaagtcagatgtgaaagcccagggctcaaccttggaactgcatttgatactggcaaactagagtacggtagaggaatggggaatttctggtgtagcggtgaaatgcgtagagatcagaaggaacaccaatggcgaaggcaacattctggaccgatactgacactgagggacgaaagcgtggggatcaaacaggattagataccctggtagtccacgctgtaaacgatgagtactagctgttggagtcggtgtaaaggctctagtggcgcagctaacgcgataagtactccgcctggggactacggccgcaaggctaaaactcaaaggaattgacggggacccgcacaagcggtggagcatgtggtttaattcgatgcaacgcgaagaaccttacctggtcttgacatcctgcgaactttctagagatagattggtgccttcgggaacgcagtgacaggtgctgcacggctgtcgtcagctcgtgttgtgaaatgttgggttaagtcccgcaacgagcgcaacccctattgatagttaccatcattaagttgggtactctattgagactgccgctgacaaggcggaggaaggtggggacgacgtcaagtcatcatggcccttacgaccagggctacacacgtgctacaatgggtattacagagggctgcgaaggtgcgagctggagcgaaactcaaaaaggtactcttagtccggattgcagtctgcaactcgactgcatgaagtcggaatcgctagtaatcgcaggtcagaatactgcggtgaatacgttcccgggtcttgtacacaccgcccgtcacaccatgggagtgggttgctccagaagtagatagcttaacgaatgggcgtttaccacggagtgattcatgactggggtgaagtcgtaacaaggtagccgtaggggaacctgcggctggatcacctcctta

SEQ ID NO: 890 - DNA, 1518 bp, Francisella philomiragia
agagtttgatcatggctcagattgaacgctggtggcatgcttaacacatgcaagtcgaacggtaacaggtcttcggatgctgacgagtggcggacgggtgagtaacgcgtaggaatctgcccatttgagggggataccagttggaaacgactgttaataccgcataatatctgtggattaaaggtggcttaggctgccgcagatggatgagcctgcgttggattagctagttggtggggtaagggcctaccaaggctacgatccatagctgatttgagaggatgatcagccacattgggactgagacacggcccaaactcctacgggaggcagcagtggggaatattggacaatgggggaaaccctgatccagcaatgccatgtgtgtgaagaaggctctagggttgtaaagcactttagttggggaggaaagcctataagttaatagcttgtaggaaggacgttacccaaagaataaggaccggctaactccgtgccagcagccgcggtaatacggggggtccgagcgttaatcggaattactgggcgtaaagggtctgtaggtggtttgttaagtcagatgtgaaagcccagggctcaaccttggaactgcatttgatactggcaaactagagtatggtagaggaatggggaatttctggtgtagcggtgaaatgcgtagagatcagaaggaacaccaatggcgaaggcaacattctggaccaatactgacactgagggacgaaagcgtggggatcaaacaggattagataccctggtagtccacgctgtaaacgatgagtactagctgttggattcggtgtaaaggatctagtggcgcagctaacgcgttaagtactccgcctggggactacggccgcaaggctaaaactcaaaggaattgacggggacccgcacaagcggtggagcatgtggtttaattcgatgcaacgcgaagaaccttacctggtcttgacatcctgcgaactttctagagatagattggtgccttcgggaacgcagtgacaggtgctgcacggctgtcgtcagctcgtgttgtgaaatgttgggttaagtcccgcaacgagcgcaacccctattgatagttaccatcattaagttgggtactctattgagactgccgctgacaaggcggaggaaggtggggacgacgtcaagtcatcatggcccttacgaccagggctacacacgtgctacaatgggtattacagagggctgcgaaggtgcgagctggagcgaaactcagaaaggtactcttagtccggattgcagtctgcaactcgactgcatgaagtcggaatcgctagtaatcgcaggtcagaatactgcggtgaatacgttcccgggtcttgtacacaccgcccgtcacaccatgggagtgggttgctccagaagtagatagcttaacgaatgggcgtttaccacggagtgattcatgactggggtgaagtcgtaacaaggtagccgtaggggaacctgcggctggatcacctcctt

SEQ ID NO: 891 - DNA, 1530 bp, Francisella tularensis
ttaaactgaagagtttgatcctggctcagattgaacgctggtggcatgcttaacacatgcaagtcgaacggtaacaggtcttaggatgctgacgagtggcggacgggtgagtaacgcgtaggaatctgcccatttgagggggataccagttggaaacgactgttaataccgcataatatctgtggattaaaggtggctttcgggctgtcgcagatggatgagcctgcgttggattagctagttggtggggtaagggcccaccaaggctacgatccatagctgatttgagaggatgatcagccacattgggactgagacacggcccaaactcctacgggaggcagcagtggggaatattggacaatgggggcaaccctgatccagcaatgccatgtgtgtgaagaaggccctagggttgtaaagcactttagttggggaggaaagcctcaaggttaatagccttgggggaggacgttacccaaagaataagcaccggctaactccgtgccagcagccgcggtaatacggggggtgcaagcgttaatcggaattactgggcgtaaagggtctgtaggtggtttgttaagtcagatgtgaaagcccagggctcaaccttggaactgcatttgatactggcaaactagagtacggtagaggaatggggaatttctggtgtagcggtgaaatgcgtagagatcagaaggaacaccaatggcgaaggcaacattctggaccgatactgacactgagggacgaaagcgtggggatcaaacaggattagataccctggtagtccacgctgtaaacgatgagtactagctgttggagtcggtgtaaaggctctagtggcgcagctaacgcgataagtactccgcctggggactacggccgcaaggctaaaactcaaaggaattgacggggacccgcacaagcggtggagcatgtggtttaattcgatgcaacgcgaagaaccttacctggtcttgacatcctgcgaactttctagagatagattggtgccttcgggaacgcagtgacaggtgctgcacggctgtcgtcagctcgtgttgtgaaatgttgggttaagtcccgcaacgagcgcaacccctattgatagttaccatcattaagttgggtactctattaagactgccgctgacaaggcggaggaaggtggggacgacgtcaagtcatcatggcccttacgaccagggctacacacgtgctacaatgggtattacagagggctgcgaaggtgcgagctggagcgaaactcaaaaaggtactcttagtccggattgcagtctgcaactcgactgcatgaagtcggaatcgctagtaatcgcaggtcagaatactgcggtgaatacgttcccgggtcttgtacacaccgcccgtcacaccatgggagtgggttgctccagaagtagatagcttaacgaatgggcgtttaccacggagtgattcatgactggggtgaagtcgtaacaaggtagccgtaggggaacctgcggctggatcacctcctta

SEQ ID NO: 892 - DNA, 1445 bp, Fulvimonas sp.
  NML 060897
gcctaacacatgcaagtcgaacggcagcacagtggagcttgctccatgggtggcgagtggcggacgggtgagtaaggcatcgggatctacccagacgtgggggataacgtagggaaacttacgctaataccgcatacgtcctacgggagaaagcgggggaccttcgggcctcgcgcggctggacgaaccgatgtgcgattagctagttggtggggtaaaggctcaccaaggcgacgatcgctagctggtctgagaggatgatcagccacactgggactgagacacggcccagactcctacgggaggcagcagtggggaatattggacaatgggcgcaagcctgatccagcaatgccgcgtgtgtgaagaaggccttcgggttgtaaagcacttttatcaggagcgaaatactgccggctaatacccggcggggctgacggtacctgaggaataagcaccggctaacttcgtgccagcagccgcggtaatacgaagggtgcaagcgttaatcggaattactgggcgtaaagcgtgcgtaggcggttctttaagtctgctgtgaaatccccgggctcaacctgggaatggcagtggatactggggagctagagtgtgatagaggatggtggaattcccggtgtagcggtgaaatgcgtagagatcgggaggaacatcagtggcgaaggcggccatctggatcaacactgacgctgaggcacgaaagcgtggggagcaaacaggattagataccctggtagtccacgccctaaacgatgcgaactggatgttggtctcaactcggagatcagtgtcgaagctaacgcgttaagttcgccgcctggggagtacggtcgcaagactgaaactcaaaggaattgacgggggcccgcacaagcggtggagtatgtggtttaattcgatgcaacgcgaagaaccttacctggccttgacatgtccggaatcctgcagagatgcgggagtgccttcgggaatcggaacacaggtgctgcatggctgtcgtcagctcgtgtcgtgagatgttgggttaagtcccgcaacgagcgcaacccttgtccttagttgccagcacgtaatggtgggaactctaaggagactgccggtgacaaaccggaggaaggtggggatgacgtcaagtcatcatggcccttacggccagggctacacacgtactacaatggtcggtacagagggttgcaataccgcgaggtggagccaatcccagaaagccgatcccagtccggatcggagtctgcaactcgactccgtgaagtcggaatcgctagtaatcgcagatcagctatgctgcggtgaatacgttcccgggccttgtacacaccgcccgtcacaccatgggagtgagctgctccagaagccgttagtctaaccgcaagggggacgacgaccacggagtggttcatgactgg

SEQ ID NO: 893 - DNA, 1308 bp, Fusobacterium canifelinum
tggctcaggatgaacgctgacagaatgcttaacacatgcaagtctactgtggcggacgggtgagtaacgcgtaaagaacttgcctcacagctagggacaacatttggaaacgaatgctaatacctaatattgaaaggcgctgtgagagagctttgcgtcccattagctagttggagaggtaacggctcaccaaggcgatgatgggtagccggcctgagagggtgatcggccacaaggggactgagacacggcccttactcctacgggaggcagcagtggggaatattggacaatggaccaagtctgatccagcaattctgtgtgcacgatgaagtttttcggaatgtaaagtgctttcagttgggaagatgacggtaccaacagaagaagtgacggctaaatacgtgccagcagccgcggtaatacgtatgtcacaagcgttatccggatttattgggcgtaaagcgcgtctaggtggttatgtaagtctgatgtgaaaatgcagggctcaactctgtattgcgttggaaactgtgtaactagagtactggagaggtaagcggaactacaagtgtagaggtgaaattcgtagatatttgtaggaatgccgatggggaagccagcttactggacagactgacgctgaagcgcgaaagcgtgggtagcaaacaggattagataccctggtagtccacgccgtaaacgatgattactaggtgttggggcctcagcgcccaagcaaacgcgataagtaatccgcctggggagtacgtacgcaagtatgaaactcaaaggaattgacggggacccgcacaagcggtggagcatgtggtttaattcgacgcaacgcgaggaaccttaccagcgtttgacatcgacaggtggtgcatggctgtcgtcagctcgtgtcgtgagatgttgggttaagtcccgcaacgagcgcaacccctttcgtatgttaccatcatggggactcatgcgatactgcctacgatgagtaggaggaaggtggggatgacgtcaagtcatcatgccccttatacgctgggctacacacgtgctacaatgggtagcagagagctgcaaagccgtgaggtggagctaatctcagctattcttagttcggatgtactctgcaactcgagtacagaagttggaatcgctagtaatcgcgaatcagcaatgtcgcggtgaatacgttctcgggtcttgtacacaccgcccgtcacaccacgagagttggttgcacctgaagtagcagcctagggatgctccgagggtgtgattagcgattggggtgaagtcgta

SEQ ID NO: 894 - DNA, 1294 bp, Fusobacterium sp.
  C1
gatgaacgctgacagaatgcttaacacatgcaagtcaacgagtggcggacgggtgagtaacgcgtaaagaacttgcctcacagctagggacaacatttagaaatgaatgctaatacctgatattgaaaggcactgtgagagagctttgcgtcccattagctagttggagaggtaacagctcaccaaggcgatgatgggtagccggcctgagagggtgaacggccacaaggggactgagacacggcccttactcctacgggaggcagcagtggggaatattggacaatggacgagagtctgatccagcaattccgtgtgcacgatgaagtttttcggaatgtaaagtgctttcagttgggaagatgacggtaccaacagaagaagtgacggctaaatacgtgccaacagccgcggtaatacgtatgtcacgagcgttatccggatttattgggcgtaaagcgcgcctaggtggttatgtaagtctgatgtgaaaatgcagggctcaactctgtattgcgttggaaactgtataactagagtactggagaggtaagcggaactacaagtgtagaggtgaaattcgtagatatttgtaggaatgccgatggggaagccagcttactggacagactgacgctaaagcgcgagagcgtgggtagcaaacaggattagataccctggtagtccacgctgtaaacgatgattactaggtgttggggcctcagcgcccaagcaaacgcgataagtaatccgcctggggagtacgtacgcaagtatgaaactcaaaggaattgacgtggacccgcacaagcggtggagcatgtggtttaattcgacgcaacgcgaggaaccttaccagcgtttgacatcgacaggtggtgcatggctgtcgtcagctcgtgtcgtgagatgttgggttaagtcccgcaacgagcgcaacccctttcgtatgttaccatcatggggactcacgcgatactgcctacgatgagtaggaggaaggtggggatgacgtcaagtcattatgccccttatacgctgggctacacacgtgctacaatgggtagcagagagttgcaaagccgtgaggtgaagctaatctcagctatttttagttcggatgtactctgcaactcgagtacagaagttggaatcgctagtaatcgcgaatcagcaatgtcgcggtgaatacgttctcgggtcttgtacacaccgcccgtcacaccacgagagttggttgcacctgaagtagcggcctagggatgctccgagggtgtgattagcgattggggtg

SEQ ID NO: 895 - DNA, 1294 bp, Fusobacterium sp.
  C2
gatgaacgctgacagaatgcttaacacatgcaagtcaactggtggcggacgggtgagtaacgcgtaaagaacttgcctcacagctagggacaacatttagaaatgaatgctaatacctgatattgaaaggcactgtgagagagctttgcgtcccattagctagttggagaggtaacagctcaccaaggcgatgatgggtagccggcctgagagggtgaacggccacaaggggactgagacacggcccttactcctacgggaggcagcagtggggaatattggacaatggacgagagtctgatccagcaattctgtgtgcacgatgaagtttttcggaatgcaaagtgctttcagttgggaagatgacggtaccaacagaagaagtgacggctaaatacgtgccagcagccgcggtaatatgtatgtcacgagcgttatccggatttattgggcgtaaagcgcgtctaggtggttatgtaagtctgatgtgaaaatgcagggctcaactctgtattgcgttggaaactgtgtaactagagtactggagaggtaagcggaactacaagtgtagaggtgaaattcgtagatatttgtaggaatgccgatggggaagccagcttactggacagactgacgctaaagcgcgaaagcgtgggtagcaaacaggattagataccctggtagtccacgctgtaaacgatgattactaggtgttggggcctcagcgcccaagcaaacgcgataagtaatccgcctggggagtacgtacgcaagtatgaaactcaaaggaattgacggggacccgcacaagcggtggagcatgtggtttaattcgacgcaacgcgaggaaccttaccagcgtttgacatcgacaggtggtgcatggctgtcgtcagctcgtgtcgtgagatgttgggttaagtcccgcaacgagcgcaacccctttcgtatgttaccatcatggggactcatgcgatactgcctacgatgagtaggaggaaggtggggatgacgtcaagtcatcatgccccttatacactgggctacacacgtgctacaatgggtagcagagggttgcaaagccgtgaggtgaagctaatctcggctattcttagttcggatgtactctgcaactcgagtacagaagttggaatcgctagtaatcgcgaatcagcaatgtcgcggtgaatacgttctcgggtcttgtacacaccgcccgtcacaccacgagagttggttgcacctgaagtagcagcctagggatgctccgagggtgtgattagcgattggggtg

SEQ ID NO: 896 - DNA, 1509 bp, Fusobacterium gonidiaformans
gaacgaagagtttgatcctggctcaggatgaacgctgacagaatgcttaacacatgcaagtcgactcgagtcttcggacttgggtggcggacgggtgagtaacgcgtaaagaacttgcctcatagtctgggacaacatctggaaacggatgctaataccggatattatgctttcttcgcatggaggaagtatgaaagctatatgcgctatgagagagctttgcgtcccattagctagttggtgaggtaacggcccaccaaggcgatgatgggtagccggcctgagagggtgaacggccacaaggggactgagacacggcccttactcctacgggaggcagcagtggggaatattggacaatggaccaaaagtctgatccagcaattctgtgtgcacgatgacgtttttcggaatgtaaagtgctttcagtcgggaagaagcaagtgacggtaccgacagaagaagcgacggctaaatacgtgccagcagccgcggtaatacgtatgtcgcaagcgttatccggatttattgggcgtaaagcgcgtctaggcggcaaggaaagtctgatgtgaaaatgcggggctcaactccgtattgcgttggaaactgccttactagagtactggagaggtaggcggaactacaagtgtagaggtgaaattcgtagatatttgtaggaatgccgatggggaagccagcctactggacagatactgacgctaaagcgcgaaagcgtgggtagcaaacaggattagataccctggtagtccacgctgtaaacgatgattactaggtgttgggggtcaaacctcagcgcccaagctaacgcgataagtaatccgcctggggagtacgtacgcaagtatgaaactcaaaggaattgacggggacccgcacaagcggtggagcatgtggtttaattcgacgcaacgcgaggaaccttaccagcgtttgacatcctacaaagagtgcagagatgcgcttgtgcttcttcggaagaatgtagtgacaggtggtgcatggctgtcgtcagctcgtgtcgtgagatgttgggttaagtcccgcaacgagcgcaacccctatcgtatgttaccagcctttagttggggactcatgcgatactgcctgcgacgagcaggaggaaggtggggatgacgtcaagtcatcatgccccttatacgctgggctacacacgtgctacaatgggtagtacagagagcggcgaacccgcgagggggagcaaatctcagaaaactattcttagttcggattgtactctgcaactcgagtacatgaagttggaatcgctagtaatcgcaaatcagcaatgttgcggtgaatacgttctcgggtcttgtacacaccgcccgtcacaccacgagagttggttgcacctgaagtagcaggcctaaccgtaaggaaggatgctccgagggtgtggttagcgattggggtgaagtcgtaacaaggtatccgtacgggaacgtgcggatggatcacctcctttct

SEQ ID NO: 897 - DNA, 1671 bp, Fusobacterium mortiferum
aaaaaagtattgacgaaaaatattatttgtggtaatatataccttgtccgcgagagagcggaactgatgaataaggacattagcaacagaatagagaaagacaattaatgcaaacacaacaataaattggtgtaaaacaatcagtaaattttactgagttatatagattgaacgaagagtttgatcctggctcaggatgaacgctgacagaatgcttaacacatgcaagtctacttgatccttcgggtgatggtggcggacgggtgagtaacgcgtaaagaacttgccctgcagtctgggacaacatttggaaacgaatgctaataccggatattatgtgagtttcgcatgaaattcatatgaaagctatatgcgctgcaggagagctttgcgtcctattagctagttggtgaggtaacggctcaccaaggcgatgataggtagccggcctgagagggtgaacggccacaaggggactgagacacggcccttactcctacgggaggcagcagtggggaatattggacaatggaccaaaagtctgatccagcaattctgtgtgcacgatgaagtttttcggaatgtaaagtgctttcagttgggacgaagtaagtgacggtaccaacagaagaagcgacggctaaatacgtgccagcagccgcggtaatacgtatgtcgcaagcgttatccggatttattgggcgtaaagcgcgtctaggcggtttggtaagtctgatgtgaaaatgcggggctcaactccgtattgcgttggaaactgtcaaactagagtactggagaggtgggcggaactacaagtgtagaggtgaaattcgtagatatttgtaggaatgccgatggggaagccagcccactggacagatactgacgctaaagcgcgaaagcgtgggtagcaaacaggattagataccctggtagtccacgccgtaaacgatgattactaggtgttgggggtcgaacctcagcgcccaagctaacgcgataagtaatccgcctggggagtacgtacgcaagtatgaaactcaaaggaattgacggggacccgcacaagcggtggagcatgtggtttaattcgacgcaacgcgaggaaccttaccagcgtttgacatcctaagaaattagcagagatgcttttgtgccccttcgggggaacttagtgacaggtggtgcatggctgtcgtcagctcgtgtcgtgagatgttgggttaagtcccgcaacgagcgcaacccctttcgtatgttgccatcattaagttgggcactcatgcgatactgcctgcgatgagcaggaggaaggtggggatgacgtcaagtcatcatgccccttatacgctgggctacacacgtgctacaatgggtagtacagagagtcgcaaacctgcgagggggagctaatctcagaaaactattctcagttcggattgtactctgcaactcgagtacatgaagttggaatcgctagtaatcgcaaatcagctatgttgcggtgaatacgttctcgggtcttgtacacaccgcccgtcacaccacgagagttggttgcacctgaagtagcaggcctaaccgcaaggagggatgctccgagggtgtgattagcgattggggtgaagtcgtaacaaggtatccgtacgggaacgtgcggatggatcacct

SEQ ID NO: 898 - DNA, 1473 bp, Fusobacterium naviforme
tagagtttgatcatggctcaggatgaacgctggcggcgtgcttaacacatgcaagtcgaacgagagctacaggaggaagttttcggatggaatccggtagatcgagtggcggacgggtgagtaacgcgtggggaacctgcctcatacagggggataacagttggaaacgactgttaataccgcataagaccacagagtcgcatgactcaggggtaaaaactccggtggtatgagatggacccgcgttcgattagccagttggcggggtaacggcccaccaaagcgacgatcgatagccgatttgagagaatgaccggccacattgggactgagacacggcccaaactcctacgggaggcagcagtggggaatattgcacaatggggggaaccctgatgcagcgacgccgcgtgagtgaagaagtatttcggtatgtaaagctctatcagcagggaagaagatgacggtacctgagtaagaagccccggctaactacgtgccagcagccgcggtaatacgtagggggcaagcgttatccggatttactgggtgtaaagggagcgcagacggctatgcaagtctgaagtgaaagcccggggctcaaccccgggactgctttggaaactgtgyagctagagtgtcggagaggtagcagaattcccagtgtagcggtgaaatgcgtagatattgggaagaataccggtggcgaaggcgcttactggacgataactgacgttcaggctcgaaggcgtggggagcaaacaggattagataccctggtagtccacgcggtaaacgatgaatactaggtgttggcatccaaaggatgtcggtgccgtcgcaaacgcaataagtattccacctggggagtacgttcgcaagaatgaaactcaaaggaattgacggggacccgcacaagcagtggagcatgtggtttaattcgaagcaacgcgaagaaccttaccaagtcttgacatcccgatgaccggcctgtaaagaggccttctcttcggagcattggagacaggtggtgcatggttgtcgtcagctcgtgtcgtgagatgttgggttaagtcccgcaacgagcgcaacccctattgccagtagccagcaggtaaagctgggcactctggcgagactgcctgggataaccaggaggaaggtggggatgacgtcaaatcatcatgccccttatgatttgggcaacacacgtgctacaatggcgtaaacagagagaagcgaaggagcgatccggagcgaatctaaaaataacgtctcagttcggactgcagtctgcaactcgactgcacgaagctggaattgctagtaatcgcgaatcagcatgtcgcggtgaatacgttcccgggtcttgtacacaccgcccgtcacaccatgggagtcagcaacgcccgaagtcagtgacccaaccttagggagggagctgccgaaggcggggcggataactggggtgaa

SEQ ID NO: 899 - DNA, 1330 bp, Fusobacterium necrogenes
  modified_base (43)..(43): a, c, t, g, unknown or other
  modified_base (167)..(167): a, c, t, g, unknown or other
  modified_base (189)..(189): a, c, t, g, unknown or other
  modified_base (243)..(243): a, c, t, g, unknown or other
  modified_base (258)..(258): a, c, t, g, unknown or other
  modified_base (261)..(261): a, c, t, g, unknown or other
  modified_base (302)..(302): a, c, t, g, unknown or other
  modified_base (314)..(314): a, c, t, g, unknown or other
  modified_base (361)..(361): a, c, t, g, unknown or other
  modified_base (632)..(632): a, c, t, g, unknown or other
  modified_base (846)..(846): a, c, t, g, unknown or other
  modified_base (887)..(887): a, c, t, g, unknown or other
  modified_base (900)..(900): a, c, t, g, unknown or other
  modified_base (902)..(902): a, c, t, g, unknown or other
  modified_base (914)..(914): a, c, t, g, unknown or other
  modified_base (997)..(997): a, c, t, g, unknown or other
  modified_base (1074)..(1074): a, c, t, g, unknown or other
  modified_base (1091)..(1091): a, c, t, g, unknown or other
  modified_base (1139)..(1139): a, c, t, g, unknown or other
  modified_base (1172)..(1172): a, c, t, g, unknown or other
tggtggcggacgggtgagtaacgcgtaaagaacttgccctgcngtctgggacaacatttggaaacgaatgctaataccggatattatgtgagtttcgcatgaaattcatatgaaagctatatgcgctgtgggagagctttgcgtcctattagctagttggtgaggtnacggctcaccaaggcgatgatnggtagccggcctgagagggtgaacggccacaaggggactgagacacggcccttnctcctacgggaggcngcngtggggaatattggacaatggaccaaaagtctgatccagcnattctgtgtgcncgatgaagtttttcggaatgtaaagtgctttcagttgggacgaagtnagtgacggtaccaacagaagaagcgacggctaaatacgtgccagcagccgcggtaatacgtatgtcgcaagcgttatccggatttattgggcgtaaagcgcgtctaggcggtttggtaagtctgatgtgaaaatgcggggctcaactccgtattgcgttggaaactgccaaactagagtactggagaggtgggcggaactacaagtgtagaggtgaaattcgtagatatttgtaggaatgccgatggggaagccagcccactggacagatnctgacgctaaagcgcgaaagcgtgggtagcaaacaggattagataccctggtagtccacgccgtaaacgatgattactaggtgttgggggtcgaacctcagcgcccaagctaacgcgataagtaatccgcctggggagtacgtacgcaagtatgaaactcaaaggaattgacggggaccgcacaagcggtggagcatgtggtttaattcgacgnaacgcgaggaaccttaccagcgtttgacatcctaagaaatnagcagagatgctntngtgcttcggggnaacttagtgacaggtggtgcatggctgtcgtcagctcgtgtcgtgagatgttgggttaagtcccgcaacgagcgcaacccctntcgtatgttgccatcattaagttgggcactcatgcgatactgcctgcgatgagcaggaggaaggtggggatgacgtnaagtcatcatgcccctnatacgctgggctacacacgtgctacaatgggtagtacagagagtcgcnaacctgcgagggggagctaatctcagaaaactnttctcagttcggattgtactctgcaactcgagtacatgaagttggaatcgctagtaatcgcaaatcagctatgttgcggtgaatacgttctcgggtcttgtacacaccgcccgtcacaccacgagagttggttgcacctgaagtagcaggcctaaccg

SEQ ID NO: 900 - DNA, 1487 bp, Fusobacterium necrophorum
tttgatcctggctcaggatgaacgctgacagaatgcttaacacatgcaagtcgactcgagtcttcggacttgggtggcgcacgggtgagtaacgcgtaaagaacttgcctcttagaccgggacaacatctggaaacggatgctaataccggatattatggttttttcgcatggaggaatcatgaaagctagatgcgctaagagagagctttgcgtcccattagctagttggtgaggtaacggcccaccaaggcaatgatgggtagccggcctgagagggtgaacggccacaaggggactgagacacggcccttactcctacgggaggcagcagtggggaatattggacaatggaccacaagtctgatccagcaattctgtgtgcacgatgacgtttttcggaatgtaaagtgctttcagtcgggaagaagtcagtgacggtaccgacagaagaagcgacggctaaatacgtgccagcagccgcggtaatacgtatgtcgcaagcgttatccggatttattgggcgtaaagcgcgtctaggcggcaaggaaagtctgatgtgaaaatgcggagctcaactccgtatggcgttggaaactgccttactagagtactggagaggtaggcggaactacaagtgtagaggtgaaattcgtagatatttgtaggaatgccgatggggaagccagcctactggacagatactgacgctaaagcgcgaaagcgtgggtagcaaacaggattagataccctggtagtccacgctgtaaacgatgattactaggtgttgggggtcaaacctcagcgcccaagctaacgcgataagtaatccgcctggggagtacgtacgcaagtatgaaactcaaaggaattgacggggaccgcacaagcggtggagcatgtggtttaattcgacgcaacgcgaggaaccttaccagcgtttgacatcctacgaacggagcagagatgcgccggtgccctttcgggggaacgtagtgacaggtggtgcatggctgtcgtcagctcgtgtcgtgagatgttgggttaagtcccgcaacgagcgcaacccctatcgtatgttaccatccttcagttggggactcatgcgatactgcctgcgacgagcaggaggaaggtggggatgacgtcaagtcatcatgccccttatacgctgggctacacacgtgctacaatgggtagtacagagagcggcaaacccgcgagggggagcaaatctcagaaaactattcttagttcggatggtactctgcaactcgagtacatgaagttggaatcgctagtaatcgcaaatcagcaatgttgcggtgaatacgttctcgggtcttgtacacaccgcccgtcacaccacgagagtgggttgcaactgaagtagcaggcctaaccttagggaaggatgctccgagggtgtggttagcgattggggtgaagtcgtaacaaggtatccgtacgggaacgtgcggctggatc

SEQ ID NO: 901 - DNA, 1523 bp, Fusobacterium nucleatum
ttgaacgaagagtttgatcctggctcaggatgaacgctgacagaatgcttaacacatgcaagtctacttgaatttgggttttttaacttcgatttgggtggcggacgggtgagtaacgcgtaaagaacttgcctcacagctagggacaacatttggaaacgaatgctaatacctgatattatgattatagggcatcctagaattatgaaagctatatgcgctgtgagagagctttgcgtcccattagctagttggagaggtaacggctcaccaaggcgatgatgggtagccggcctgagagggtgaacggccacaaggggactgagacacggcccttactcctacgggaggcagcagtggggaatattggacaatggaccgagagtctgatccagcaattctgtgtgcacgatgacgtttttcggaatgtaaagtgctttcagttgggaagaaaaaaatgacggtaccaacagaagaagtgacggctaaatacgtgccagcagccgcggtaatacgtatgtcacgagcgttatccggatttattgggcgtaaagcgcgtctaggtggttatgtaagtctgatgtgaaaatgcagggctcaactctgtattgcgttggaaactgtgtaactagagtactggagaggtaagcggaactacaagtgtagaggtgaaattcgtagatatttgtaggaatgccgatggggaagccagcttactggacagatactgacgctgaagcgcgaaagcgtgggtagcaaacaggattagataccctggtagtccacgccgtaaacgatgattactaggtgttgggggtcgaacctcagcgcccaagcaaacgcgataagtaatccgcctggggagtacgtacgcaagtatgaaactcaaaggaattgacggggacccgcacaagcggtggagcatgtggtttaattcgacgcaacgcgaggaaccttaccagcgtttgacatcttaggaatgagacagagatgtttcagtgtcccttcggggaaacctaaagacaggtggtgcatggctgtcgtcagctcgtgtcgtgagatgttgggttaagtcccgcaacgagcgcaacccctttcgtatgttaccatcattaagttggggactcatgcgatactgcctacgatgagtaggaggaaggtggggatgacgtcaagtcatcatgccccttatacgctgggctacacacgtgctacaatgggtagaacagagagttgcaaagccgtgaggtggagctaatctcagaaaactattcttagttcggattgtactctgcaactcgagtacatgaagttggaatcgctagtaatcgcgaatcagcaatgtcgcggtgaatacgttctcgggtcttgtacacaccgcccgtcacaccacgagagttggttgcacctgaagtagcaggcctaaccgtaaggagggatgttccgagggtgtgattagcgattggggtgaagtcgtaacaaggtatccgtacgggaacgtgcggatggatcacctcctttct

SEQ ID NO: 902 - DNA, 1509 bp, Fusobacterium periodonticum
ttgaacgaagagtttgatcctggctcaggatgaacgctgacagaatgcttaacacatgcaagtctacttgaacttcggtttgggtggcggacgggtgagtaacgcgtaaagaacttgcctcacagttagggacaacatttggaaacgaatgctaatacctgatattatgattttagggcatcctaagattatgaaagctatatgcgctgtgagagagctttgcgtcccattagctagttggagaggtaacggctcaccaaggcgatgatgggtagccggcctgagagggtgaacggccacaaggggactgagacacggcccttactcctacgggaggcagcagtggggaatattggacaatggaccaagagtctgatccagcaattctgtgtgcacgatgacgtttttcggaatgtaaagtgctttcagttgggaagaaaaaaatgacggtaccaacagaagaagtgacggctaaatacgtgccagcagccgcggtaatacgtatgtcacaagcgttatccggatttattgggcgtaaagcgcgtctaggtggttatgtaagtctgatgtgaaaatgcagggctcaactctgtattgcgttggaaactgcatgactagagtactggagaggtaagcggaactacaagtgtagaggtgaaattcgtagatatttgtaggaatgccgatggggaagccagcttactggacagatactgacgctaaagcgcgaaagcgtgggtagcaaacaggattagataccctggtagtccacgccgtaaacgatgattactaggtgttgggggtcgaacctcagcgcccaagctaacgcgataagtaatccgcctggggagtacgtacgcaagtatgaaactcaaaggaattgacggggacccgcacaagcggtggagcatgtggtttaattcgacgcaacgcgaggaaccttaccagcgtttgacatcttaggaatgagacagagatgtttcagtgtcccttcggggaaacctaaagacaggtggtgcatggctgtcgtcagctcgtgtcgtgagatgttgggttaagtcccgcaacgagcgcaacccctttcgtatgttaccatcattaagttggggactcatgcgatactgcctgcgatgagcaggaggaaggtggggatgacgtcaagtcatcatgccccttatacgctgggctacacacgtgctacaatgggtagtacagagagtcgcaaagccgcgaggtggagctaatctcagaaaactattcttagttcggattgtactctgcaactcgagtacatgaagttggaatcgctagtaatcgcgaatcagcaatgtcgcggtgaatacgttctcgggtcttgtacacaccgcccgtcacaccacgagagttggttgcacctgaagtagcaggcctaaccgtaaggagggatgctccgagggtgtgattagcgattggggtgaagtcgtaacaaggtatccgtacgggaacgtgcggatggatcacctcctttct

SEQ ID NO: 903 - DNA, 1453 bp, Fusobacterium russii
  modified_base (1)..(2): a, c, t, g, unknown or other
  modified_base (298)..(298): a, c, t, g, unknown or other
  modified_base (321)..(322): a, c, t, g, unknown or other
  modified_base (511)..(511): a, c, t, g, unknown or other
  modified_base (885)..(885): a, c, t, g, unknown or other
  modified_base (893)..(893): a, c, t, g, unknown or other
  modified_base (895)..(895): a, c, t, g, unknown or other
  modified_base (901)..(901): a, c, t, g, unknown or other
  modified_base (926)..(928): a, c, t, g, unknown or other
  modified_base (1159)..(1160): a, c, t, g, unknown or other
  modified_base (1375)..(1375): a, c, t, g, unknown or other
  modified_base (1449)..(1450): a, c, t, g, unknown or other
nngaacgaagagtttgatcctggctcaggatgaacgctgacagaatgcttaacacatgcaagtcaacttgaacttcggtttgggtggcggacgggtgagtaacgcgtaaagaacttgcctcacagactgggacaacatttggaaacgaatgctaagaccggatattatgaattcattgcatgatgaagtcatgaaagctataagcgctgtgagagagctttgcgtcccattagctagttggagaggtaacggctcaccaaggcgatgatgggtagccggcctgagagggtgaacggcnacaaggggactgagacacggccnntactcctacgggaggcagcagtggggaatattggacaatggaccaagagtctgatccagcaattctgtgtgcacgatgaagtttttcggaatgtaaagtgctttcagttgggaagaagaaagtgacggtaccaacagaagaagcgacggctaaatacgtgccagcagccgcggtaatacgtatgctgcnagcgttatccggatttattgggcgtaaagcgcgtctaggcggctagataagtctgatgtgaaaatgcggggctcaactccgtattgcgttggaaactgtatagctagagtactggagaggtaagcggaactacaagtgtagaggtgaaattcgtagatatttgtaggaatgccgatggggaagccagcttactggacagatactgacgctgaagcgcgaaagcgtgggtagcaaacaggattagataccctggtagtccacgccgtaaacgatgattactaggtgttgggggtcgaacctcagcgcccaagcaaacgcgataagtaatccgcctggggagtacgtacgcaagtatgaaactcaaaggaattganggggaccngnacaagnggtggagcatgtggtttaattcgannnaacgcgaggaaccttaccagcgtttgacatcctactaagggctcagagatgagcttgtgctccttcgggagaaagtagagacaggtggtgcatggctgtcgtcagctcgtgtcgtgagatgttgggttaagtcccgcaacgagcgcaacccctttcgtatgttaccatcattaagttggggactcatgcgatactgcctgcgatgagcaggaggaaggtggggatgacgtnnagtcatcatgccccttatacgctgggctacacacgtgctacaatgggtagaacagagagtggcgaagctgtgaagtggagcaaatctcagaaaactattcttagttcggattgtactctgcaactcgagtacatgaagttggaatcgctagtaatcgcaaatcagcaatgttgcggtgaatacgttctcgggtcttgtacacaccgcccgtcacnccacgagagttggttgcacctgaagtaacaggcctaaccgaaaggagggatgttccgagggtgtgattagcgannggg

SEQ ID NO: 904 - DNA, 1522 bp, Fusobacterium sp.
  11_3_2
ttgaacgaagagtttgatcctggctcaggatgaacgctgacagaatgcttaacacatgcaagtcaacttgaatttgggtttttaacttagatttgggtggcggacgggtgagtaacgcgtaaagaacttgcctcacagctagggacaacatttagaaatgaatgctaatacctgatattatgattttaaggcatcttagaattatgaaagctataagcactgtgagagagctttgcgtcccattagctagttggagaggtaacagctcaccaaggcgatgatgggtagccggcctgagagggtgaacggccacaaggggactgagacacggcccttactcctacgggaggcagcagtggggaatattggacaatggaccgagagtctgatccagcaattctgtgtgcacgatgaagtttttcggaatgtaaagtgctttcagttgggaagaaagaaatgacggtaccaacagaagaagtgacggctaaatacgtgccagcagccgcggtaatacgtatgtcacgagcgttatccggatttattgggcgtaaagcgcgtctaggtggttatgtaagtctgatgtgaaaatgcagggctcaactctgtattgcgttggaaactgtataactagagtactggagaggtaagcggaactacaagtgtagaggtgaaattcgtagatatttgtaggaatgccgatggggaagccagcttactggacagatactgacgctaaagcgcgaaagcgtgggtagcaaacaggattagataccctggtagtccacgctgtaaacgatgattactaggtgttgggggtcgaacctcagcgcccaagcaaacgcgataagtaatccgcctggggagtacgtacgcaagtatgaaactcaaaggaattgacggggacccgcacaagcggtggagcatgtggtttaattcgacgcaacgcgaggaaccttaccagcgtttgacatcttaggaatgagatagagatatttcagtgtcccttcggggaaacctaaagacaggtggtgcatggctgtcgtcagctcgtgtcgtgagatgttgggttaagtcccgcaacgagcgcaacccctttcgtatgttaccatcattaagttggggactcatgcgatactgcctacgatgagtaggaggaaggtggggatgacgtcaagtcatcatgccccttatacgctgggctacacacgtgctacaatgggtagaacagagagttgcaaagccgtgaggtgaagctaatctcagaaaactattcttagttcggattgtactctgcaactcgagtacatgaagttggaatcgctagtaatcgcgaatcagcaatgtcgcggtgaatacgttctcgggtcttgtacacaccgcccgtcacaccacgagagttggttgcacctgaagtagcaggcctaaccgtaaggagggatgctccgagggtgtgattagcgattggggtgaagtcgtaacaaggtatccgtacgggaacgtgcggatggatcacctcctttct

SEQ ID NO: 905 - DNA, 1496 bp, Fusobacterium sp.
  12_1B
agagtttgatcctggctcaggatgaacgctgacagaatgcttaacacatgcaagtctacttgatccttcgggtgaaggtggcggacgggtgagtaacgcgtaaagaacttgccttacagactgggacaacatttggaaacgaatgctaataccggatattatgattgggtcgcatgatctggttatgaaagctatatgcgctgtgagagagctttgcgtcccattagttagttggtgaggtaacggctcaccaagacgatgatgggtagccggcctgagagggtgaacggccacaaggggactgagacacggcccttactcctacgggaggcagcagtggggaatattggacaatggaccaaaagtctgatccagcaattctgtgtgcacgatgaagtttttcggaatgtaaagtgctttcagttgggaagaagtcagtgacggtaccaacagaagaagcgacggctaaatacgtgccagcagccgcggtaatacgtatgtcgcaagcgttatccggatttattgggcgtaaagcgcgtctaggcggcttagtaagtctgatgtgaaaatgcggggctcaaccccgtattgcgttggaaactgctaaactagagtactggagaggtaggcggaactacaagtgtagaggtgaaattcgtagatatttgtaggaatgccgatggggaagccagcctactggacagatactgacgctaaagcgcgaaagcgtgggtagcaaacaggattagataccctggtagtccacgccgtaaacgatgattactaggtgttgggggtcgaacctcagcgcccaagctaacgcgataagtaatccgcctggggagtacgtacgcaagtatgaaactcaaaggaattgacggggacccgcacaagcggtggagcatgtggtttaattcgacgcaacgcgaggaaccttaccagcgtttgacatcccaagaagttaacagagatgttttcgtgcctcttcggaggaacttggtgacaggtggtgcatggctgtcgtcagctcgtgtcgtgagatgttgggttaagtcccgcaacgagcgcaacccctttcgtatgttaccatcattaagttggggactcatgcgagactgcctgcgatgagcaggaggaaggtggggatgacgtcaagtcatcatgccccttatacgctgggctacacacgtgctacaatgggtagtacagagagctgcaaacctgcgagggtaagctaatctcataaaactattcttagttcggattgtactctgcaactcgagtacatgaagttggaatcgctagtaatcgcaaatcagctatgttgcggtgaatacgttctcgggtcttgtacacaccgcccgtcacaccacgagagttggttgcacctgaagtaacaggcctaaccgtaaggagggatgttccgagggtgtgattagcgattggggtgaagtcgtaacaaggtatccgtacgggaacgtgcggatggatcacct

SEQ ID NO: 906 - DNA, 1509 bp, Fusobacterium sp.
  1_1_41FAA
ttgaacgaagagtttgatcctggctcaggatgaacgctgacagaatgcttaacacatgcaagtctacttgaacttcggtttgggtggcggacgggtgagtaacgcgtaaagaacttgcctcacagttagggacaacatttggaaacgaatgctaatacctgatattatgattttagggcatcctaagattatgaaagctatatgcgctgtgagagagctttgcgtcccattagctagttggagaggtaacggctcaccaaggcgatgatgggtagccggcctgagagggtgaacggccacaaggggactgagacacggcccttactcctacgggaggcagcagtggggaatattggacaatggaccaaaagtctgatccagcaattctgtgtgcacgatgacgtttttcggaatgtaaagtgctttcagttgggaagaaaaaaatgacggtaccaacagaagaagtgacggctaaatacgtgccagcagccgcggtaatacgtatgtcacaagcgttatccggatttattgggcgtaaagcgcgtctaggtggttatgtaagtctgatgtgaaaatgcagggctcaactctgtattgcgttggaaactgcatgactagagtactggagaggtaagcggaactacaagtgtagaggtgaaattcgtagatatttgtaggaatgccgatggggaagccagcttactggacagatactgacgctaaagcgcgaaagcgtgggtagcaaacaggattagataccctggtagtccacgccgtaaacgatgattactaggtgttgggggtcgaacctcagcgcccaagctaacgcgataagtaatccgcctggggagtacgtacgcaagtatgaaactcaaaggaattgacggggacccgcacaagcggtggagcatgtggtttaattcgacgcaacgcgaggaaccttaccagcgtttgacatcttaggaatgagacagagatgtttcagtgtcacttcggtgaaacctaaagacaggtggtgcatggctgtcgtcagctcgtgtcgtgagatgttgggttaagtcccgcaacgagcgcaacccctttcgtatgttaccatcattaagttggggactcatgcgatactgcctgcgatgagcaggaggaaggtggggatgacgtcaagtcatcatgccccttatacgctgggctacacacgtgctacaatgggtagtacagagagtcgcaaagccgcgaggtggagctaatctcagaaaactattcttagttcggattgtactctgcaactcgagtacatgaagttggaatcgctagtaatcgcgaatcagcaatgtcgcggtgaatacgttctcgggtcttgtacacaccgcccgtcacaccacgagagttggttgcacctgaagtagcaggcctaaccgcaaggagggatgctccgagggtgtgattagcgattggggtgaagtcgtaacaaggtatccgtacgggaacgtgcggatggatcacctcctttct

SEQ ID NO: 907 - DNA, 1494 bp, Fusobacterium sp.
  2_1_31
agagtttgatcctggctcaggatgaacgctgacagaatgcttaacacatgcaagtctacttgaacttcggtttgggtggcggacgggtgagtaacgcgtaaagaacttgcctcacagttagggacaacatttggaaacgaatgctaatacctgatattatgattttagggcatcctaagattatgaaagctatatgcgctgtgagagagctttgcgtcccattagctagttggagaggtaacggctcaccaaggcgatgatgggtagccggcctgagagggtgaacggccacaaggggactgagacacggcccttactcctacgggaggcagcagtggggaatattggacaatggaccaaaagtctgatccagcaattctgtgtgcacgatgacgtttttcggaatgtaaagtgctttcagttgggaagaaaaaaatgacggtaccaacagaagaagtgacggctaaatacgtgccagcagccgcggtaatacgtatgtcacaagcgttatccggatttattgggcgtaaagcgcgtctaggtggttatgtaagtctgatgtgaaaatgcagggctcaactctgtattgcgttggaaactgcatgactagagtactggagaggtaagcggaactacaagtgtagaggtgaaattcgtagatatttgtaggaatgccgatggggaagccagcttactggacagatactgacgctaaagcgcgaaagcgtgggtagcaaacaggattagataccctggtagtccacgccgtaaacgatgattactaggtgttgggggtcgaacctcagcgcccaagctaacgcgataagtaatccgcctggggagtacgtacgcaagtatgaaactcaaaggaattgacggggacccgcacaagcggtggagcatgtggtttaattcgacgcaacgcgaggaaccttaccagcgtttgacatcttaggaatgagacagagatgtttcagtgtcacttcggtgaaacctaaagacaggtggtgcatggctgtcgtcagctcgtgtcgtgagatgttgggttaagtcccgcaacgagcgcaacccctttcgtatgttaccatcattaagttggggactcatgcgatactgcctacgatgagtaggaggaaggtggggatgacgtcaagtcatcatgccccttatacgctgggctacacacgtgctacaatgggtagtacagagagtcgcaaagccgcgaggtggagctaatctcagaaaactattcttagttcggattgtactctgcaactcgagtacatgaagttggaatcgctagtaatcgcgaatcagcaatgtcgcggtgaatacgttctcgggtcttgtacacaccgcccgtcacaccacgagagttggttgcacctgaagtagcaggcctaaccgtaaggagggatgctccgagggtgtgattagcgattggggtgaagtcgtaacaaggtatccgtacgggaacgtgcggatggatcacct

SEQ ID NO: 908 - DNA, 1522 bp, Fusobacterium sp.
  3_1_27
ttgaacgaagagtttgatcctggctcaggatgaacgctgacagaatgcttaacacatgcaagtcaacttgaatttgggtttttaacttaggtttgggtggcggacgggtgagtaacgcgtaaagaacttgcctcacagctagggacaacatttggaaacgaatgctaatacctaatattatgataatagggcatcctataattatgaaagctataagcgctgtgagagagctttgcgtcccattagctagttggagaggtaacggctcaccaaggcgatgatgggtagccggcctgagagggtgatcggccacaaggggactgagacacggcccttactcctacgggaggcagcagtggggaatattggacaatggaccaagagtctgatccagcaattctgtgtgcacgatgaagtttttcggaatgtaaagtgctttcagttgggaagaaaaaaatgacggtaccaacagaagaagtgacggctaaatacgtgccagcagccgcggtaatacgtatgtcacgagcgttatccggatttattgggcgtaaagcgcgtctaggtggttatgtaagtctgatgtgaaaatgcagggctcaactctgtattgcgttggaaactgtataactagagtactggagaggtaagcggaactacaagtgtagaggtgaaattcgtagatatttgtaggaatgccgatggggaagccagcttactggacagatactgacgctgaagcgcgaaagcgtgggtagcaaacaggattagataccctggtagtccacgccgtaaacgatgattactaggtgttgggggtcgaacctcagcgcccaagcaaacgcgataagtaatccgcctggggagtacgtacgcaagtatgaaactcaaaggaattgacggggacccgcacaagcggtggagcatgtggtttaattcgacgcaacgcgaggaaccttaccagcgtttgacatcttaggagtgagatagagatatttcagtgtcccttcggggaaacctaaagacaggtggtgcatggctgtcgtcagctcgtgtcgtgagatgttgggttaagtcccgcaacgagcgcaacccctttcgtatgttaccatcattaagttggggactcatgcgatactgcctacgatgagtaggaggaaggtggggatgacgtcaagtcatcatgccccttatacgctgggctacacacgtgctacaatgggtagaacagagagttgcaaagctgtgaagtggagctaatctcagaaaactattcttagttcggattgtactctgcaactcgagtacatgaagttggaatcgctagtaatcgcgaatcagcaatgtcgcggtgaatacgttctcgggtcttgtacacaccgcccgtcacaccacgagagttggttgcacctgaagtagcaggcctaaccgtaaggagggatgctccgagggtgtgattagcgattggggtgaagtcgtaacaaggtatccgtacgggaacgtgcggatggatcacctcctttct

SEQ ID NO: 909 - DNA, 1522 bp, Fusobacterium sp.
  3_1_33
ttgaacgaagagtttgatcctggctcaggatgaacgctgacagaatgcttaacacatgcaagtcaacttgaatttgggtttttaacttagatttgggtggcggacgggtgagtaacgcgtaaagaacttgcctcacagctagggacaacatttagaaatgaatgctaatacctgatattatgattttaaggcatcttagaattatgaaagctataagcactgtgagagagctttgcgtcccattagctagttggagaggtaacagctcaccaaggcgatgatgggtagccggcctgagagggtgaacggccacaaggggactgagacacggcccttactcctacgggaggcagcagtggggaatattggacaatggaccgagagtctgatccagcaattctgtgtgcacgatgaagtttttcggaatgtaaagtgctttcagttgggaagaaaaaaatgacggtaccaacagaagaagtgacggctaaatacgtgccagcagccgcggtaatacgtatgtcacgagcgttatccggatttattgggcgtaaagcgcgtctaggtggttatgtaagtctgatgtgaaaatgcagggctcaactctgtattgcgttggaaactgtataactagagtactggagaggtaagcggaactacaagtgtagaggtgaaattcgtagatatttgtaggaatgccgatggggaagccagcttactggacagatactgacgctaaagcgcgaaagcgtgggtagcaaacaggattagataccctggtagtccacgctgtaaacgatgattactaggtgttgggggtcgaacctcagcgcccaagcaaacgcgataagtaatccgcctggggagtacgtacgcaagtatgaaactcaaaggaattgacggggacccgcacaagcggtggagcatgtggtttaattcgacgcaacgcgaggaaccttaccagcgtttgacatcttaggaatgagatagagatatttcagtgtcccttcggggaaacctaaagacaggtggtgcatggctgtcgtcagctcgtgtcgtgagatgttgggttaagtcccgcaacgagcgcaacccctttcgtatgttaccatcattaagttggggactcatgcgatactgcctacgatgagtaggaggaaggtggggatgacgtcaagtcatcatgccccttatacgctgggctacacacgtgctacaatgggtagaacagagagttgcaaagccgtgaggtgaagctaatctcagaaaactattcttagttcggattgtactctgcaactcgagtacatgaagttggaatcgctagtaatcgcgaatcagcaatgtcgcggtgaatacgttctcgggtcttgtacacaccgcccgtcacaccacgagagttggttgcacctgaagtagcaggcctaaccgtaaggagggatgctccgagggtgtgattagcgattggggtgaagtcgtaacaaggtatccgtacgggaacgtgcggatggatcacctcctttct

SEQ ID NO: 910 - DNA, 1513 bp, Fusobacterium sp.
  3_1_36A2
agagtttgatcctggctcaggatgaacgctgacagaatgcttaacacatgcaagtcaacttgaatttgggtttttaacttaggtttgggtggcggacgggtgagtaacgcgtaaagaacttgcctcacagctagggacaacatttggaaacgaatgctaatacctaatattatgataatagggcatcctataattatgaaagctataagcgctgtgagagagctttgcgtcccattagctagttggagaggtaacggctcaccaaggcgatgatgggtagccggcctgagagggtgatcggccacaaggggactgagacacggcccttactcctacgggaggcagcagtggggaatattggacaatggaccaagagtctgatccagcaattctgtgtgcacgatgaagtttttcggaatgtaaagtgctttcagttgggaagaaagaaatgacggtaccaacagaagaagtgacggctaaatacgtgccagcagccgcggtaatacgtatgtcacgagcgttatccggatttattgggcgtaaagcgcgtctaggtggttatgtaagtctgatgtgaaaatgcagggctcaactctgtattgcgttggaaactgtataactagagtactggagaggtaagcggaactacaagtgtagaggtgaaattcgtagatatttgtaggaatgccgatggggaagccagcttactggacagatactgacgctgaagcgcgaaagcgtgggtagcaaacaggattagataccctggtagtccacgccgtaaacgatgattactaggtgttgggggtcgaacctcagcgcccaagcaaacgcgataagtaatccgcctggggagtacgtacgcaagtatgaaactcaaaggaattgacggggacccgcacaagcggtggagcatgtggtttaattcgacgcaacgcgaggaaccttaccagcgtttgacatcttaggatgagatagagatatttcagtgtcccttcggggaaacctaaagacaggtggtgcatggctgtcgtcagctcgtgtcgtgagatgttgggttaagtcccgcaacgagcgcaacccctttcgtatgttaccatcattaagttggggactcatgcgatactgcctacgatgagtaggaggaaggtggggatgacgtcaagtcatcatgccccttatacgctgggctacacacgtgctacaatgggtagaacagagagtcgcaaagctgtgaagtggagctaatctcagaaaactattcttagttcggattgtactctgcaactcgagtacatgaagttggaatcgctagtaatcgcgaatcagcaatgtcgcggtgaatacgttctcgggtcttgtacacaccgcccgtcacaccacgagagttggttgcacctgaagtagcaggcctaaccgtaaggagggatgctccgagggtgtgattagcgattggggtgaagtcgtaacaaggtatccgtacgggaacgtgcggatggatcacctcctttct

SEQ ID NO: 911 - DNA, 1369 bp, Fusobacterium sp.
  3_1_5R
ggaaacggatgctaataccggatattatgctttcttcgcatggaggaagtatgaaagctatatgcgctatgagagagctttgcgtcccattagctagttggtgaggtaacggcccaccaaggcgatgatgggtagccggcctgagagggtgaacggccacaaggggactgagacacggcccttactcctacgggaggcagcagtggggaatattggacaatggaccaaaagtctgatccagcaattctgtgtgcacgatgacgtttttcggaatgtaaagtgctttcagtcgggaagaagcaagtgacggtaccgacagaagaagcgacggctaaatacgtgccagcagccgcggtaatacgtatgtcgcaagcgttatccggatttattgggcgtaaagcgcgtctaggcggcaaggaaagtctgatgtgaaaatgcggggctcaactccgtattgcgttggaaactgccttactagagtactggagaggtaggcggaactacaagtgtagaggtgaaattcgtagatatttgtaggaatgccgatggggaagccagcctactggacagatactgacgctaaagcgcgaaagcgtgggtagcaaacaggattagataccctggtagtccacgctgtaaacgatgattactaggtgttgggggtcaaacctcagcgcccaagctaacgcgataagtaatccgcctggggagtacgtacgcaagtatgaaactcaaaggaattgacggggacccgcacaagcggtggagcatgtggtttaattcgacgcaacgcgaggaaccttaccagcgtttgacatcctacaaagagtgcagagatgcgcttgtgcttcttcggaagaatgtagtgacaggtggtgcatggctgtcgtcagctcgtgtcgtgagatgttgggttaagtcccgcaacgagcgcaacccctatcgtatgttaccagcctttagttggggactcatgcgatactgcctgcgacgagcaggaggaaggtggggatgacgtcaagtcatcatgccccttatacgctgggctacacacgtgctacaatgggtagtacagagagcggcgaacccgcgagggggagcaaatctcagaaaactattcttagttcggattgtactctgcaactcgagtacatgaagttggaatcgctagtaatcgcaaatcagcaatgttgcggtgaatacgttctcgggtcttgtacacaccgcccgtcacaccacgagagttggttgcacctgaagtagcaggcctaaccgtaaggaaggatgctccgagggtgtggttagcgattggggtgaagtcgtaacaaggtatccgtacgggaacgtgcggatggatcacctcctttct

SEQ ID NO: 912 - DNA, 1301 bp, Fusobacterium sp.
  AC18
tcaggatgaacgctgacagaatgcttaacacatgcaagtcaactggtggcggacgggtgagtaacgcgtaaagaacttgcctcacagatagggacaacatttggaaacgaatgctaatacctgatattgaaaggcgctgtgagagagctttgcgtcccattagctagttggagaggtaacggctcaccaaggcgatgatgggtagccggcctgagagggtgatcggccacaaggggactgagacacggcccttactcctacgggaggcagcagtggggaatattggacaatggaccaagtctgatccagcaattctgtgtgcacgatgaagtttttcggaatgtaaagtgctttcagttgggaagatgacggtaccaacagaagaagtgacggctaaatacgtgccagcagccgcggtaatacgtatgtcacaagcgttatccggatttattgggcgtaaagcgcgtctaggtggttatgtaagtctgatgtgaaaatgcagggctcaactctgtattgcgttggaaactgtgtaactagagtactggagaggtaagcggaactacaagtgtagaggtgaaattcgtagatatttgtaggaatgccgatggggaagccagcttactggacagactgacgctgaagcgcgaaagcgtgggtagcaaacaggattagataccctggtagtccacgccgtaaacgatgattactaggtgttggggcctcagcgcccaagcaaacgcgataagtaatccgcctggggagtacgtacgcaagtatgaaactcaaaggaattgacggggacccgcacaagcggtggagcatgtggtttaattcgacgcaacgcgaggaaccttaccagcgtttgacatcgacaggtggtgcatggctgtcgtcagctcgtgtcgtgagatgttgggttaagtcccgcaacgagcgcaacccctttcgtatgttaccatcatggggactcatgcgatactgcctgcgatgagcaggaggaaggtggggatgacgtcaagtcatcatgccccttatacgctgggctacacacgtgctacaatgggtagcagagagtcgcaaagccgtgaggtggagctaatctcagctattcttagttcggatgtactctgcaactcgagtacagaagttggaatcgctagtaatcgcgaatcagcaatgtcgcggtgaatacgttctcgggtcttgtacacaccgcccgtcacaccacgagagttggttgcacctgaagtagcagcctagggatgctccgagggtgtgattagcgatggggtgaagtc

SEQ ID NO: 913 - DNA, 1300 bp, Fusobacterium sp.
  ACB2
tggctcaggatgaacgctgacagaatgcttaacacatgcaagtcaactggtggcggacgggtgagtaacgcgtaaagaacttgcctcacagctagggacaacatttagaaatgaatgctaatacctgatattgaaaggcactgtgagagagctttgcgtcccattagctagttggagaggtaacagctcaccaaggcgatgatgggtagccggcctgagagggtgaacggccacaaggggactgagacacggcccttactcctacgggaggcagcagtggggaatattggacaatggacgagagtctgatccagcaattctgtgtgcacgatgaagtttttcggaatgtaaagtgctttcagttgggaagatgacggtaccaacagaagaagtgacggctaaatacgtgccagcagccgcggtaatacgtatgtcacgagcgttatccggatttattgggcgtaaagcgcgtctaggtggttatgtaagtctgatgtgaaaatgcagggctcaactctgtattgcgttggaaactgtataactagagtactggagaggtaagcggaactacaagtgtagaggtgaaattcgtagatatttgtaggaatgccgatggggaagccagcttactggacagactgacgctaaagcgcgaaagcgtgggtagcaaacaggattagataccctggtagtccacgctgtaaacgatgattactaggtgttggggcctcagcgcccaagcaaacgcgataagtaatccgcctggggagtacgtacgcaagtatgaaactcaaaggaattgacggggacccgcacaagcggtggagcatgtggtttaattcgacgcaacgcgaggaaccttaccagcgtttgacatcgacaggtggtgcatggctgtcgtcagctcgtgtcgtgagatgttgggttaagtcccgcaacgagcgcaacccctttcgtatgttaccatcatggggactcatgcgatactgcctacgatgagtaggaggaaggtggggatgacgtcaagtcatcatgccccttatacgctgggctacacacgtgctacaatgggtagcagagagttgcaaagccgtgaggtgaagctaatctcagctattcttagttcggatgtactctgcaactcgagtacagaagttggaatcgctagtaatcgcgaatcagcaatgtcgcggtgaatacgttctcgggtcttgtacacaccgcccgtcacaccacgagagttggttgcacctgaagtagcagcctagggatgctccgagggtgtgattagcgattgggg

SEQ ID NO: 914 - DNA, 1364 bp, Fusobacterium sp.
  AS2
ggctcaggatgaacgctgacagaatgcttaacacatgcaagtcaacttgaacttcggtttgggtggcggacgggtgagtaacgcgtaaagaacttgcctcacagatagggacaacatttggaaacgaatgctaatacctgatattatgattttagggcatcctaggattatgaaagctatatgcgctgtgagagagctttgcgtcccattagctagttggagaggtaacggctcaccaaggcgatgatgggtagccggcctgagagggtgatcggccacaaggggactgagacacggcccttactcctacgggaggcagcagtggggaatattggacaatggaccaagagtctgatccagcaattctgtgtgcacgatgaagtttttcggaatgtaaagtgctttcagttgggaagaaaaaaatgacggtaccaacagaagaagtgacggctaaatacgtgccagcagccgcggtaatacgtatgtcacaagcgttatccggatttattgggcgtaaagcgcgtctaggtggttatataagtctgatgtgaaaatgcagggctcaactctgtattgcgttggaaactgtgtaactagagtactggagaggtaagcggaactacaagtgtagaggtgaaattcgtagatatttgtaggaatgccgatggggaagccagcttactggacagatactgacgctgaagcgcgaaagcgtgggtagcaaacaggattagataccctggtagtccacgccgtaaacgatgattactaggtgttgggggtcgaacctcagcgcccaagcaaacgcgataagtaatccgcctggggagtacgtacgcaagtatgaaactcaaaggaattgacggggacccgcacaagcggtggagcatgtggtttaattcgacgcaacgcgaggaaccttaccagcgtttgacatcttaggaatgagacagagatgtttcagtgtcccttcggggaaacctaaagacaggtggtgcatggctgtcgtcagctcgtgtcgtgagatgttgggttaagtcccgcaacgagcgcaacccctttcgtatgttaccatcattaagttggggactcatgcgatactgcctgcgatgagcaggaggaaggtggggatgacgtcaagtcatcatgccccttatacgctgggctacacacgtgctacaatgggtagtacagagagtcgcaaagccgtgaggtggagctaatctcagaaaactattcttagttcggattgtactctgcaactcgagtacatgaagttggaatcgctagtaatcgcgaatcagcaatgtcgcggtgaatacgttctcgggtcttgtacacaccgcccgtcacaccacgagagt

SEQ ID NO: 915 - DNA, 1387 bp, Fusobacterium sp.
  CM1
gaacgctgacagaatgcttaacacatgcaagtcaacttgaatttgggtttttaacttagatttgggtggcggacgggtgagtaacgcgtaaagaacttgcctcacagctagggacaacatttagaaatgaatgctaatacctgatattatgattttaaggcatcttagaattatgaaagctatatgcactgtgagagagctttgcgtcccattagctagttggagaggtaacagctcaccaaggcgatgatgggtagccggcctgagagggtgaacggccacaaggggactgagacacggcccttactcctacgggaggcagcagtggggaatattggacaatggaccgagagtctgatccagcaattctgtgtgcacgatgaagtttttcggaatgtaaagtgctttcagttgggaagaaagaaatgacggtaccaacagaagaagtgacggctaaatacgtgccagcagccgcggtaatacgtatgtcacgagcgttatccggatttattgggcgtaaagcgcgtctaggtggttatgtaagtctgatgtgaaaatgcagggctcaactctgtattgcgttggaaactgtgtaactagagtactggagaggtaagcggaactacaagtgtagaggtgaaattcgtagatatttgtaggaatgccgatggggaagccagcttactggacagatactgacgctaaagcgcgaaagcgtgggtagcaaacaggattagataccctggtagtccacgctgtaaacgatgattactaggtgttgggggtcgaacctcagcgcccaagcaaacgcgataagtaatccgcctggggagtacgtacgcaagtatgaaactcaaaggaattgacggggacccgcacaagcggtggagcatgtggtttaattcgacgcaacgcgaggaaccttaccagcgtttgacatcttaggaatgagatagagatatttcagtgtcccttcggggaaacctaaagacaggtggtgcatggctgtcgtcagctcgtgtcgtgagatgttgggttaagtcccgcaacgagcgcaacccctttcgtatgttaccatcattaagttggggactcatgcgatactgcctacgatgagtaggaggaaggtggggatgacgtcaagtcatcatgccccttatacgctgggctacacacgtgctacaatgggtagaacagagagttgcaaagccgtgaggtgaagctaatctcagaaaactattcttagttcggattgtactctgcaactcgagtacatgaagttggaatcgctagtaatcgcgaatcagcaatgtcgcggtgaatacgttctcgggtcttgtacacaccgcccgtcacaccacgagagttggttgcacctgaagtagca

SEQ ID NO: 916 - DNA, 1385 bp, Fusobacterium sp.
  CM21
cgctgacagaatgcttaacacatgcaagtcaacttgaatttgggtttttaacttaggtttgggtggcggacgggtgagtaacgcgtaaagaacttgcctcacaggtagggacaacatttggaaacgaatgctaatacctaatattatgataatagggcatcctataattatgaaagctataagcgctgtgagagagctttgcgtcccattagctagttggagaggtaacggctcaccaaggcgatgatgggtagccggcctgagagggtgatcggccacaaggggactgagacacggcccttactcctacgggaggcagcagtggggaatattggacaatggaccgagagtctgatccagcaattctgtgtgcacgatgaagtttttcggaatgtaaagtgctttcagttgggaagaaacaaatgacggtaccaacagaagaagtgacggctaaatacgtgccagcagccgcggtaatacgtatgtcacgagcgttatccggatttattgggcgtaaagcgcgtctaggtggttatgtaagtctgatgtgaaaatgcagggctcaactctgtattgcgttggaaactgtataactagagtactggagaggtaagcggaactacaagtgtagaggtgaaattcgtagatatttgtaggaatgccgatggggaagccagcttactggacagatactgacgctgaagcgcgaaagcgtgggtagcaaacaggattagataccctggtagtccacgccgtaaacgatgattactaggtgttgggggtcgaacctcagcgcccaagcaaacgcgataagtaatccgcctggggagtacgtacgcaagtatgaaactcaaaggaattgacggggacccgcacaagcggtggagcatgtggtttaattcgacgcaacgcgaggaaccttaccagcgtttgacatcttaggaatgagacagagatgtttcagtgtcccttcggggaaacctaaagacaggtggtgcatggctgtcgtcagctcgtgtcgtgagatgttgggttaagtcccgcaacgagcgcaacccctttcgtatgttaccatcattaagttggggactcatgcgatactgcctacgatgagtaggaggaagggtgggggatgacgtcaagtcatcatgccccttatacgctgggctacacacgtgctacaatgggtagaacagagagtcgcaaagctgtgaagtggagctaatctcagaaaactattcttagttcggattgtactctgcaactcgagtacatgaagttggaatcgctagtaatcgcgaatcagcaatgtcgcggtgaatacgttctcgggtcttgtacacaccgcccgtcacaccacgagagttggttgcacctgaagtagc

SEQ ID NO: 917 - DNA, 1210 bp, Fusobacterium sp.
  CM22
  modified_base (975)..(975): a, c, t, g, unknown or other
  modified_base (1090)..(1090): a, c, t, g, unknown or other
gtggcggacgggtgagtaacgcgtaaagaacttgcctcacagatagggacaacatttggaaacgaatgctaatacctgatattgaaaggcactgtgagagagctttgcgtcccattagctagttggagaggtaacggctcaccaaggcgatgatgggtagccggcctgagagggtgatcggccacaaggggactgagacacggcccttactcctacgggaggcagcagtggggaatattggacaatggaccaagtctgatccagcaattctgtgtgcacgatgaagtttttcggaatgtaaagtgctttcagttgggaagatgacggtaccaacagaagaagtgacggctaaatacgtgccagcagccgcggtaatacgtatgtcacaagcgttatccggatttattgggcgtaaagcgcgtctaggtggttatgtaagtctgatgtgaaaatgcagggctcaactctgtattgcgttggaaactgtgtaactagagtactggagaggtaagcggaactacaagtgtagaggtgaaattcgtagatatttgtaggaatgccgatggggaagccagcttactggacagactgacgctgaagcgcgaaagcgtgggtagcaaacaggattagataccctggtagtccacgccgtaaacgatgattactaggtgttggggcctcagcgcccaagcaaacgcgataagtaatccgcctggggagtacgtacgcaagtatgaaactcaaaggaattgacggggacccgcacaagcggtggagcatgtggtttaattcgacgcaacgcgaggaaccttaccagcgtttgacatcgacaggtggtgcatggctgtcgtcagctcgtgtcgtgagatgttgggttaagtcccgcaacgagcgcaacccctttcgtatgttaccatcatggggactcatgcgatactgcctgcgatgagcaggaggaaggtggggatgacgtcnagtcatcatgccccttatacgctgggctacacacgtgctacaatgggtagcagagagtcgcaaagccgtgaggtgaagctaatctcagctattcttagttcggatgtactctgcnactcgagtacagaagttggaatcgctagtaatcgcgaatcagcaatgtcgcggtgaatacgttctcgggtcttgtacacaccgcccgtcacaccacgagagttggttgcacctgaagtag

SEQ ID NO: 918 - DNA, 1496 bp, Fusobacterium sp.
  D12
agagtttgatcctggctcaggatgaacgctgacagaatgcttaacacatgcaagtcgactcgagtcttcggacttgggtggcgcacgggtgagtaacgcgtaaagaacttgcctcttagaccgggacaacatctggaaacggatgctaataccggatattatggttttttcgcatggaggaatcatgaaagctagatgcgctaagagagagctttgcgtcccattagctagttggtgaggtaacggcccaccaaggcaatgatgggtagccggcctgagagggtgaacggccacaaggggactgagacacggcccttactcctacgggaggcagcagtggggaatattggacaatggaccgcaagtctgatccagcaattctgtgtgcacgatgacgtttttcggaatgtaaagtgctttcagtcgggaagaagtcagtgacggtaccgacagaagaagcgacggctaaatacgtgccagcagccgcggtaatacgtatgtcgcaagcgttatccggatttattgggcgtaaagcgcgtctaggcggcaaggaaagtctgatgtgaaaatgcggagctcaactccgtatggcgttggaaactgccttactagagtactggagaggtaggcggaactacaagtgtagaggtgaaattcgtagatatttgtaggaatgccgatggggaagccagcctactggacagatactgacgctaaagcgcgaaagcgtgggtagcaaacaggattagataccctggtagtccacgctgtaaacgatgattactaggtgttgggggtcaaacctcagcgcccaagctaacgcgataagtaatccgcctggggagtacgtacgcaagtatgaaactcaaaggaattgacggggacccgcacaagcggtggagcatgtggtttaattcgacgcaacgcgaggaaccttaccagcgtttgacatcctacgaacggagcagagatgcgccggtgccctttcgggggaacgtagtgacaggtggtgcatggctgtcgtcagctcgtgtcgtgagatgttgggttaagtcccgcaacgagcgcaacccctatcgtatgttaccatccttcagttggggactcatgcgatactgcctgcgacgagcaggaggaaggtggggatgacgtcaagtcatcatgccccttatacgctgggctacacacgtgctacaatgggtagtacagagagcagcaaacccgcgagggggagcaaatctcagaaaactattcttagttcggattgtactctgcaactcgagtacatgaagttggaatcgctagtaatcgcaaatcagcaatgttgcggtgaatacgttctcgggtcttgtacacaccgcccgtcacaccacgagagttggttgcacctgaagtagcaggcctaaccttagggaaggatgctccgagggtgtggttagcgattggggtgaagtcgtaacaaggtatccgtacgggaacgtgcggatggatcacct

SEQ ID NO: 919 - DNA, 1362 bp, Fusobacterium sp.
  oral clone ASCF06
  modified_base (16)..(16): a, c, t, g, unknown or other
gagtttgattttggcncaggattaacgctgacgaatgcttaacacatgcaagtctactggtggcggacgggtgagtaacgcgtaaagaacttgcctcacagttagggacaacatttggaaacgaatgctaatacctgatattgaaaggcgctgtgagagagctttgcgtcccattagctagttggagaggtaacggctcaccaaggcgatgatgggtagccggcctgagagggtgaacggccacaaggggactgagacacggcccttactcctacgggaggcagcagtggggaatattggacactggacaaagtctgatccagcaattcgtgtgcacgatgacgtttttcggaatgtaaagtgctttcagttgggaagatgacggtaccaacagaagaagtgacggctaaatacgtgccagcagccgcggtaatacgtatgtcacaagcgttatccggatttattgggcgtaaagcgcgtctaggtggttatgtaagtctgatgtgaaaatgcagggctcaactctgtattgcgttggaaactgcatgactagagtactggagaggtaagcggaactacaagtgtagaggtgaaattcgtagatatttgtaggaatgccgatggggaagccagcttactggacagactgacgctaaagcgcgaaagcgtgggtagcaaacaggattagataccctggtagtccacgccgtacacgatgattactaggtgttggggactcagcgcccaagctaacgcgataagtaatccgcctggggagtacgtacgcaagtatgaaactcaaaggaattgacggggacccgcacaagcggtggagcatgtggtttaattcgacgcaacgcgaggaaccttaccagcgtttgacatcgacaggtggtgcatggctgtcgtcagctcgtgtcgtgagatgttgggttaagtcccgcaacgagcgcaaccccttttgtatgttaccatcagttggggactcatgcgatactgcctgcgatgagcaggaggaaggtggggatgacgtcaagtcatcatgccccttatacgctgggctacacacgtgctacaatgggtagcagagagtcgcaaagccgcgaggtggagctaatctcagctattcttagttcggatgtactctgcaactcgagtacagaagttggaatcgctagtaatcgcgaatcagcaatgtcgcggtgaatacgttctcgggtcttgtacacaccgcccgtcacaccacgagagttggttgcacctgaagtagcagcctagggatgctccgagggtgtgattagcgattggggtgaagtcgtaacaaggtatccgtacgggaacgtgcggctggaacacctcctt

SEQ ID NO: 920 - DNA, 1558 bp, Fusobacterium sp.
  oral clone ASCF11
  modified_base (623)..(623): a, c, t, g, unknown or other
  modified_base (852)..(852): a, c, t, g, unknown or other
  modified_base (884)..(884): a, c, t, g, unknown or other
  modified_base (947)..(947): a, c, t, g, unknown or other
gagagtttgattctggctcaggacgaacgctggcggcgtgcctaatacatgcaagtcgaacgagagcgaccggtgcttgcactgatcaatctagtggcgaacgggtgagtaacacgtgggtaacctgcccatcagagggggataacattcggaaacggatgctaaaaccgcataggttctttagtcgcatgactgaagaaggaaaagaggcttcggcttctgctgatggatggacccgcggtgcattagctagttggtgaggtaacggctcaccaaggcgatgatgcatagccgacctgagagggtgatcggccacattgggactgagacacggcccaaactcctacgggaggcagcagtagggaatcttccgcaatggacgcaagtctgacggagcaacgccgcgtgagtgaagaaggatttcggttcgtaaaactctgttgttagagaagaacagcgcatagagtaactgttatgcgtgtgacggtatctaaccagaaagccacggctaaatacgtgccagcagcccgcggtaataccgtatgtcacaagcgttatccggatttattgggcgtaaagcgcgtctaggtggttatgtaacgtctgatgtgaaaatgcagggnctcaactctgtattgcgttggaaactgcatgactagagtactggagaggtaagcggaactacaagtgtcagaggtgaaattcgtagatatttgtaggaatgccgatggggaaagcccagcttactggacagatactgacgctaaagcgcgaaagcgtgggtagcaaacaggattagataccctgggtagtccaccccgtaaacgatgattactaggtgttgggggtcgnacctcagcgcccaagctaacgcgataagtaanaccgcctggggagtacgtacgcaagtatgaaactcaaaggaattgaccggggacccgcacaangcggtggagcatgtggtttaattcgacgcaacgcgaggaaccttaccagcgtttgacatcttaggaatgagacagagatgtttcagtgtcacttcggtgaaacgctaaagaccaggtggtgcatggctggtcgtcagctcgtgtcgtgagatgttgggttaagtcccgcaacgagcgcaacccctttcgtatgttaccatcattaagttggggactcatgcgatactgcctacgatgagtaggaggaaggtggggatgacgtcaagtcatcatgccccttatacgctgggctacacacgtgctacaatgggtagtacagagagtcgcaaagccgtgaggtggagctaatctcagaaaactattcttagttcggattgtactctgcaactcgagtacatgaagttggaatcgctagtaatcgcgaatcagcaatgtcgcggtgaatacgttctcgggtcttgtacacaccgcccgtcacaccacgagagttggttgcacctgaagtagcaggcctaaccgtaaggagggatgctccgagggtgtgattagcgattggggtgaagtcgtaacaaggtatccgtacgggaacgtgcggctggatcacctccttc

SEQ ID NO: 921 - DNA, 1511 bp, Fusobacterium ulcerans
ttgaacgaagagtttgatcctggctcaggatgaacgctgacagaatgcttaacacatgcaagtctacttgatccttcgggtgaaggtggcggacgggtgagtaacgcgtaaagaacttgccttacagactgggacaacatttggaaacgaatgctaataccggatattatgattgggtcgcatgatctggttatgaaagctatatgcgctgtgagagagctttgcgtcccattagttagttggtgaggtaacggctcaccaagacgatgatgggtagccggcctgagagggtgaacggccacaaggggactgagacacggcccttactcctacgggaggcagcagtggggaatattggacaatggaccaaaagtctgatccagcaattctgtgtgcacgatgaagtttttcggaatgtaaagtgctttcagttgggaagaagtcagtgacggtaccaacagaagaagcgacggctaaatacgtgccagcagccgcggtaatacgtatgtcgcaagcgttatccggatttattgggcgtaaagcgcgtctaggcggcttagtaagtctgatgtgaaaatgcggggctcaaccccgtattgcgttggaaactgctaaactagagtactggagaggtaggcggaactacaagtgtagaggtgaaattcgtagatatttgtaggaatgccgatggggaagccagcctactggacagatactgacgctaaagcgcgaaagcgtgggtagcaaacaggattagataccctggtagtccacgccgtaaacgatgattactaggtgttgggggtcgaacctcagcgcccaagctaacgcgataagtaatccgcctggggagtacgtacgcaagtatgaaactcaaaggaattgacggggacccgcacaagcggtggagcatgtggtttaattcgacgcaacgcgaggaaccttaccagcgtttgacatcccaagaagttaacagagatgttttcgtgcctcttcggaggaacttggtgacaggtggtgcatggctgtcgtcagctcgtgtcgtgagatgttgggttaagtcccgcaacgagcgcaacccctttcgtatgttaccatcattaagttggggactcatgcgagactgcctgcgatgagcaggaggaaggtggggatgacgtcaagtcatcatgccccttatacgctgggctacacacgtgctacaatgggtagtacagagagctgcaaacctgcgagggtaagctaatctcataaaactattcttagttcggattgtactctgcaactcgagtacatgaagttggaatcgctagtaatcgcaaatcagctatgttgcggtgaatacgttctcgggtcttgtacacaccgcccgtcacaccacgagagttggttgcacctgaagtaacaggcctaaccgtaaggagggatgttccgagggtgtgattagcgattggggtgaagtcgtaacaaggtatccgtacgggaacgtgcggatggatcacctcctttct

SEQ ID NO: 922 - DNA, 1503 bp, Fusobacterium varium
agagtttgatcctggctcaggatgaacgctgacagaatgcttaacacatgcaagtctacttgatccttcgggtgaaggtggcggacgggtgagtaacgcgtaaagaacttgccttacagactgggacaacatttggaaacgaatgctaataccggatattatgactgagtcgcatgatttggttatgaaagctatatgcgctgtgagagagctttgcgtcccattagttagttggtgaggtaacggctcaccaagacgatgatgggtagccggcctgagagggtgaacggccacaaggggactgagacacggcccttactcctacgggaggcagcagtggggaatattggacaatggaccaaaagtctgatccagcaattctgtgtgcacgatgaagtttttcggaatgtaaagtgctttcagttgggaagaagtcagtgacggtaccaacagaagaagcgacggctaaatacgtgccagcagccgcggtaatacgtatgtcgcaagcgttatccggatttattgggcgtaaagcgcgtctaggcggtttagtaagtctgatgtgaaaatgcggggctcaaccccgtattgcgttggaaactgctaaactagagtactggagaggtaggcggaactacaagtgtagaggtgaaattcgtagatatttgtaggaatgccgatggggaagccagcctactggacagatactgacgctaaagcgcgaaagcgtgggtagcaaacaggattagataccctggtagtccacgccgtaaacgatgattactaggtgttgggggtcgaacctcagcgcccaagctaacgcgataagtaatccgcctggggagtacgtacgcaagtatgaaactcaaaggaattgacggggacccgcacaagcggtggagcatgtggtttaattcgacgcaacgcgaggaaccttaccagcgtttgacatcccaagaagttaacagagatgttttcgtgcctcttcggaggaacttggtgacaggtggtgcatggctgtcgtcagctcgtgtcgtgagatgttgggttaagtcccgcaacgagcgcaacccctttcgtatgttaccatcattaagttggggactcatgcgagactgcctgcgatgagcaggaggaaggtggggatgacgtcaagtcatcatgccccttatacgctgggctacacacgtgctacaatgggtagtacagagagctgcaaacctgcgagggtaagctaatctcataaaactattcttagttcggattgtactctgcaactcgagtacatgaagttggaatcgctagtaatcgcaaatcagctatgttgcggtgaatacgttctcgggtcttgtacacaccgcccgtcacaccacgagagttggttgcacctgaagtaacaggcctaaccgtaaggagggatgttccgagggtgtgattagcgattggggtgaagtcgtaacaaggtatccgtacgggaacgtgcggatggatcacctcctttct

SEQ ID NO: 923 - DNA, 1535 bp, Gardnerella vaginalis
ttttcgtggagggttcgattctggctcaggatgaacgctggcggcgtgcttaacacatgcaagtcgaacgggatctgaccagcttgctggttggtgagagtggcgaacgggtgagtaatgcgtgaccaacctgccccatgctccagaatagctcttggaaacgggtggtaatgctggatgctccaacttgacgcatgtcttgttgggaaagtgtttagtggcatgggatggggtcgcgtcctatcagcttgtaggcggggtaatggcccacctaggcttcgacgggtagccggcctgagagggcggacggccacattgggactgagatacggcccagactcctacgggaggcagcagtggggaatattgcgcaatgggggaaaccctgacgcagcgacgccgcgtgcgggatgaaggccttcgggttgtaaaccgcttttgattgggagcaagctttcgggtgagtgtacctttcgaataagcgccggctaactacgtgccagcagccgcggtaatacgtagggcgcaagcgttatccggaattattgggcgtaaagagcttgtaggcggttcgtcgcgtctggtgtgaaagcccatcgcttaacggtgggtctgcgccgggtacgggcgggctagagtgcagtaggggagactggaattcccggtgtaacggtggaatgtgtagatatcgggaagaacaccaatggcgaaggcaggtctctgggctgttactgacgctgagaagcgaaagcgtggggagcgaacaggattagataccctggtagtccacgccgtaaacggtggacgctggatgtggggcccattccacgggttccgtgtcggagctaacgcgttaagcgtcccgcctggggagtacggccgcaaggctaaaactcaaagaaattgacgggggcccgcacaagcggcggagcatgcggattaattcgatgcaacgcgaagaaccttacctgggcttgacatgtgcctgtcgactgcagagatgtggtttcccttcggggcaggttcacaggtggtgcatggtcgtcgtcagctcgtgtcgtgagatgttgggttaagtcccgcaacgagcgcaaccctcgccctgtgttgccagcgggttatgccgggaactcacgggggaccgccggggttaactcggaggaaggtggggatgacgtcagatcatcatgccccttacgtccagggcttcacgcatgctacaatggccggtacaacgggatgcgacatggtgacatggagcggatcccttaaaaccggtctcagttcggatcgtagtctgcaactcgactacgtgaaggcggagtcgctagtaatcgcgaatcagcaacgtcgcggtgaatgcgttcccgggccttgtacacaccgcccgtcaagtcatgaaagtgggcagcacccgaagccggtggcctaacccttttgggatggagccgtctaaggtgaggctcgtgattgggactaagtcgtaacaaggtagccgtaccggaaggtgcggctggatcacctcctttctacgg

SEQ ID NO: 924 - DNA, 1557 bp, Gemella haemolysans
ttggagagtttgatcctggctcaggacgaacgctggcggcgtgcctaatacatgcaagtcgagcgaggtttttctggtgcttgcaccggaaaaacttagcggcgaacgggtgagtaacacgtaaagaacctgcctcatagactgggacaactattggaaacgatagctaataccggataacagcattaactgcatggttgatgtttaaaagttggttttgctaacactatgagatggctttgcggtgcattagctagttggtggggtaaaggcctaccaaggcgacgatgcatagccgacctgagagggtagatcggccacactgggactgagacacggcccagactcctacgggaggcagcagtagggaatcttccgcaatgggcgaaagcctgacggagcaacgccgcgtgagtgaagaaggatttcggttcgtaaagctctgttgttagggaagaatgattgtgtagtaactatacacagtagagacggtacctaaccagaaagccacggctaactacgtgccagcagccgcggtaatacgtaggtggcaagcgttgtccggaattattgggcgtaaagcgcgcgcaggtggtttaataagtctgatgtgaaagcccacggctcaaccgtggagggtcattggaaactgttaaacttgagtgcaggagagaaaagtggaattcctagtgtagcggtgaaatgcgtagagattaggaggaacaccagtggcgaaggcggctttttggcctgtaactgacactgaggcgcgaaagcgtggggagcaaacaggattagataccctggtagtccacgccgtaaacgatgagtgctaagtgttggtctcataagagatcagtgctgcagctaacgcattaagcactccgcctggggagtacgaccgcaaggttgaaactcaaaggaattgacggggacccgcacaagcggtggagcatgtggtttaattcgaagcaacgcgaagaaccttaccaagtcttgacatactgtgaggacacaagagattgtgttgttctgacctttggttagacacagatacaggtggtgcatggttgtcgtcagctcgtgtcgtgagatgttgggttaagtcccgcaacgagcgcaacccttatatctagttgccagcagtaagatggggactctagatagactgccagtgataaactggaggaaggtggggatgacgtcaaatcatcatgccccttatgacttgggctacacacgtgctacaatggataggaacaaagagaagcgagctcgcgagagtaagcaaacctcacaaaactattctcagttcggattgtagtctgcaactcgactacatgaagctggaatcgctagtaatcgcgaatcagaatgtcgcggtgaatacgttcccgggtcttgtacacaccgcccgtcacaccacgagagtttgtaacacccgaagacggtggcctaaccttttaggagggagccggtcacggtgggacagatgattggggtgaagtcgtaacaaggtagccgtatcggaaggtgcggctggatcacctcctttct

SEQ ID NO: 925 - DNA, 1560 bp, Gemella morbillorum
tttatttggagagtttgatcctggctcaggacgaacgctggcggcgtgcctaatacatgcaagtcgagcgaagtttttctggtgcttgcactagaaaaacttagcggcgaacgggtgagtaacacgtaaagaacctgcctcatagactgggacaactattggaaacgatagctaataccggataacagtatttctcgcatgagagatatttaaaagttggttatgctaacactatgagatggctttgcggtgcattagctagttggtgggtaaaggcctaccaaggcgacgatgcatagccgacctgagagggtgatcggccacactgggactgagacacggcccagactcctacgggaggcagcagtagggaatcttccgcaatgggcgaaagcctgacggagcaacgccgcgtgagtgaagaaggatttcggttcgtaaagctctgttgttagggaagaatggatatgtagtaactatacatgtaagagacggtacctaaccagaaagccacggctaactacgtgccagcagccgcggtaatacgtaggtggcaagcgttgtccggaattattgggcgtaaagcgcgcgcaggtggtttaataagtctgatgtgaaagcccacggctcaaccgtggagggtcattggaaactgttaaacttgagtgcaggagagaaaagtggaattcctagtgtagcggtgaaatgcgtagagattaggaggaacaccagtggcgaaggcggctttttggcctgtaactgacactgaggcgcgaaagcgtggggagcaaacaggattagataccctggtagtccacgccgtaaacgatgagtgctaagtgttggtctcataagagatcagtgctgcagctaacgcattaagcactccgcctggggagtacgaccgcaaggttgaaactcaaaggaattgacggggacccgcacaagcggtggagcatgtggtttaattcgaagcaacgcgaagaaccttaccaagtcttgacatactgtgaggacacaagagattgtgttgttctgacctatggttagacacagatacaggtggtgcatggttgtcgtcagctcgtgtcgtgagatgttgggttaagtcccgcaacgagcgcaacccttatatctagttgccagcagtaagatggggactctagatagactgccagtgataaactggaggaaggtggggatgacgtcaaatcatcatgccccttatgacttgggctacacacgtgctacaatggataggaacaaagagaagcgagctcgcgagagtcagccaacctcataaaactattctcagttcggattgtagtctgcaactcgactacatgaagctggaatcgctagtaatcgcgaatcagaatgtcgcggtgaatacgttcccgggtcttgtacacaccgcccgtcacaccacgagagtttgtaacacccgaagacggtggcctaacctttaaggagggagccggtcacggtgggacagatgattggggtgaagtcgtaacaaggtagccgtatcggaaggtgcggctggatcacctcctttct

SEQ ID NO: 926 - DNA, 1560 bp, Gemella morbillorum; identical to SEQ ID NO: 925

SEQ ID NO: 927 - DNA, 1557 bp, Gemella sanguinis
ttggagagtttgatcctggctcaggacgaacgctggcggcgtgcctaatacatgcaagtcgagcgaagtttttctggtgcttgcactagaaaaacttagcggcgaacgggtgagtaacacgtaaagaacctgcctcatagacggggacaactattggaaacgatagctaataccggataacagcataaatcgcatgatatatgtttaaaagttggtttcggctaacactatgagatggctttgcggtgcattagctagttggtggggtaaaggcctaccaaggcgacgatgcatagccgacctgagagggtgatcggccacactgggactgagacacggcccagactcctacgggaggcagcagtagggaatcttccgcaatgggcgaaagcctgacggagcaacgccgcgtgagtgaagaaggatttcggttcgtaaagctctgttgttagggaagaatgattgtgtagtaactatacacagtagagacggtacctaaccagaaagccacggctaactacgtgccagcagccgcggtaatacgtaggtggcaagcgttgtccggaattattgggcgtaaagcgcgcgcaggtggtttaataagtctgatgtgaaagcccacggctcaaccgtggagggtcattggaaactgttaaacttgagtgcaggagagaaaagtggaattcctagtgtagcggtgaaatgcgtagagattaggaggaacaccagtggcgaaggcggctttttggcctgtaactgacactgaggcgcgaaagcgtggggagcaaacaggattagataccctggtagtccacgccgtaaacgatgagtgctaagtgttggtctcataagagatcagtgctgcagctaacgcattaagcactccgcctggggagtacgaccgcaaggttgaaactcaaaggaattgacggggacccgcacaagcggtggagcatgtggtttaattcgaagcaacgcgaagaaccttaccaagtcttgacatactgtgaggacacaagagattgtgttgttctgacctttggttagacacagatacaggtggtgcatggttgtcgtcagctcgtgtcgtgagatgttgggttaagtcccgcaacgagcgcaacccctatgtctagttgccagcagtaagatggggactctagacagactgccagtgataaactggaggaaggcggggatgacgtcaaatcatcatgccccttatgacttgggctacacacgtgctacaatggataggaacaaagagaagctaactcgcgagagcaagcaaacctcataaaactattctcagttcggattgtagtctgcaactcgactacatgaagctggaatcgctagtaatcgcgaatcagaatgtcgcggtgaatacgttcccgggtcttgtacacaccgcccgtcacaccacgagagtttgtaacacccgaagacggtggcctaacctttaaggagggagccggtcacggtgggacagatgattggggtgaagtcgtaacaaggtagccgtatcggaaggtgcggctggatcacctcctttct

SEQ ID NO: 928 - DNA, 1403 bp, Gemella sp.
  WAL 1945J
cgaactttaagagtgcttgcacacttaaagttagcggcgaacgggtgagtaacacgtaaagaacctaccttatagacagggacaactattggaaacgatagctaatacctgataagaaagaaactcgcatgagagaagttcgaaagtcggagcaatctgacactataagatggctttgcggtgcattagctagttggtagggtaaaagcctaccaaggcgacgatgcatagccgacctgagagggtgatcggccacattgggactgagacacggcccagactcctacgggaggcagcagtagggaatcttccgcaatggacgcaagtctgacggagcaacgccgcgtgagtgaagaaggatttcggttcgtaaaactctgttgttagggaagaaaaaatgtataataactatatacaaaagagacggtacctaaccagaaagccacggctaactacgtgccagcagccgcggtaatacgtaggtggcaagcgttgtccggaattattgggcgtaaagcgcgcgcaggtggtttagaaagtctgatgtgaaagcccacggctcaaccgtggagggtcattggaaactaataaacttgagtgcaggagagaaaagtggaattcctagtgtagcggtgaaatgcgtagagattaggaggaacaccggtggcgaaagcggctttttggcctgcaactgacactgaggcgcgaaagcgtggggagcaaacaggattagataccctggtagtccacgccgtaaacgatgagtgctaagtgttggagtcaaaagacttcagtgctgccagcaaacgcattaagcactccgcctggggagtacgatcgcaagattgaaactcaaaggaattgacggggacccgcacaagcggtggagtatgtggtttaattcgaagcaacgcgaagaaccttaccaagtcttgacatacagtgaagatataagaaattatattgttttaatgtttacattaaacactgatacaggtggtgcatggttgtcgtcagctcgtgtcgtgagatgttgggttaagtcccgcaacgagcgcaacccttatatctagttaccagcagtaagatggggactctagatagactgccagtgacaaactggaggaaggtggggatgacgtcaaatcatcatgccccttatgacttgggctacacacgtactacaatggataggaacaaagagaagcgacctcgcaagagcaagccaacctcagaaaactattctcagttcggattgtaggctgcaactcgcctacatgaagctggaatcgctagtaatcgcgaatcagaatgtcgcggtgaatacgttcccgggtcttgtacacaccgcccgtcacaccacgagagtttgtaacacctgaagacggtggcctaaccgtaag

SEQ ID NO: 929 - DNA, 1364 bp, Gemella sp.
  oral clone ASCE02
  modified_base (221)..(221): a, c, t, g, unknown or other
  modified_base (729)..(729): a, c, t, g, unknown or other
gagtttgatcttggctcaggacgaacgctggcggcgtgcctaatacatgcaagtcgagcgagcggcgaacaggtgagtaacacgtaaagaaagtgcctcatagactgggacaactattggaaacgatagctaataccggataacaaaagacactatgagatggctttgcggtgcattagctagttggtggggtaaaggcttaccaaggcgacgatgcatanccgacctgagagggtgatcggccacactgggactgagacacggcccagactcctacgggaggcagcagtagggaatcttccgcaatgggcgaaagcctgacggagcaacgccgcgtgagtgaagaaggatttcggttcgtaaagctctgttgttagggaagaagacggtacctaaccagaaagtcacggctaactacgtgccagcagccgcggtaatacgtaggtggcaagcgttgtccggaattattgggcgtaaagcgcgcgcaggtggtttaataagtctgatgtgaaagcccacggctcaaccgtggagggtcattggaaactgttaaacttgagtgcaggagagaaaagtggaattcctagtgtagcggtgaaatgcgtagagattaggaggaacaccagtggcgaaggcggctttttggcctgactgacactgaggcgcgaaagcgtggggagcaaacaggattagataccctggtagtccacgccgtaaacgatgagtgcntagtgttggtcgatcagtgctgcagctaacgcattaagcactccgcctggggagtacgaccgcaaggttgaaactcaaaggaattgacggggacccgcacaagcggtggagcatgtggtttaattcgaagcaacgcgaagaaccttaccaagtcttgacatatacaggtggtgcatggttgtcgtcagctcgtgtcgtgagatgttgggttaagtcccgcaacgagcgcaacccttatatctagttgccagcatggggactctagatagactgccagtgataaactggaggaaggtggggatgacgtcaaatcatcatgccccttatgacttgggctacacacgtgctacaatggatagcaaagagaagcgagctcgcgagagtaagcaaacctcacctattctcagttcggatgtagtctgcaactcgactacagaagctggaatcgctagtaatcgcgaatcagaatgtcgcggtgaatacgttcccgggtcttgtacacaccgcccgtcacaccacgagagtttgtaacacccgaagacggtgcctagggagccggtcacggtgggacagatgattggggtgaagtcgtaacaaggtagccgtatcggaaggtgcggctggaacacctcctt

SEQ ID NO: 930 - DNA, 1362 bp, Gemella sp.
  oral clone ASCF04
  modified_base (823)..(823): a, c, t, g, unknown or other
  modified_base (837)..(837): a, c, t, g, unknown or other
  modified_base (845)..(845): a, c, t, g, unknown or other
  modified_base (849)..(849): a, c, t, g, unknown or other
  modified_base (1001)..(1001): a, c, t, g, unknown or other
  modified_base (1059)..(1059): a, c, t, g, unknown or other
gagtttgattatggctcaggacgaacgctggcggcgtgcctaatacatgcaagtcgagcgagcggcgaacgggtgagtaacacgtaaagaacctgcctcatagactgggacaactattggaaacgatagctaataccggataacaaaagacactatgagatggctttgcggtgcattagctagttggtggggtaaaggcctaccaaggcgacgatgcatagccgacctgagagggtgatcggccacactgggactgagacacggcccagactcctacgggaggcagcagtagggaatcttccgcaatgggcgaaagcctgacggagcaacgccgcgtgagtgaagaaggatttcggttcgtaaagctctgttgttagggaagaagacggtacctaaccagaaagccacggctaactacgtgccagcagccgcggtaatacgtaggtggcaagcgttgtccggaattattgggcgtaaagcgcgcgcaggtggtttaataagtctgatgtgaaagcccacggctcaaccgtggagggtcattggaaactgttaaacttgagtgcaggagagaaaagtggaattcctagtgtagcggtgaaatgcgtagagattaggaggaacaccagtggcgaaggcggcttgttggcctgactgacactgaggcgcgaaagcgtggggagcaaacaggattagataccctggtagtccacgccgtaaacgatgagtgctaagtgttggtcgatcagtgctgcagctaacgcattaagcactccgcctggggagtacgaccgccaggttgaaactgaaaggaattcccgggganccgcacgcggtggngcatgtgntttnattcgaagcaacgcgaagaaccttaccaagtcttgacatatgcaggtggtgcatggttgtcgtcagctcgtgtcgtgagatgttgggttaagtcccgcaacgagcgcaacccttatatctagttgccagcatggggactctagatagactgncagtgataaactggaggaaggtggggatgacgtcaaatcatcatgccccttatgactngggctacacacgtgctacaatggatagcaaagagaagcgagctcgcgagagtaagcaaacctcacctattctcagttcggatgtagtctgcaactcgactacagaagctggaatcgctagtaatcgcgaatcagaatgtcgcggtgaatacgttcccgggtcttgtacacaccgcccgtcacaccacgagagtttgtaacacccgaagacggtgcctagggatccggtcacggtgggacagatgattggggtgaagtcgtaacaaggtagccgtatcggaaggtgcggctggaacacctcctt

SEQ ID NO: 931 - DNA, 1340 bp, Gemella sp.
  oral clone ASCF12
  modified_base (140)..(140): a, c, t, g, unknown or other
  modified_base (161)..(161): a, c, t, g, unknown or other
  modified_base (331)..(331): a, c, t, g, unknown or other
  modified_base (693)..(693): a, c, t, g, unknown or other
acgctggcggcgtgcctaatacatgcaagtcgagcgagcggcgaacgggtgagtaacacgtaaagaacctgcctcatagacggggacaactattggaaacgatagctaataccggataacaaaagacactatgagatggntttgcggtgcattagctagtnggtggggtaaaggcctaccaaggcgacgatgcatagccgacctgagagggtgatcggccacactgggactgagacacggcccagactcctacgggaggcagcagtagggaatcttccgcaatgggcgaaagcctgacggagccacgccgtgtgagtgaagaaggatttcnggtcgtaaagctctgttgttagggaagaagacggtacctaaccagaaagccacggctaactacgtgccagcagccgcggtaatacgtaggtggcaagcgttgtccggaattattgggcgtaaagcgcgcgcaggtggtttaataagtctgatgtgaaagcccacggctcaaccgtggagggtcattggaaactgttaaacttgagtgcaggagagaaaagtggaattcctagtgtagcggtgaaatgcgtagagattaggaggaacaccagtggcgaaggcggctttttggcctgactgacactgaggcgcgaaagcgtggggagcaaacaggattagataccctggtagtccacgccgtanacgatgagtgctaagtgttggtcgatcagtgctgcagctaacgcattaagcactccgcctggggagtacgaccggaaggttgaaactcaaaggaattgacggggacccgcacaagcggtggagcatgtggtttaattcgaagcaacgcgaagaaccttaccaagtcttgacatatacaggtggtgcatggttgtcgtcagctcgtgtcgtgagatgttgggttaagtcccgcaacgagcgcaacccctatgtctagttgccagcatggggactctagacagactgccagtgataaactggaggaaggcggggatgacgtcaaatcatcatgccccttatgacttgggctacacacgtgctacaatggatagcaaagagaagctaactcgcgagagcaagcaaacctcatctattctcagttcggatgtagtctgcaactcgactacagaagctggaatcgctagtaatcgcgaatcagaatgtcgcggtgaatacgttcccgggtcttgtacacaccgcccgtcacaccacgagagtttgtaacacccgaagacggtgcctagggagccggtcacggtgggacagacgattggggtgaagtcgtaacaaggtagccgtatcggaaggtgcggctggaacacctcctt

SEQ ID NO: 932 - DNA, 1367 bp, Gemmiger formicilis
  modified_base (10)..(12): a, c, t, g, unknown or other
  modified_base (1359)..(1360): a, c, t, g, unknown or other
aacggagtcnnngaggagcttgcttttcttgatttagtggcgaacgggtgagtaacgcgtgagtaacctgccctggagtgggggacaacagttggaaacgactgctaataccgcataagcccacggtgccgcatggcactgagggaaaaggatttattcgcttcaggatggactcgcgtccaattagctagttggtgaggtaacggcccaccaaggcgacgattggtagccggactgagaggttgaacggccacattgggactgagacacggcccagactcctacgggaggcagcagtgggggatattgcacaatgggggaaaccctgatgcagcgacgccgcgtggaggaagaaggttttcggattgtaaactcctgtcgttagggacgataatgacggtacctaacaagaaagcaccggctaactacgtgccagcagccgcggtaaaacgtagggtgcaagcgttgtccggaattactgggtgtaaagggagcgcaggcggaccggcaagttggaagtgaaatccatgggctcaacccgtgaattgctttcaaaactgctggccttgagtagtgcagaggtaggtggaattcccggtgtagcggtggaatgcgtagatatcgggaggaacaccagtggcgaaggcgacctactgggcaccaactgacgctgaggctcgaaagcatgggtagcaaacaggattagataccctggtagtccatgccgtaaacgatgattactaggtgttggaggattgaccccttcagtgccgcagttaacacaataagtaatccacctggggagtacgaccgcaaggttgaaactcaaaggaattgacgggggcccgcacaagcagtggagtatgtggtttaattcgaagcaacgcgaagaaccttaccaggtcttgacatccgatgcatagtgcagagatgcatgaagtccttcgggacatcgagacagatggtgcatggttgtcgtcagctcgtgtcgtgagatgttgggttaagtcccgcaacgagcgcaacccttattgccagttactacgcaagaggactctggcgagactgccgttgacaaaacggaggaaggtggggatgacgtcaaatcatcatgccctttatgacctgggctacacacgtactacaatggcgtttaacaaagagaagcaagaccgcgaggtggagcaaaactcagaaacaacgtctcagttcagattgcaggctgcaactcgcctgcatgaagtcggaattgctagtaatcgcggatcagcatgccgcggtgaatacgttcccgggccttgtacacaccgcccgtcacaccatgagagccggggggacccgaagtcggtagtctaaccnnaaggagg

SEQ ID NO: 933 - DNA, 1553 bp, Geobacillus kaustophilus
gagagtttgatcctggctcaggacgaacgctggcggcgtgcctaatacatgcaagtcgagcggaccaaatcggagcttgctctgatttggtcagcggcggacgggtgagtaacacgtgggcaacctgcccgcaagaccgggataactccgggaaaccggagctaataccggataacaccgaagaccgcatggtctttggttgaaaggcggcctttggctgtcacttgcggatgggcccgcggcgcattagctagttggtgaggtaacggctcaccaaggcgacgatgcgtagccggcctgagagggtgaccggccacactgggactgagacacggcccagactcctacgggaggcagcagtagggaatcttccgcaatgggcgaaagcctgacggagcgacgccgcgtgagcgaagaaggccttcgggtcgtaaagctctgttgtgagggacgaaggagcgccgttcgaagagggcggcgcggtgacggtacctcacgaggaagccccggctaactacgtgccagcagccgcggtaatacgtagggggcgagcgttgtccggaattattgggcgtaaagcgcgcgcaggcggttccttaagtctgatgtgaaagcccacggctcaaccgtggagggtcattggaaactgggggacttgagtgcaggagaggagagcggaattccacgtgtagcggtgaaatgcgtagagatgtggaggaacaccagtggcgaaggcggctctctggcctgcaactgacgctgaggcgcgaaagcgtggggagcaaacaggattagataccctggtagtccacgccgtaaacgatgagtgctaagtgttagaggggtcacaccctttagtgctgcagctaacgcgataagcactccgcctggggagtacggccgcaaggctgaaactcaaaggaattgacgggggcccgcacaagcggtggagcatgtggtttaattcgaagcaacgcgaagaaccttaccaggtcttgacatcccctgacaacccaagagattgggcgttcccccttcgggggacagggtgacaggtggtgcatggttgtcgtcagctcgtgtcgtgagatgttgggttaagtcccgcaacgagcgcaaccctcgcctctagttgccagcacgaaggtgggcactctagagggactgccggcgacaagtcggaggaaggtggggatgacgtcaaatcatcatgccccttatgacctgggctacacacgtgctacaatgggcggtacaaagggctgcgaacccgcgagggggagcgaatcccaaaaagccgctctcagttcggattgcaggctgcaactcgcctgcatgaagccggaatcgctagtaatcgcggatcagcatgccgcggtgaatacgttcccgggccttgtacacaccgcccgtcacaccacgagagcttgcaacacccgaagtcggtgaggtaacccttacgggagccagccgccgaaggtggggcaagtgattggggtgaagtcgtaacaaggtagccgtaccggaaggtgcggctggatcacctcctttct

SEQ ID NO: 934 - DNA, 1517 bp, Geobacillus sp.
  E263
agtttgatcctggctcaggacgaacgctggcggcgtgcctaatacatgcaagtcgagcggaccaaatcggagcttgctctgatttggtcagcggcggacgggtgagtaacacgtgggcaacctgcccgcaagaccgggataactccgggaaaccggagctaataccggataacaccgaagaccgcatggtctttggttgaaaggcggcctttggctgtcacttgcggatgggcccgcggcgcattagctagttggtgaggtaacggctcaccaaggcgacgatgcgtagccggcctgagagggtgaccggccacactgggactgagacacggcccagacccctacgggaggcagcagtagggaatcttccgcaatgggcgaaagcctgacggagcgacgccgcgtgagcgaagaaggccttcgggtcgtaaagctctgttgtgagggacgaaggagcgccgttcgaagagggcggcgcggtgacggtacctcacgaggaagccccggctaactacgtgccagcagccgcggtaatacgtagggggcgagcgttgtccggaattattgggcgtaaagcgcgcgcaggcggttccttaagtctgatgtgaaagcccacggctcaaccgtggagggtcattggaaactgggggacttgagtgcaggagaggagagcggaattccacgtgtagcggtgaaatgcgtagagatgtggaggaacaccagtggcgaaggcggctctctggcctgcaactgacgctgaggcgcgaaagcgtggggagcaaacaggattagataccctggtagtccacgccgtaaacgatgagtgctaagtgttagaggggtcacaccctttagtgctgcagctaacgcgataagcactccgcctggggagtacggccgcaaggctgaaactcaaaggaattgacgggggcccgcacaagcggtggagcatgtggtttaattcgaagcaacgcgaagaaccttaccaggtcttgacatcccctgacaacccaagagattgggcgttcccccttcggggggacagggtgacaggtggtgcatggttgtcgtcagctcgtgtcgtgagatgttgggttaagtcccgcaacgagcgcaaccctcgcctctagttgccagcacgaaggtgggcactctagagggactgccggcgacaagtcggaggaaggtggggatgacgtcaaatcatcatgccccttatgacctgggctacacacgtgctacaatgggcggtacaaagggctgcgaacccgcgagggggagcgaatcccaaaaagccgctctcagttcggattgcaggctgcaactcgcctgcatgaagccggaatcgctagtaatcgcggatcagcatgccgcggtgaatacgttcccgggccttgtacacaccgcccgtcacaccacgagagcttgcaacacccgaagtcggtgaggtaacccgcaagggagccagccgccgaaggtggggcaagtgattggggtgaagtcgtaacaaggtaacc

SEQ ID NO: 935 - DNA, 1546 bp, Geobacillus sp.
  WCH70
agagtttgatcctggctcaggacgaacgctggcggcgtgcctaatacatgcaagtcgagcggaccgaacggaagcttgcttctgttcggttagcggcggacgggtgagtaacacgtgggtaacctgcccgtaagaccgggataactccgggaaaccggggctaataccggataacaccgaagaccgcatggtctttggttgaaaggtggcttttgctaccacttacggatgggcccgcggcgcattagctagttggtgaggtaacggctcaccaaggcgacgatgcgtagccggcctgagagggtgaccggccacactgggactgagacacggcccagactcctacgggaggcagcagtagggaatcttccgcaatggacgaaagtctgacggagcgacgccgcgtgagcgaagaaggtcttcggatcgtaaagctctgttgttagggaagaagaagtaccgttcgaatagggcggtacggtgacggtacctaacgagaaagccccggctaactacgtgccagcagccgcggtaatacgtagggggcgagcgttgtccggaattattgggcgtaaagcgcgcgcaggcggtcccttaagtctgatgtgaaagcccacggctcaaccgtggagggtcattggaaactgggggacttgagtgcagaagaggagagcggaattccacgtgtagcggtgaaatgcgtagagatgtggaggaacaccagtggcgaaggcggctctctggtctgtaactgacgctgaggcgcgaaagcgtggggagcaaacaggattagataccctggtagtccacgccgtaaacgatgagtgctaagtgttagagggattaaaccctttagtgctgtagctaacgcgttaagcactccgcctggggagtacggccgcaaggctgaaactcaaaggaattgacgggggcccgcacaagcggtggagcatgtggtttaattcgaagcaacgcgaagaaccttaccaggtcttgacatcccctgacaaccctggagacagggcgttcccccttcgggggggacagggtgacaggtggtgcatggttgtcgtcagctcgtgtcgtgagatgttgggttaagtcccgcaacgagcgcaaccctcgcccctagttgccagcattcagttgggcactctagggggactgccggctaaaagtcggaggaaggtggggatgacgtcaaatcatcatgccccttatgacctgggctacacacgtgctacaatgggcggtacaaagggctgcgaacccgcgagggggagcgaatcccaaaaagccgctctcagttcggattgcaggctgcaactcgcctgcatgaagccggaatcgctagtaatcgcggatcagcatgccgcggtgaatacgttcccgggccttgtacacaccgcccgtcacaccacgagagcttgcaacacccgaagtcggtgaggtaacccgtaagggagccagccgccgaaggtggggcaagtgattggggtgaagtcgtaacaaggtagccgtaccggaaggtgcggctggatcacct

SEQ ID NO: 936 - DNA, 1523 bp, Geobacillus stearothermophilus
acgaacgctggcggcgtgcctaatacatgcaagtcgagcggaccggattggggcttgccttgattcggtcagcggcggacgggtgagtaacacgtgggcaacctgcccgcaagaccgggataactccgggaaaccggagctaataccggataacaccgaagaccgcatggtcttcggttgaaaggcggcctttgggctgtcacttgcggatgggcccgcggcgcattagctagttggtgaggtaacggctcaccaaggcgacgatgcgtagccggcctgagagggtgaccggccacactgggactgagacacggcccagactcctacgggaggcagcagtagggaatcttccgcaatgggcgaaagcctgacggagcgacgccgcgtgagcgaagaaggccttcgggtcgtaaagctctgttgtgagggacgaaggagcgccgttcgaagagggcggcgcggtgacggtacctcacgagaaagccccggctaactacgtgccagcagccgcggtaatacgtagggggcgagcgttgtccggaattattgggcgtaaagcgcgcgcaggcggtctcttaagtctgatgtgaaagcccacggctcaaccgtggagggtcattggaaactgggggacttgagggcaggagaggagagcggaattccacgtgtagcggtgaaatgcgtagagatgtggaggaacaccagtggcgaaggcggctctctggcctgcacctgacgctgaggcgcgaaagcgtggggagcaaacaggattagataccctggtagtccacgccgtaaacgatgagtgctaagtgttagaggggtcacaccctttagtgctgcagctaacgcgataagcactccgcctggggagtacggccgcaaggctgaaactcaaaggaattgacgggggcccgcacaagcggtggagcatgtggtttaattcgaagcaacgcgaagaaccttaccaggtcttgacatcccctgacaacccaagagattgggcgttcccccttcggggggacagggtgacaggtggtgcatggttgtcgtcagctcgtgtcgtgagatgttgggttaagtcccgcaacgagcgcaaccctcgcctctagttgccagcattcggttgggcactctagagggactgccggcgacaagtcggaggaaggtggggatgacgtcaaatcatcatgccccttatgacctgggctacacacgtgctacaatgggcggtacaaagggctgcgaacccgcgagggggagcgaatcccaaaaagccgctctcagttcggattgcaggctgcaactcgcctgcatgaagccggaatcgctagtaatcgcggatcagcatgccgcggtgaatacgttcccgggccttgtacacaccgcccgtcacaccacgagagcttgcaacacccgaagtcggtgaggtaacccttacgggagccagccgccgaaggtggggcaagtgattggggtgaagtcgtaacaaggtagccgtaccggaaggtgcggctggatca

SEQ ID NO: 937 - DNA, 1561 bp, Geobacillus thermocatenulatus
tcttttggagagtttgatcctggctcaggacgaacgctggcggcgtgcytaatacatgcaagtcgagcggaccgaacgggagcttgctctcgtttggtcagcggcggacgggtgagtaacacgtgggcaacctgcccgcaagaccgggataactccgggaaaccggagctaataccggataacaccgaagaccgcatggtctttggttgaaaggcggcctttggctgtcacttgcggatgggcccgcggcgcattagctagttggtgaggtaacggctcaccaaggcgacgatgcgtagccggcctgagagggtggacggccacactgggactgagacacggcccagactcctacgggaggcagcagtagggaatcttccgcaatgggcgaaagcctgacggagcgacgccgcgtgagcgaagaaggccttcgggtcgtaaagctctgttgtgagggacgaaggagcgccgttcgaagagggcggcgcggtgacggtacctcacgagaaagccccggctaactacgtgccagcagccgcggtaatacgtagggggcgagcgttgtccggaattattgggcgtaaagcgcgcgcaggyggccccttaagtctgatgtgaaagcccacggctcaaccgtggagggtcattggaaactggggggcttgagggcaggagaggagagcggaattccacgtgtagcggtgaaatgcgtagagatgtggaggaacaccagtggcgaaggcggctctctggcctgcaactgacgctgaggcgcgaaagcgtggggagcaaacaggattagataccctggtagtccacgccgtaaacgatgagtgctaagtgttagaggggtcacaccctttagtgctgcagctaacgcgataagcactccgcctggggagtacggccgcaaggctgaaactcaaaggaattgacgggggcccgcacaagcggtggagcatgtggtttaattcgaagcaacgcgaagaaccttaccaggtcttgacatcccctgacaacccaagagattgggcgttcccccttcggggggacagggtgacaggtggtgcatggttgtcgtcagctcgtgtcgtgagatgttgggttaagtcccgcaacgagcgcaaccctcgcctctagttgccagcattcaggtgggcactctagagggactgccggcgacaagtcggaggaaggtggggatgacgtcaaatcatcatgccccttatgacctgggctacacacgtgctacaatgggcggtacaaagggctgcgaacccgcgagggggagcgaatcccaaaaagccgctctcagttcggattgcaggctgcaactcgcctgcatgaagccggaatcgctagtaatcgcggatcagcatgccgcggtgaatacgttcccgggccttgtacacaccgcccgtcacaccacgagagcttgcaacacccgaagtcggtgaggcaacccgcaagggagccagccgccgaaggtggggcaagtgattggggtgaagtcgtaacaaggtagccgtaccggaaggtgcggctggatcacctcctttct

SEQ ID NO: 938 - DNA, 1551 bp, Geobacillus thermodenitrificans
agagtttgatcctggctcaggacgaacgctggcggcgtgcctaatacatgcaagtcgagcggaccgaacgagagcttgctcttgttcggtcagcggcggacgggtgagtaacacgtgggcaacctgcccgcaagaccgggataactccgggaaaccggagctaataccggataacaccaaagaccgcatggtctttggttgaaaggcggcttcggctgccacttgcggatgggcccgcggcgcattagctagttggtgaggtaacggctcaccaaggcgacgatgcgtagccggcctgagagggtgaccggccacactgggactgagacacggcccagactcctacgggaggcagcagtagggaatcttccgcaatggacgaaagtctgacggagcgacgccgcgtgagcgaagaaggccttcgggtcgtaaaagctctgttgtgagggacgaaggagcgccgtttgaataaggcggcgcgggggacggtacctcacgaaaaagcccccggctaactacgtgccagcagccgcggtaatacgtagggggcgagcgttgtccggaattattgggcgtaaaggggcccgcaggcggtcctttaagtctgatgtgaaagcccacggctcaaccgtggagggtcattggaaactgggggacttgagtgcaggagaggagagcggaattccacgtgtagcggtgaaatgcgtagagatgtggaggaacaccagtggcgaaggcggctctctggcctgtaactgacgctgaggcgcgaaagcgtggggagcaaacaggattagataccctggtagtccacgccgtaaacgatgagtgctaagtgttagaggggtcacaccctttagtgctgtagctaacgcgataagcactccgcctggggagtacggccgcaaggctgaaactcaaaggaattgacgggggcccgcacaagcggtggagcatgtggtttaattcgaagcaacgcgaagaaccttaccaggtcttgacatcccctgacaacccaagagattgggcgttcccccttcggggggacagggtgacaggtggtgcatggttgtcgtcagctcgtgtcgtgagatgttgggttaagtcccgcaacgagcgcaacccttgcctctagttgccagcattcagttgggcactctagagggactgccggctaaaagtcggaggaaggtggggatgacgtcaaatcatcatgccccttatgacctgggctacacacgtgctacaatgggcggtacaaagggctgcgaacccgcgagggggagcgaatcccaaaaagccgctctcagttcggattgcaggctgcaactcgcctgcatgaagccggaatcgctagtaatcgcggatcagcatgccgcggtgaatacgttcccgggccttgtacacaccgcccgtcacaccacgagagcttgcaacacccgaagtcggtgaggtaacccttacgggagccagccgccgaaggtggggcaagtgattggggtgaagtcgtaacaaggtagccgtaccggaaggtgcggctggatcacctcc

SEQ ID NO: 939 - DNA, 1562 bp, Geobacillus thermoglucosidasius
ctctttggagagtttgatcctggctcaggacgaacgctggcggcgtgcctaatacatgcaagtcgagcggaccgggcgggagcttgcttccgcttggttagcggcggacgggtgagtaacacgtgggtaacctgcccgtaagaccgggataactccgggaaaccggggctaataccggataacaccgaagaccgcatggtcttcggttgaaaggcggcttcggctgccacttacggatgggcccgcggcgcattagctagttggtgaggtaacggctcaccaaggcgacgatgcgtagccggcctgagagggtgaccggccacactgggactgagacacggcccagactcctacgggaggcagcagtagggaatcttccgcaatggacgaaagtctgacggagcgacgccgcgtgagcgaagaaggtcttcggatcgtaaagctctgttgttagggaagaagaagtgccgttcgaacagggcggcacggtgacggtacctaacgagaaagccccggctaactacgtgccagcagccgcggtaatacgtagggggcgagcgttgtccggaattattgggcgtaaagcgcgcgcaggcggtcccttaagtctgatgtgaaagcccacggcttaaccgtggagggtcattggaaactgggggacttgagtgcagaagaggagagcggaattccacgtgtagcggtgaaatgcgtagagatgtggaggaacaccagtggcgaaggcggctctctggtctgtaactgacgctgaggcgcgaaagcgtggggagcaaacaggattagataccctggtagtccacgccgtaaacgatgagtgctaagtgttagaggggttattccctttagtgctgtagctaacgcgttaagcactccgcctggggagtacggccgcaaggctgaaactcaaaggaattgacgggggcccgcacaagcggtggagcatgtggtttaattcgaagcaacgcgaagaaccttaccaggtcttgacatcccctgacaaccctggagacagggcgttcctcccttgcgggaggacagggtgacaggtggtgcatggttgtcgtcagctcgtgtcgtgagatgttgggttaagtcccgcaacgagcgcaaccctcgcccctagttgccagcattcagttgggcactctagggggactgccggctaaaagtcggaggaaggtggggatgacgtcaaatcatcatgccccttatgacctgggctacacacgtgctacaatgggcggtacaaagggctgcgaacccgcgagggggagcgaatcccaaaaagccgctctcagttcggattgcaggctgcaactcgcctgcatgaagccggaatcgctagtaatcgcggatcagcatgccgcggtgaatacgttcccgggccttgtacacaccgcccgtcacaccacgagagcttgcaacacccgaagtcggtgaggtaacccgcaagggagccagccgccgaaggtggggcaagtgattggggtgaagtcgtaacaaggtagccgtaccggaaggtgcggctggatcacctcctttct

SEQ ID NO: 940 - DNA, 1546 bp, Geobacillus thermoleovorans
agagtttgatcctggctcaggacgaacgctggcggcgtgcctaatacatgcaagtcgagcggaccaaatcggagcttgctctgatttggtcagcggcggacgggtgagtaacacgtgggcaacctgcccgcaagaccgggataactccgggaaaccggagctaataccggataacaccgaagaccgcatggtctttggttgaaaggcggcctttggctgtcacttgcggatgggcccgcggcgcattagctagttggtgaggtaacggctcaccaaggcgacgatgcgtagccggcctgagagggtgaccggccacactgggactgagacacggcccagactcctacgggaggcagcagtagggaatcttccgcaatgggcgaaagcctgacggagcgacgccgcgtgagcgaagaaggccttcgggtcgtaaagctctgttgtgagggacgaaggagcgccgttcgaagagggcggcgcggtgacggtacctcacgaggaagccccggctaactacgtgccagcagccgcggtaatacgtagggggcgagcgttgtccggaattattgggcgtaaagcgcgcgcaggcggttccttaagtctgatgtgaaagcccacggctcaaccgtggagggtcattggaaactgggggacttgagtgcaggagaggagagcggaattccacgtgtagcggtgaaatgcgtagagatgtggaggaacaccagtggcgaaggcggctctctggcctgcaactgacgctgaggcgcgaaagcgtggggagcaaacaggattagataccctggtagtccacgccgtaaacgatgagtgctaagtgttagaggggtcacaccctttagtgctgcagctaacgcgataagcactccgcctggggagtacggccgcaaggctgaaactcaaaggaattgacgggggcccgcacaagcggtggagcatgtggtttaattcgaagcaacgcgaagaaccttaccaggtcttgacatcccctgacaacccaagagattgggcgttcccccttcggggggacagggtgacaggtggtgcatggttgtcgtcagctcgtgtcgtgagatgttgggttaagtcccgcaacgagcgcaaccctcgcctctagttgccagcacgaaggtgggcactctagagggactgccggcgacaagtcggaggaaggtggggatgacgtcaaatcatcatgccccttatgacctgggctacacacgtgctacaatgggcggtacaaagggctgcgaacccgcgagggggagcgaatcccaaaaagccgctctcagttcggattgcaggctgcaactcgcctgcatgaagccggaatcgctagtaatcgcggatcagcatgccgcggtgaatacgttcccgggccttgtacacaccgcccgtcacaccacgagagcttgcaacacccgaagtcggtgaggcaacccgcaagggagccagccgccgaaggtggggcaagtgattggggtgaagtcgtaacaaggtagccgtaccggaaggtgcggctggatcacct

SEQ ID NO: 941 - DNA, 1555 bp, Geobacter bemidjiensis
aaactggagagtttgatcctggctcagaacgaacgctggcggcgtgcttaacacatgcaagtcgaacgggatccagagcttgctctggtgagagtggcgcacgggtgagtaacgcgtggataacctgccctggtatctggaataacatctcgaaaggggtgctaataccggataagcctacggagccttcggtctctgcaggaaaaggtggcctctatttataagctaccgtatcaggatgggtccgcgtaccattagctagttggtagggtaatggcctaccaaggctacgatggttagctggtctgagaggatgatcagccacactggaactgagacacggtccagactcctacgggaggcagcagtggggaattttgcgcaatgggggaaaccctgacgcagcaacgccgcgtgagtgatgaaggctttcgggtcgtaaagctctgtcagtagggaagaaatgaaaacggttaatacccgtttttcttgacggtacctacaaaggaagcaccggctaactccgtgccagcagccgcggtaatacggagggtgcaagcgttgttcggatttattgggcgtaaagcgcgtgtaggcggtttcttaagtctgatgtgaaagccctgggctcaacccaggaagtgcattggatactgggagacttgaatacgggagagggtagtggaattcctagtgtaggagtgaaatccgtagatattaggaggaacaccggtggcgaaggcggctacctggaccgatattgacgctgagacgcgaaagcgtggggagcaaacaggattagataccctggtagtccacgccgtaaacgatgagaactaggtgttgcgggtattgacccctgcagtgccgcagctaacgcattaagttctccgcctgggaagtacggtcgcaagactaaaactcaaaggaattgacgggggcccgcacaagcggtggagcatgtggtttaattcgacgcaacgcgcagaaccttacctgggcttgacatctgcggaacctccccgaaacgggagggtgccttcgggagccgcaagacaggtgctgcatggctgtcgtcagctcgtgtcgtgagatgttgggttaagtcccgcaacgagcgcaacccctatccttagttgccatcatttagttgggcactctaaggagactgccggtgtcaaaccggaggaaggtggggatgacgtcaagtcctcatggcccttatgtccagggctacacacgtgctacaatggccggtacaaagagcagcgataccgcgaggtggagccaatctcaaaaagccggtctcagttcggattggagtctgcaactcgactccatgaagttggaatcgctagtaatcgcggatcagcacgccgcggtgaatacgttcccgggccttgtacacaccgcccgtcacaccacgggagtcggttggtcccgaagtgcgtgagctaacccgcaagggaggcagcgtcctaaggaatggccggtgactggggtgaagtcgtaacaaggtagccgtaggggaacctgcggctggatcacctccttt

SEQ ID NO: 942 - DNA, 1485 bp, Gloeobacter violaceus
aaaatggagagtttgatcctggctcaggatgaacgctggcggcgtgcttaacacatgcaagtcgaacgagatcttcggatcgagtggcggacgggtgagtaacacgtgggaatctgccctcaggagggggataacggccggaaacggccgctaataccccatatgccgcaaggtgaaatgaatttcgcctgaggatgagcccgcgtctgattagctagttggtggggtaatggcctaccaaggctacgatcagtagctggtctgagaggatgatcagccacactgggactgagacacggcccagactcctacgggaggcagcagtggggaattttccgcaatgggcgaaagcctgacggagcaacgccgcgtgggtgatgaaggcccgtgggtcgtaaagcccttttgtcagggacgaaacctgacggtacctgacgaataagcatcggctaactccgtgccagcagccgcggtaatacggaggatgcaagcgttatccggaattattgggcgtaaagcgtacgtaggcggccagccaagtctggggtcaaagcccgcagcctaactgcggaaaggccctggaaactggttggctagagtgcggtaggggcaaggggaattcccggtgtagcggtgaaatgtggagatatcgggaagaacaccagcggcgaaagcgccttgctggaccgcaactgacgctgaggtacgaaagccaggggagcaaatgggattagataccccagtagtcctggccgtaaacgatggacactaggtgttgcgcgtatcgacccgtgcagtgccgtagctaacgcgttaagtgtcccgcctggggagtacgcacgcaagtgtgaaactcaaaggaattgacgggggcccgcacaagcggtggagcatgtggtttaattcgatgcaacgcgaagaaccttaccagggcttgacatgtcgcgaatctcgcggaaacgtgggagtgccttcgggaacgcgaacacaggtgctgcatggctgtcgtcagctcgtgtcgtgagatgttgggttaagtcccgcaacgagcgcaaccctcgtcgtcagttgccatcattcagttgggcactctggcgagactgccggtgacaaaccggaggaaggtggggatgacgtcaagtcagcatggctcttacgtcctgggctacacacgtgctacaatggttcggataaagggtcgcaatctcgcgagggggagccaatcccataaaccgaatctcagttcggattgcaggctgcaactcgcctgcatgaagtcggaatcgctagtaatcgcaggtcagcatactgcggtgaatacgttcccgggccttgtacacaccgcccgtcacaccatggaagctggtcatgcccgaagtcggtattctaaccgcaaggagggagccgccgaaggcggggccggtgactggggtgaagtcgtaacaaggtagccgtaccggaaggtgcggctggatcacctccttt

SEQ ID NO: 943 - DNA, 1447 bp, Gluconacetobacter azotocaptans
agcgaacgctggcggcatgcttaacacatgcaagtcgcacgaacctttcggggttagtggcggacgggtgagtaacgcgtagggatctgtccatgggtgggggataacctcgggaaactgaggctaataccgcatgacacctgagggtcaaaggcgtaagtcgcctgtggaggaacctgcgttcgattagctggttggtggggtaaaggcctaccaaggcgatgatcgatagctggtctgagaggatgatcagccacactgggactgagacacggcccagactcctacgggaggcagcagtggggaatattggacaatgggcgcaagcctgatccagcaatgccgcgtgtgtgaagaaggtcttcggattgtaaagcactttcgacggggacgatgatgacggtacccgtagaagaagccccggctaacttcgtgccacgtgccgcggtaatacgaagggggctagcgttgctcggaatgactgggcgtaaagggcgcgtaggcggtttggacagtcagatgtgaaattcctgggcttaacctgggggctgcatttgatacgtacagactagagtgtgagagagggttgtggaattcccagtgtagaggtgaaattcgtagatattgggaagaacaccggtggcgaaggcggcaacctggctcataactgacgctgaggcgcgaaagcgtggggagcaaacaggattagataccctggtagtccacgctgtaaacgatgtgtgctggatgttgggtggcttagccactcagtgtcgtagttaacgcgataagcacaccgcctggggagtacggccgcaaggttgaaactcaaaggaattgacgggggcccgcacaagcggtggagcatgtggtttaattcgaagcaacgcgcagaaccttaccagggcttgacatggggaggctgtgttcagagatgagcatttcccgcaagggacctcctgcacaggtgctgcatggctgtcgtcagctcgtgtcgtgagatgttgggttaagtcccgcaacgagcgcaaccctcgcctttagttgccagcatgtttgggtgggcactctaaaggaactgccggtgacaagccggaggaaggtggggatgacgtcaagtcctcatggcccttatgtcctgggctacacacgtgctacaatggcggtgacagtgggaagccaggcagcgatgccgagctgatctcaaaaagccgtctcagttcggattgcactctgcaactcgggtgcatgaagttggaatcgctagtaatcgcggatcagcatgccgcggtgaatacgttcccgggccttgtacacaccgcccgtcacaccatgggagttggtttgaccttaagccggtgagcgaacccagcaatggggcgcagccgaccacggtcgggtcagcgactggggtgaagtcgtaacaaggtagccgtaggggaactgc

SEQ ID NO: 944 - DNA, 1486 bp, Gluconacetobacter diazotrophicus
agagtttgatcctggctcagagcgaacgctggcggcatgcttaacacatgcaagtcgcacgaacctttcggggttagtggcggacgggtgagtaacgcgtagggatctgtccatgggtgggggataactccgggaaactggagctaataccgcatgacacctgagggtcaaaggcgcgagtcgcctgtggaggaacctgcgttcgattagctagttggtggggtaaaggcctaccaaggcgatgatcgatagctggtctgagaggatgatcagccacactgggactgagacacggcccagactcctacgggaggcagcagtggggaatattggacaatgggcgcaagcctgatccagcaatgccgcgtgtgtgaagaaggtcttcggattgtaaagcactttcgacggggacgatgatgacggtacccgtagaagaagccccggctaacttcgtgccagcagccgcggtaatacgaagggggctagcgttgctcggaatgactgggcgtaaagggcgcgtaggcggtttggacagtcagatgtgaaattcctgggcttaacctgggggctgcatttgatacgtacagactagagtgtgagagagggttgtggaattcccagtgtagaggtgaaattcgtagatattgggaagaacaccggtggcgaaggcggcaacctggctcataactgacgctgaggcgcgaaagcgtggggagcaaacaggattagataccctggtagtccacgctgtaaacgatgtgtgctggatgttgggtggcttagcccctcagtgtcgtagttaacgcgataagcacaccgcctggggagtacggccgcaaggttgaaactcaaaggaattgacgggggcccgcacaagcggtggagcatgtggtttaattcgaagcaacgcgcagaaccttaccagggcttgacatggggaggctgcagtcagagatggctgtttcccgcaagggacctcctgcacaggtgctgcatggctgtcgtcagctcgtgtcgtgagatgttgggttaagtcccgcaacgagcgcaaccctcgcctttagttgccagcatgattgggtgggcactctaaaggaactgccggtgacaagccggaggaaggtggggatgacgtcaagtcctcatggcccttatgtcctgggctacacacgtgctacaatggcggtgacagtgggaagccaggcagcgatgccgagctgatctcaaaaagccgtctcagttcggattgcactctgcaactcgagtgcatgaaggtggaatcgctagtaatcgcggatcagcatgccgcggtgaatacgttcccgggccttgtacacaccgcccgtcacaccatgggagttggtttgaccttaagccggtgagcgaacccagcaatggggcgcagccgaccacggtcgggtcagcgactggggtgaagtcgtaacaaggtagccgtaggggaacctgcggctggatcacctccttt

SEQ ID NO: 945 - DNA, 1484 bp, Gluconacetobacter entanii
  modified_base (10)..(11): a, c, t, g, unknown or other
gagtttgatnntggctcagagcgaacgctggcggcatgcttaacacatgcaagtcgcacgaacctttcggggttagtggcggacgggtgagtaacgcgtagggatctgtccatgggtgggggataaccttgggaaaccgaggctaataccgcatgacacctgagggtcaaaggcgcaagtcgcctgtggaggaacctgcgttcgattagctagttggtggggtaaaggcctaccaaggcgatgatcgatagctggtctgagaggatgatcagccacactgggactgagacacggcccagactcctacgggaggcagcagtggggaatattggacaatgggcgcaagcctgatccagcaatgccgcgtgtgtgaagaaggttttcggattgtaaagcactttcagcggggacgatgatgacggtacccgcagaagaagccccggctaacttcgtgccagcagccgcggtaatacgaagggggcaagcgttgctcggaatgactgggcgtaaagggcgcgtaggcggttgttacagtcagatgtgaaattcccgggcttaacctgggggctgcatttgatacgtggcgactagagtgtgagagagggttgtggaattcccagtgtagaggtgaaattcgtagatattgggaagaacaccggtggcgaaggcggcaacctggctcatgactgacgctgaggcgcgaaagcgtggggagcaaacaggattagataccctggtagtccacgctgtaaacgatgtgtgctggatgttgggtggcttggccattcagtgtcgtagttaacgcgataagcacaccgcctggggagtacggccgcaaggttgaaactcaaaggaattgacgggggcccgcacaagcggtggagcatgtggtttaattcgaagcaacgcgcagaaccttaccagggcttgacatgcggaggctgtgtccagagatgggcatttctcgcaagagacctccagcacaggtgctgcatggctgtcgtcagctcgtgtcgtgagatgttgggttaagtcccgcaacgagcgcaaccctcgcctttagttgccagcacgtctgggtgggcactctaaaggaactgccggtgacaagccggaggaaggtggggatgacgtcaagtcctcatggcccttatgtcctgggctacacacgtgctacaatggcggtgacagtgggaagccaggcagcgatgccgagcggatctccaaaagccgtctcagttcggattgcactctgcaactcgagtgcatgaaggtggaatcgctagtaatcgcggatcagcatgccgcggtgaatacgttcccgggccttgtacacaccgcccgtcacaccatgggagttggtttgaccttaagccggtgagcgaaccgcaaggacgcagccgaccacggtcgggtcagcgactggggtgaagtcgtaacaaggtagccgtaggggaacctgcggctggatcacctcctttcaa

SEQ ID NO: 946 - DNA, 1482 bp, Gluconacetobacter europaeus
gagtttgatcatggctcagagcgaacgctggcggcatgcttaacacatgcaagtcgcacgaacctttcggggttagtggcggacgggtgagtaacgcgtagggatctgtccatgggtgggggataactttgggaaactgaagctaataccgcatgacacctgagggtcaaaggcgcaagtcgcctgtggaggaacctgcgttcgattagctagttggtggggtaaaggcctaccaaggcgatgatcgatagctggtctgagaggatgatcagccacactgggactgagacacggcccagactcctacgggaggcagcagtggggaatattggacaatgggcgcaagcctgatccagcaatgccgcgtgtgtgaagaaggttttcggattgtaaagcactttcagcggggacgatgatgacggtacccgcagaagaagccccggctaacttcgtgccagcagccgcggtaatacgaagggggcaagcgttgctcggaatgactgggcgtaaagggcgcgtaggcggttgacacagtcagatgtgaaattcctgggcttaacctgggggctgcatttgatacgtggcgactagagtgtgagagagggttgtggaattcccagtgtagaggtgaaattcgtagatatttgggaagaacaccggtggcgaaggcggcaacctggctcatgactgacgctgaggcgcgaaagcgtggggagcaaacaggattagataccctggtagtccacgctgtaaacgatgtgtgctggatgttgggtgactttgtcattcagtgtcgtagttaacgcgataagcacaccgcctggggagtacggccgcaaggttgaaactcaaaggaattgacgggggcccgcacaagcggtggagcatgtggtttaattcgaagcaacgcgcagaaccttaccagggcttgacatgcggaggccgtgtccagagatgggcatttctcgcaagagacctccagcacaggtgctgcatggctgtcgtcagctcgtgtcgtgagatgttgggttaagtcccgcaacgagcgcaaccctcgcctttagttgccatcacgtctgggtgggcactctaaaggaactgccggtgacaagccggaggaaggtggggatgacgtcaagtcctcatggcccttatgtcctgggctacacacgtgctacaatggcggtgacagtgggaagccaggtagcgataccgagccgatctcaaaaagccgtctcagttcggattgcactctgcaactcgagtgcatgaaggtggaatcgctagtaatcgcggatcagcatgccgcggtgaatacgttcccgggccttgtacacaccgcccgtcacaccatgggagttggtttgaccttaagccggtgagcgaaccgcaaggacgcagccgaccacggtcgggtcagcgactggggtgaagtcgtaacaaggtagccgtaggggaacctgcggctggatcacctccttt

SEQ ID NO: 947 - DNA, 1481 bp, Gluconacetobacter hansenii
gagtttgattatggctcagagcgaacgctggcggcatgcttaacacatgcaagtcgcacgaacctttcggggttagtggcggacgggtgagtaacgcgtagggatctgtccatgggtgggggataactttgggaaactgaagctaataccgcatgacacctgagggtcaaaggcgcgagtcgcctgtggaggaacctgcgttcgattagctagttggtggggtaaaggcctaccaaggcgatgatcgatagctggtctgagaggatgatcagccacactgggactgagacacggcccagactcctacgggaggcagcagtggggaatattggacaatgggcgcaagcctgatccagcaatgccgcgtgtgtgaagaaggttttcggattgtaaagcactttcagcggggacgatgatgacggtacccgcagaagaagccccggctaacttcgtgccagcagccgcggtaatacgaagggggcaagcgttgctcggaatgactgggcgtaaagggcgcgtaggcggttgttacagtcagatgtgaaattcccgggcttaacctgggggctgcatttgatacgtgacgactagagtgtgagagagggttgtggaattcccagtgtagaggtgaaattcgtagatattgggaagaacaccggtggcgaaggcggcaacctggctcatgactgacgctgaggcgcgaaagcgtggggtgcaaacaggattagataccctggtagtccacgctgtaaacgatgtgtgctggatgttggatggcttggccattcggtgtcgtagttaacgcgataagcacaccgcctggggagtacggccgcaaggttgaaactcaaaggaattgacgggggcccgcacaagcggtggagcatgtggtttaattcgaagcaacgcgcagaaccttaccaggacttgacatgcggaggctgtgtccagagatgggcatttctcgcaagagacctccagcacaggtgctgcatggctgtcgtcagctcgtgtcgtgagatgttgggttaagtcccgcaacgagcgcaaccctcgcctttagttgccagcacgtctgggtgggcactctaaaggaactgccggtgacaagccggaggaaggtggggatgacgtcaagtcctcatggcccttatgtcctgggctacacacgtgctacaatggcggtgacagtgggaagccaggcagcgatgccgagcggatctccaaaagccgtctcagttcggattgcactctgcaactcgagtgcatgaaggtggaatcgctagtaatcgcggatcagcatgccgcggtgaatacgttcccgggccttgtacacaccgcccgtcacaccatgggagttggtttgaccttaagccggtgagcgaaccgcaaggacgcagccgaccacggtcgggtcagcgactggggtgaagtcgtaacaaggtagccgtaggggaacctgcggctggatcacctccttt

SEQ ID NO: 948 - DNA, 1447 bp, Gluconacetobacter johannae
agcgaacgctggcggcatgcttaacacatgcaagtcgcacgaacctttcggggttagtggcggacgggtgagtaacgcgtagggatctgtccatgggtgggggataacctcgggaaactgaggctaataccgcatgacacctgagggtcaaaggcgtaagtcgcctgtggaggaacctgcgttcgattagctagttggtggggtaaaggcctaccaaggcgatgatcgatagctggtctgagaggatgatcagccacactgggactgagacacggcccagactcctacgggaggcagcagtggggaatattggacaatgggcgcaagctgatccagcaatgccgcgtgtgtgaagaaggtcttcggattgtaaagcactttcgacggggacgatgatgacggtacccgtagaagaagccccggctaacttcgtgccagcagccgcggtaatacgaagggggctagcgttgctcggaatgactgggcgtaaagggcgcgtaggcggtttggacagtcagatgtgaaattcctgggcttaacctgggggctgcatttgatacgtatagactagagtgtgagagagggttgtggaattcccagtgtagaggtgaaattcgtagatattgggaagaacaccggtggcgaaggcggcaacctggctcataactgacgctgaggcgcgaaagggtggggagcaaacaggattagataccctggtagtccacgctgtaaacgatgtgtgctggatgttgggtggcttagccactcagtgtcgtagttaacgcgataagcacaccgcctggggagtacggccgcaaggttgaaactcaaaggaattgacgggggcccgcacaagcggtggagcatgtggtttaattcgaagcaacgcgcagaaccttaccagggcttgacatggggaggctgtgagcagagatgttcatttcccgcaagggacctcctgcacaggtgctgcatggctgtcgtcagctcgtgtcgtgagatgttgggttaagtcccgcaacgagcgcaaccctcgcctttagttgccagcatgtttgggtgggcactctaaaggaactgccggtgacaagccggaggaaggtggggatgacgtcaagtcctcatggcccttatgtcctgggctacacacgtgctacaatggcggtgacagtgggaagccaggcagcgatgccgagctgatctcaaaaagccgtctcagttcggattgcactctgcaactcgggtgcatgaagttggaatcgctagtaatcgcggatcagcatgccgcggtgaatacgttcccgggccttgtacacaccgcccgtcacaccatgggagttggtttgaccttaagccggtgagcgaacccagcaatggggcgcagccgaccacggtcgggtcagcgactggggtgaagtcgtaacaaggtagccgtaggggaacctgc

SEQ ID NO: 949 - DNA, 1449 bp, Gluconacetobacter oboediens
tgagtttgatcctggctcagagcgaatgctggcggcatgcttaacacatgcaagtcgcacgaacctttcggggttagtggcggacgggtgagtaacgcgtagggatctatccacgggtgggggataactttgggaaactgaagctaataccgcatgacacctgagggtcaaaggcgcaagtcgcctgtggaggaacctgcgttcgattagctagttggtggggtaaaggcctaccaaggcgatgatcgatagctggtctgagaggatgatcagccacactgggactgagacacggcccagactcctacgggaggcagcagtggggaatattggacaatgggcgcaagcctgatccagcaatgccgcgtgtgtgaagaaggttttcggattgtaaagcactttcagcggggatgatgatgacggtacccgcagaagaagccccggctaacttcgtgccagcagccgcggtaatacgaagggggcaagcgttgctcggaatgactgggcgtaaagggcgcgtaggcggttgacacagtcagatgtgaaattcccgggcttaacctgggggctgcatttgatacgtggcgactagagtgtgagagagggttgtggaattcccagtgtagaggtgaaattcgtagatattgggaagaacaccggtggcgaaggcggcaacctggctcatgactgacgctgaggcgcgaaagcgtggggagcaaacaggattagataccctggtagtccacgctgtaaacgatgtgtgctggatgttgggtgactttgtcattcagtgtcgtagttaacgcgataagcacaccgcctggggagtacggccgcaaggttgaaactcaaaggaattgacgggggcccgcacaagcggtggagcatgtggtttaattcgaagcaacgcgcagaaccttaccagggcttgacatgcggaggccgtgtccagagatgggcatttctcgcaagagacctccagcacaggtgctgcatggctgtcgtcagctcgtgtcgtgagatgttgggttaagtcccgcaacgagcgcaaccctcgcctttagttgccatcacgtctgggtgggcactctaaaggaactgccggtgacaagccggaggaaggtggggatgacgtcaagtcctcatggcccttatgtcctgggctacacacgtgctacaatggcggtgacagtgggaagccaggtggtgacaccgagccgatctcaaaaagccgtctcagttcggattgcactctgcaactcgagtgcatgaaggtggaatcgctagtaatcgcggatcagcatgccgcggtgaatacgttcccgggccttgtacacaccgcccgtcacaccatgggagttggtttgaccttaagccggtgagcgaaccgcaaggacgcagccgaccacggtcgggtcagcgactggggtgaagtcgtaacaaggtagc

SEQ ID NO: 950 - DNA, 1493 bp, Gluconacetobacter xylinus
atgaacctgagagtttgatcctggctcagagcgaacgctggcggcatgcttaacacatgcaagtcgcacgaacctttcggggttagtggcggacgggtgagtaacgcgtagggatctgtccatgggtgggggataactttgggaaactgaagctaataccgcatgacacctgagggtcaaaggcgcaagtcgcctgtggaggaacctgcgttcgattagctagttggtggggtaaaggcctaccaaggcgatgatcgatagctggtctgagaggatgatcagccacactgggactgagacacggcccagactcctacgggaggcagcagtggggaatattggacaatgggcgcaagcctgatccagcaatgccgcgtgtgtgaagaaggttttcggattgtaaagcactttcagcggggacgatgatgacggtacccgcagaagaagccccggctaacttcgtgccagcagccgcggtaatacgaagggggcaagcgttgctcggaatgactgggcgtaaagggcgcgtaggcggttgacacagtcaggtgtgaaattcccgggcttaacctggggtctgcatttgatacgtggcgactagagtgtgagagagggttgtggaattcccagtgtagaggtgaaattcgtagatattgggaagaacaccggtggcgaaggcggcaacctggctcatgactgacgctgaggcgcgaaagcgtggggagcaaacaggattagataccctggtagtccacgctgtaaacgatgtgtgctggatgttgggtgactttgtcattcagtgtcgtagttaacgcgataagcacaccgcctggggagtacggccgcaaggttgaaactcaaaggaattgacgggggcccgcacaagcggtggagcatgtggtttaattcgaagcaacgcgcagaaccttaccagggcttgacatgcggaggctgtgtccagagatgggcatttctcgcaagagacctccagcacaggtgctgcatggctgtcgtcagctcgtgtcgtgagatgttgggttaagtcccgcaacgagcgcaaccctcgcctttagttgccatcacgtttgggtgggcactctaaaggaactgccggtgacaagccggaggaaggtggggatgacgtcaagtcctcatggcccttatgtcctgggctacacacgtgctacaatggcggtgacagtgggaagccaggtggtgacaccgagccgatctcaaaaagccgtctcagttcggattgcactctgcaactcgagtgcatgaaggtggaatcgctagtaatcgcggatcagcatgccgcggtgaatacgttcccgggccttgtacacaccgcccgtcacaccatgggagttggtttgaccttaagccggtgagcgaacccgcaaggggcgcagccgaccacggtcgggtcagcgactggggtgaagtcgtaacaaggtagccgtaggggaacctgcggctggatcacctccttt

SEQ ID NO: 951 - DNA, 1472 bp, Gordonia bronchialis
ggacgaacgctggcggcgtgcttaacacatgcaagtcgaacggaaaggcccagcttgctgggtactcgagtggcgaacgggtgagtaacacgtgggtgatctgcccctgactttgggataagcctgggaaactgggtctaataccggatatgaccttacatcgcatggtgtttggtggaaagcttttgcggttggggatgggcccgcggcctatcagcttgttggtggggtaatggcctaccaaggcgacgacgggtagccgacctgagagggtgatcggccacactgggactgagacacggcccagactcctacgggaggcagcagtggggaatattgcacaatgggcgcaagcctgatgcagcgacgccgcgtgagggatgacggccttcgggttgtaaacctctttcaccagggacgaagcgtgagtgacggtacctggagaagaagcaccggccaactacgtgccagcagccgcggtaatacgtagggtgcgagcgttgtccggaattactgggcgtaaagagctcgtaggcggtttgtcgcgtcgtctgtgaaattctgcagcttaactgtaggcgtgcaggcgatacgggcagacttgagtactacaggggagactggaattcctggtgtagcggtgaaatgcgcagatatcaggaggaacaccggtggcgaaggcgggtctctgggtagtaactgacgctgaggagcgaaagcgtgggtagcgaacaggattagataccctggtagtccacgccgtaaacggtgggtactaggtgtggggttcatttcacggaatccgtgccgtagctaacgcattaagtaccccgcctggggagtacggccgcaaggctaaaactcaaaggaattgacgggggcccgcacaagcggcggagcatgtggattaattcgatgcaacgcgaagaaccttacctgggtttgacatacaccagacgcggctagagatagtcgttcccttgtggttggtgtacaggtggtgcatggctgtcgtcagctcgtgtcgtgagatgttgggttaagtcccgcaacgagcgcaacccttgtcctgtattgccagcgggttatgccggggacttgcaggagactgccggggtcaactcggaggaaggtggggatgacgtcaagtcatcatgccccttatgtccagggcttcacacatgctacaatggccggtacagagggctgcgataccgtgaggtggagcgaatcccttaaagccggtctcagttcggatcggggtctgcaactcgaccccgtgaagtcggagtcgctagtaatcgcagatcagcaacgctgcggtgaatacgttcccgggccttgtacacaccgcccgtcacgtcatgaaagtcggtaacacccgaagccggtggcctaaccccttgtgggagggagctgtcgaaggtgggatcggcgattgggacgaagtcgtaacaaggtagccgtaccgg

SEQ ID NO: 952 - DNA, 1298 bp, Gordonia polyisoprenivorans
gacgaacgctggcggcgtgcttaacacatgcaagtcgaacgagtggcgaacgggtgagtaacacgtgggtgatctgcccctgactttgggataagcctgggaaactgggtctaataccggatatggaaaggcggttggggatgggcccgcggcctatcagcttgttggtggggtaatggcctaccaaggcgacgacgggtagccgacctgagagggtgatcggccacactgggactgagacacggcccagactcctacgggaggcagcagtggggaatattgcacaatgggcgcaagcctgatgcagcgacgccgcgtgagggatgacggccttcgggttgtaaacctctttcagcagggacgatgacggtacctgcagaagaagcaccggccaactacgtgccagcagccgcggtaatacgtagggtgcgagcgttgtccggaattactgggcgtaaagagctcgtaggcggtttgtcgcgtcgtctgtgaaattctgcagcttaactgtaggcgtgcaggcgatacgggcagacttgagtactacaggggagactggaattcctggtgtagcggtgaaatgcgcagatatcaggaggaacaccggtggcgaaggcgggtctctgggtagactgacgctgaggagcgaaagcgtgggtagcgaacaggattagataccctggtagtccacgccgtaaacggtgggtactaggtgtgggttgatccgtgccgtagctaacgcattaagtaccccgcctggggagtacggccgcaaggctaaaactcaaaggaattgacgggggcccgcacaagcggcggagcatgtggattaattcgatgcaacgcgaagaaccttacctgggtttgacatatacaggtggtgcatggctgtcgtcagctcgtgtcgtgagatgttgggttaagtcccgcaacgagcgcaacccttgtcctgtattgccagcggccggggacttgcaggagactgccggggtcaactcggaggaaggtggggatgacgtcaagtcatcatgccccttatgtccagggcttcacacatgctacaatggccggcagagggctgcgataccgtgaggtggagcgaatcccttccggtctcagttcggacggggtctgcaactcgaccccggaagtcggagtcgctagtaatcgcagatcagcaacgctgcggtgaatacgttcccgggccttgtacacaccgcccgtcacgtcatgaaagtcggtaacacccgaagccggtgcctagggagctgtcgaaggtgggatcggcgattgggacg

SEQ ID NO: 953 - DNA, 1485 bp, Gordonia sp.
  KTR9
  modified_base (11)..(11): a, c, t, g, unknown or other
  modified_base (415)..(415): a, c, t, g, unknown or other
  modified_base (1483)..(1483): a, c, t, g, unknown or other
agagtttgatncctggctcaggacgaacgctggcggcgtgcttaacacatgcaagtcgaacggaaaggcccagcttgctgggtactcgagtggcgaacgggtgagtaacacgtgggtgatctgccctgcactctgggataagcctgggaaactgggtctaataccggatatgaccaactgtcgcatggtggttggtggaaagcttttgcggtgtgggatgggcccgcggcctatcagcttgttggtggggtaatggcctaccaaggcgacgacgggtagccgacctgagagggtgatcggccacactgggactgagacacggcccagactcctacgggaggcagcagtggggaatattgcacaatgggcgcaagcctgatgcagcgacgccgcgtgagggatgacggccttcggnttgtaaacctctttcaccagggacgaagcgtgagtgacggtacctggagaagaagcaccggccaactacgtgccagcagccgcggtaatacgtagggtgcgagcgttgtccggaattactgggcgtaaagagctcgtaggcggtttgtcgcgtcgtctgtgaaattctgcaactcaattgtaggcgtgcaggcgatacgggcagacttgagtactacaggggagactggaattcctggtgtagcggtgaaatgcgcagatatcaggaggaacaccggtggcgaaggcgggtctctgggtagtaactgacgctgaggagcgaaagcgtgggtagcgaacaggattagataccctggtagtccacgccgtaacggtgggtactaggtgtgggttccttttcacgggatccgtgccgtagctaacgcattaagtaccccgcctggggagtacggccgcaaggctaaaactcaaaggaattgacgggggcccgcacaagcggcggagcatgtggattaattcgatgcaacgcgaagaaccttacctgggtttgacatacaccagacgcggctagagatagtcgttcccttgtggttggtgtacaggtggtgcatggctgtcgtcagctcgtgtcgtgagatgttgggttaagtcccgcaacgagcgcaacccttgtcctgtattgccagcgggttatgccggggacttgcaggagactgccggggtcaactcggaggaaggtggggatgacgtcaagtcatcatgccccttatgtccagggcttcacacatgctacaatggctggtacagagggctgcgataccgtgaggtggagcgaatcccttaaagccagtctcagttcggattggggtctgcaactcgaccccatgaagtcggagtcgctagtaatcgcagatcagcaacgctgcggtgaatacgttcccgggccttgtacacaccgcccgtcacgtcatgaaagtcggtaacacccgaagccggtggcctaaccccttgtgggagggagctgtcgaaggtgggatcggcgattgggacgaagtcgtaaccaaggtancc

SEQ ID NO: 954 - DNA, 1430 bp, Gordonia sputi
tgcaagtcgaacggaaaggcccagcttgctgggtactcgagtggcgaacgggtgagtaacacgtgggtgatctgcccctgactttgggataagcctgggaaactgggtctaataccggatattcatttttcctcgcatggggatttgtggaaagcttttgcggttggggatgggcccgcggcctatcagcttgttggtggggtaatggcctaccaaggcgacgacgggtagccgacctgagagggtgatcggccacactgggactgagacacggcccagactcctacgggaggcagcagtggggaatattgcacaatgggcgcaagcctgatgcagcgacgccgcgtgagggatgacggccttcgggttgtaaacctctttcagctccgacgaagcgcaagtgacggtaggagcagaagaagcaccggccaactacgtgccagcagccgcggtaatacgtagggtgcaagcgttgtccggaattactgggcgtaaagagctcgtaggcggtttgtcgcgtcgtctgtgaaattctgcagcttaactgcaggcgtgcaggcgatacgggcagacttgagtactacaggggagactggaattcctggtgtagcggtgaaatgcgcagatatcaggaggaacaccggtggcgaaggcgggtctctgggtagtaactgacgctgaggagcgaaagcgtgggtagcgaacaggattagataccctggtagtccacgccgtaaacggtgggtactaggtgtgggtttcatttcacggaatccgtgccgtagctaacgcattaagtaccccgcctggggagtacggccgcaaggctaaaactcaaaggaattgacgggggcccgcacaagcggcggagcatgtggattaattcgatgcaacgcgaagaaccttacctgggtttgacatacaccagacgcagtcagagatggctgttcccttgtggttggtgtacaggtggtgcatggctgtcgtcagctcgtgtcgtgagatgttgggttaagtcccgcaacgagcgcaacccttgtcctgtattgccagcgggttatgccggggacttgcaggagactgccggggtcaactcggaggaaggtggggatgacgtcaagtcatcatgccccttatgtccagggcttcacacatgctacaatggctggtacagagggctgcgagaccgtgaggtggagcgaatcccttaaagccagtctcagttcggattggggtctgcaactcgaccccatgaagtcggagtcgctagtaatcgcagatcagcaacgctgcggtgaatacgttcccgggccttgtacacaccgcccgtcacgtcatgaaagtcggtaacacccgaagccggtggcctaacccttgtggagggagctgtcgaaggtgggatcggcgattgggacgaagtcgtaacaagg

SEQ ID NO: 955 - DNA, 1467 bp, Gordonia terrae
  modified_base (444)..(445): a, c, t, g, unknown or other
gagtttgatcatggctcaggacgaacgctggcggcgtgcttaacacatgcaagtcgaacggaaaggcccagcttgctgggtactcgagtggcgaacgggtgagtaacacgtgggtgatctgccctgcactctgggataagcctgggaaactgggtctaataccggatatgaccaactgtcgcatggtggttggtggaaagcttttgcggtgtgggatgggcccgcggcctatcagcttgttggtggggtaatggcctaccaaggcgacgacgggtagccgacctgagagggtgatcggccacactgggactgagacacggcccagactcctacgggaggcagcagtggggaatattgcacaatgggcgcaagcctgatgcagcgacgccgcgtgagggatgacggccttcgggttgtaaacctctttcaccagggacgaagcgnnagtgacggtacctggagaagaagcaccggccaactacgtgccagcagccgcggtaatacgtagggtgcgagcgttgtccggaattactgggcgtaaagagctcgtaggcggtttgtcgcgtcgtctgtgaaattctgcaactcaattgcaggcgtgcaggcgatacgggcagacttgagtactacaggggagactggaattcctggtgtagcggtgaaatgcgcagatatcaggaggaacaccggtggcgaaggcgggtctctgggtagtaactgacgctgaggagcgaaagcgtgggtagcgaacaggattagataccctggtagtccacgccgtaaacggtgggtactaggtgtgggttccttttcacgggatccgtgccgtagctaacgcattaagtaccccgcctggggagtacggccgcaaggctaaaactcaaaggaattgacgggggcccgcacaagcggcggagcatgtggattaattcgatgcaacgcgaagaaccttacctgggtttgacatacaccagacgcggctagagatagtcgttcccttgtggttggtgtacaggtggtgcatggctgtcgtcagctcgtgtcgtgagatgttgggttaagtcccgcaacgagcgcaacccttgtcctgtattgccagcgggttatgccggggacttgcaggagactgccggggtcaactcggaggaaggtggggatgacgtcaagtcatcatgccccttatgtccagggcttcacacatgctacaatggctggtacagagggctgcgataccgtgaggtggagcgaatcccttaaagccagtctcagttcggattggggtctgcaactcgaccccatgaagtcggagtcgctagtaatcgcagatcagcaacgctgcggtgaatacgttcccgggccttgtacacaccgcccgtcacgtcatgaaagtcggtaacacccgaagccggtggcctaaccccttgtgggagggagctgtcgaaggtgggatcggcgattgggacgaag

SEQ ID NO: 956 - DNA, 1497 bp, Gordonibacter pamelaeae; identical to SEQ ID NO: 680

SEQ ID NO: 957 - DNA, 1549 bp, Gracilibacter thermotolerans
cctaccatgcagtcgagcggagatttcttcggcactgaacattctagtagtatgacgcaaacaaagcgtcatgaagaaacaccattggtgtatatgataagataaaagtttcttcatcacgcgttaataaagtgccaacacaaacatcaagagaaattagagaaaagaatgtattagaatgttgagtgctgaagaaatcttagcggcggacgggtgagtaacacgtgggcaacctgcctcgaagagggggataacaccgagaaatcggtgctaataccgcataacatacacagaccgcatggtgagtgtatcaaaggagaaatccgctttgagatgggcccgcggctgattagctagttggtaaggtaacggcttaccaaggcgacgatcagtagccgacctgagagggtgaccggccacactggaactgagacacggtccagactcctacgggaggcagcagtggggaatattgcgcaatgggggaaaccctgacgcagcaacgccgcgtggaggaagaaggtcttcggattgtaaactcctgtcttctgggacgaagaatgacggtaccagaggaggaagccacggctaactacgtgccagcagccgcggtaatacgtaggtggcgagcgttgtccggaattactgggcgtaaagggcgcgtaggcggttttttaagtcagatgtgaaaacccagggcttaactctgggattgcatttgaaactggaaggcttgagtgcaggagaggtaagtggaattcctagtgtagcggtgaaatgcgtagatattaggaggaacaccagtggcgaaggcgacttactggactgtaactgacgctgaggcgcgaaagcgtggggagcaaacaggattagataccctggtagtccacgccgtaaacgatggatactaggtgtgggaggtgtcgaccccttccgtgccgcagtaaacgcaataagtatcccgcctggggagtacggccgcaaggttgaaactcaaaggaattgacgggggcccgcacaagcagcggagcatgtggtttaattcgaagcaacgcgaagaaccttaccaggacttgacatcccctgaattactcgtaacggaggaagtccttcgggacagggagacaggtggtgcatggttgtcgtcagctcgtgtcgtgagatgttgggttaagtcccgcaacgagcgcaacccctattgctagttgccatcattaagttgggcactctagtgagactgccggagacaattcggaggaaggtggggatgacgtcaaatcatcatgccccttatgttctgggctacacacgtgctacaatgggtgtaacaacgagaagcgagctagtgatagcaagccaacctctaaaaagcaccctcagttcggattgtaggctgaaacccgcctacatgaagttggagttgctagtaatcgcgaatcagcatgtcgcggtgaatacgttcccgggccttgtacacaccgcccgtcacaccatgggagttggaagcacccgaagccggtgacttaaccgcaaggagagagcctcgaag

SEQ ID NO: 958 - DNA, 1527 bp, Gramella forsetii
atgaagagtttgatcctggctcaggatgaacgctagcggcaggcctaacacatgcaagtcgaacggtaacagggattgcttgcaatccgctgacgagtggcgcacgggtgcgtaacgcgtatacaatctgcctttaagcggggaatagcccatggaaacgtggattaataccccatagtattatgatttcacctgggattataattaaacatttatggcttaaagatgagtatgcgtcctattagttagttggtaaggtaacggcttaccaagacagcgataggtaggggtcctgagagggagatcccccacactggtactgagacacggaccagactcctacgggaggcagcagtgaggaatattggacaatggaggcaactctgatccagccatgccgcgtgcaggaagacggccctatgggttgtaaactgcttttatacgggaagaaccacatctacgtgtagatgcttgacggtaccgtatgaataaggaccggctaactccgtgccagcagccgcggtaatacggagggtccaagcgttatccggaatcattgggtttaaagggtccgtaggcggaataataagtcagtggtgaaagtctgcagctcaactgtagaattgccattgatactgttgttcttgaattattatgaagtggttggaataagtagtgtagcggtgaaatgcatagatattacttagaacacctattgcgaaggcagatcactaataatatattgacgctgagggacgaaagcgtaggtagcgaacaggattagataccctggtagtctacgccgtaaacgatggttactagctgtccggcctaattgagggctgggtggttaagcgaaagtgataagtaacccacctggggagtacgttcgcaagaatgaaactcaaaggaattgacgggggcccgcacaagcggtggagcatgtggtttaattcgatgatacgcgaggaaccttaccagggcttaaatgcagtctgacaggtctggaaacagacttttcttcggacagattgcaaggtgctgcatggttgtcgtcagctcgtgccgtgaggtgtcaggttaagtcctataacgagcgcaacccctgtggttagttgccagcgagtaatgtcgggaactctagccagactgccggtgcaaaccgcgaggaaggtggggatgacgtcaaatcatcacggcccttacgtcctgggccacacacgtgctacaatggtagggacagagggcagctaccccgcgaggggatgcgaatcttcaaaccctatcacagttcggatcgcagtctgcaactcgactgcgtgaagctggaatcgctagtaatcgcatatcagccatgatgcggtgaatacgttcccgggccttgtacacaccgcccgtcaagccatggaagctgggggtacctgaagtccgtcaccgtaaggagcggcctagggtaaaactggtaactggggctaagtcgtaacaaggtagccgtaccggaaggtgcggctggaacacctcctttct

SEQ ID NO: 959 - DNA, 1548 bp, Granulicatella adiacens
atgagagtttgatcctggctcaggacgaacgctggcggcgtgcctaatacatgcaagtcgaacgagagcgaccggtgcttgcactggtcaatctagtggcgaacgggtgagtaacacgtgggtaacctgcccatcagagggggataacatccggaaacggatgctaaaaccgcataggtcttcgaaccgcatggtttgaagaggaaaagaggcgcaagcttctgctgatggatggacccgcggtgcattagctagttggtgaggtaacggctcaccaaggccgtgatgcatagccgacctgagagggtgatcggccacattgggactgagacacggcccaaactcctacgggaggcagcagtagggaatcttccgcaatggacgcaagtctgacggagcaacgccgcgtgagtgaagaaggttttcggatcgtaaaactctgttgttagagaagaacaagtgctagagtaactgttagcgccttgacggtatctaaccagaaagccacggctaactacgtgccagcagccgcggtaatacgtaggtggcaagcgttgtccggatttattgggcgtaaagcgagcgcaggcggttccttaagtctgatgtgaaagcccccggctcaaccggggagggtcattggaaactggggaacttgagtgcagaagaggagagtggaattccatgtgtagcggtgaaatgcgtagatatatggaggaacaccagtggcgaaggcgactctctggtctgtaactgacgctgaggctcgaaagcgtgggtagcaaacaggattagataccctggtagtccacgccgtaaacgatgagtgctaagtgttggagggtttccgcccttcagtgctgcagttaacgcattaagcactccgcctggggagtacgaccgcaaggttgaaactcaaaggaattgacggggacccgcacaagcggtggagcatgtggtttaattcgaagcaacgcgaagaaccttaccaagtcttgacatcctttgaccactctagagatagagctttcccttcggggacaaagtgacaggtggtgcatggttgtcgtcagctcgtgtcgtgagatgttgggttaagtcccgcaacgagcgcaacccttattactagttgccagcattcggttgggcactctagtgagactgccggtgacaaaccggaggaaggtggggatgacgtcaaatcatcatgccccttatgacttgggctacacacgtgctacaatggatggtacaacgagcagcgaactcgcgagggtaagcgaatctcttaaagccattctcagttcggattgtaggctgcaactcgcctacatgaagccggaatcgctagtaatcgcggatcagcacgccgcggtgaatacgttcccgggtcttgtacacaccgcccgtcacaccacgagagtttgtaacacccaaagtcggtgaggtaaccatttggagccagccgcctaaggtgggatagatgattggggtgaagtcgtaacaaggtagccgtatcggaaggtgcggctggatcacctcctttct

SEQ ID NO: 960 - DNA, 1227 bp, Granulicatella elegans
gtcgaacgagtggcgaacgggtgagtaacacgtgggtaacctgcccatcagagggggataacattcggaaacggatgctaaaaccgcatagggaaaactgctgatggatggacccgcggtgcattagctagttggtgaggtaacggctcaccaaggccgtgatgcatagccgacctgagagggtgatcggccacattgggactgagacacggcccaaactcctacgggaggcagcagtagggaatcttccgcaatggacgcaagtctgacggagcaacgccgcgtgagtgaagaaggatttcggttcgtaaaactctgttgttagagaagatgacggtatctaaccagaaagccacggctaactacgtgccagcagccgcggtaatacgtaggtggcaagcgttgtccggatttattgggcgtaaagcgagcgcaggcggtcaattaagtctgatgtgaaagcccccggctcaaccggggagggtcattggaaactggttgacttgagtgcagaagaggagagtggaattccatgtgtagcggtgaaatgcgtagatatatggaggaacaccagtggcgaaggcgactctctggtctgactgacgctgaggctcgaaagcgtgggtagcaaacaggattagataccctggtagtccacgccgtaaacgatgagtgctaagtgttggagcttcagtgctgcagttaacgcattaagcactccgcctggggagtacgaccgcaaggttgaaactcaaaggaattgacggggacccgcacaagcggtggagcatgtggtttaattcgaagcaacgcgaagaaccttaccaagtcttgacatcgacaggtggtgcatggttgtcgtcagctcgtgtcgtgagatgttgggttaagtcccgcaacgagcgcaacccttattactagttgccagcatgggcactctagtgagactgccggtgacaaaccggaggaaggtggggatgacgtcaaatcatcatgccccttatgacttgggctacacacgtgctacaatggatggcaacgagcagcgaactcgcgagggtaagcgaatctcttccattctcagttcggatgtaggctgcaactcgcctacagaagccggaatcgctagtaatcgcggatcagcacgccgcggtgaatacgttcccgggtcttgtacacaccgcccgtcacaccacgagagtttgtaacacccaaagtcggtaggta

SEQ ID NO: 961 - DNA, 1512 bp, Granulicatella paradiacens
agtttgatcatggctcaggacgaacgctggcggcgtgcctaatacatgcaagtcgaacgagagcgaccggtgcttgcactggtcaatctagtggcgaacgggtgagtaacacgtgggtaacctgcccatcagagggggataacattcggaaacggatgctaaaaccgcataggtcttcgaaccgcatggtttgaagaggaaaagaggcgcaagcttctgctgatggatggacccgcggtgcattagctagttggtgaggtaacggctcaccaaggccgtgatgcatagccgacctgagagggtgatcggccacattgggactgagacacggcccaaactcctacgggaggcagcagtagggaatcttccgcaatggacgcaagtctgacggagcaacgccgcgtgagtgaagaaggttttcggatcgtaaaactctgttgttagagaagaacaagtgctagagtaactgttagcgccttgacggtatctaaccagaaagccacggctaactacgtgccagcagccgcggtaatacgtaggtggcaagcgttgtccggatttattgggcgtaaagcgagcgcaggcggttccttaagtctgatgtgaaagcccccggctcaaccggggagggtcattggaaactggggaacttgagtgcagaagaggagagtggaattccatgtgtagcggtgaaatgcgtagatatatggaggaacaccagtggcgaaggcgactctctggtctgtaactgacgctgaggctcgaaagcgtgggtagcaaacaggattagataccctggtagtccacgccgtaaacgatgagtgctaagtgttggagggtttccgcccttcagtgctgcagttaacgcattaagcactccgcctggggagtacgaccgcaaggttgaaactcaaaggaattgacggggacccgcacaagcggtggagcatgtggtttaattcgaagcaacgcgaagaaccttaccaagtcttgacatcctttgaccactctagagatagagctttcccttcggggacaaagtgacaggtggtgcatggttgtcgtcagctcgtgtcgtgagatgttgggttaagtcccgcaacgagcgcaacccttattactagttgccagcattgagttgggcactctagtgagactgccggtgacaaaccggaggaaggtggggatgacgtcaaatcatcatgccccttatgacttgggctacacacgtgctacaatggatggtacaacgagcagcgaactcgcgagggtaagcgaatctcttaaagccattctcagttcggattgtaggctgcaactcgcctacatgaagccggaatcgctagtaatcgcggatcagcacgccgcggtgaatacgttcccgggtcttgtacacaccgcccgtcacaccacgagagtttgtaacacccaaagtcggtgaggtaaccttttggagccagccgcctaaggtgggatagatgattggggtgaagtcgtaacaaggtagccgta

SEQ ID NO: 962 - DNA, 1445 bp, Granulicatella sp.
  M658/99/3
  modified_base (73)..(73): a, c, t, g, unknown or other
  modified_base (180)..(180): a, c, t, g, unknown or other
acgctggcggcgtgcctaatacatgcaagtcgaacgcagtttcattcaccgagtgcttgcactcaccgaatgnactgagtggcgaacgggtgagtaacacgtgggtaacctgcccatcagtgggggataacagtcggaaacgactgctaataccgcatgattttcaacaccgcatggtgntgaaataaaagacggctttgctgtcgctgatggatggacccgcggcgtattagctagttggtgaggtaacggctcaccaaggcaatgatacgtagccggcctgagagggtaatcggccacattgggactgagacacggcccaaactcctacgggaggcagcagtagggaatcttccgcaatggacgaaagtctgacggagcaacgccgcgtgagtgaagaaggttttcggatcgtaaaactctgttgttagagaagaacaacctcttgagtaactgtaagaggtctgacggtatctaaccagaaagccacggctaactacgtgccagcagccgcggtaatacgtaggtggcaagcgttgtccggatttattgggcgtaaagcgagtgcaggcggttccttaagtctgatgtgaaagcccacggcttaaccgtggagggtcattggaaactggggaacttgagtgcagaagaggagagtggaattccatgtgtagcggtggaatgcgtagatatatggaggaacaccagtggcgaaggcgactctctggtctgtaactgacgctgaggctcgaaagcgtgggtagcaaacaggattagataccctggtagtccacgccgtaaacgatgagtgctaggtgttggagggtttccgcccttcagtgccgcagttaacgcattaagcactccgcctggggagtacggccgcaaggctgaaactcaaaggaattgacggggacccgcacaagcggtggagcatgtggtttaattcgaagcaacgcgaagaaccttaccaagtcttgacatcctttgaccactctagagatagagctttcccttcggggacaaagtgacaggtggtgcatggttgtcgtcagctcgtgtcgtgagatgttgggttaagtcccgcaacgagcgcaacccttatcattagttgccagcattcagttgggcactctagtgatactgccggtgacaaaccggaggaaggtggggatgacgtcaaatcagcatgccccttatgacttgggctacacacgtgctacaatggatggtacaacgagcagcaaacccgcgagggcaagcgaatctcttaaagccattctcagttcggattgttctctgcaactcgagaacatgaagccggaatcgctagtaatcgcggatcagcacgccgcggtgaatacgttcccgggtcttgtacacaccgcccgtcacaccacgagagtttgtaacacccaaagtcggtgaggtaacccttctgggag

SEQ ID NO: 963 - DNA, 1510 bp, Granulicatella sp.
  oral clone ASC02
  modified_base (743)..(743): a, c, t, g, unknown or other
  modified_base (902)..(902): a, c, t, g, unknown or other
  modified_base (998)..(998): a, c, t, g, unknown or other
  modified_base (1013)..(1013): a, c, t, g, unknown or other
gagagtttgattctggctcaggatgaacgctgacagaatgcttaacacatgcaagtctacttgaacttcggtttgggtggcggacgggtgagtaacgcgtaaagaacttgcctcacagttagggacaacatttggaaacgaatgctaatacctgatattatgattttagggcatcctaagattatgaaagctatatacgctgtgagagagctttgcgtcccattagctagttggagaggtaacggctcaccaaggcgatgatgggtagccggcctgagagggtgaacggccacaaggggactgagacacggcccttactcctacgggaggcagcagtggggaatattggacaatggaccaaaagtctgatccagcaattctgtgtgcacgatgacgtttttcggaatgtaaagtgctttcagttgggaagaaaaaaatgacggtaccaacagaagaagtgacggctaactacgtgccagcagccgcggtaatacgtatgtggcaagcgttgtccggatttattgggcgtaaagcgagcgcaggcggtcaattaagtctgatgtgaaagcccccggctcaaccggggagggtcattggaaactggttgacttgagtgcagaagaggagagtggaattccatgtgtaagcggtgaaatgcgtagatatatggaggaacaccagtggcgaaggcgactctctggtctgtaactgaccgctgagcgctcgaaagcgtgggtagcaanacaggattagatacccctggtagtccacgccgtaaacgatgagtgctaagtgttggagggtttccgcccttcagtgctgcagttaccgcattaagcactccgcctggggagtacgaccgccaaggttgaaactcaaaggaattgagcggggacccgcancaagcggtggagcatgtggtttaattcgaagcaacgcgaagaaccttaccaagtcttgacatcctttgaccactctagagatagagctttcccttncggggacaaagtgancaggtggtgcatggttgtcgtcagctcgtgtcgtgagatgttgggttaagtcccgcaacgagcgcaacccttattactagttgccagcattgagttgggcactctagtgagactgccggtgacaaaccggaggaaggtggggatgacgtcaaatcatcatgccccttatgacttgggctacacacgtgctacaatggatggtacaacgagcagcgaactcgcgagggtaagcgaatctcttaaagccattctcagttcggattgtaggctgcaactcgcctacatgaagccggaatcgctagtaatcgcggatcagcacgccgcggtgaatacgttcccgggtcttgtacacaccgcccgtcacaccacgagagtttgtaacacccaaagtcggtgaggtaaccttaaggagccagccgcctaaggtgggatagatgattggggtgaagtcgtaacaaggtagccgtatcggaaggtgcggctggaacacctccttc

SEQ ID NO: 964 - DNA, 1327 bp, Granulicatella sp.
  oral clone ASCA05
  modified_base (136)..(136): a, c, t, g, unknown or other
  modified_base (159)..(160): a, c, t, g, unknown or other
  modified_base (427)..(427): a, c, t, g, unknown or other
  modified_base (702)..(702): a, c, t, g, unknown or other
tggcggcgtgcctaatacatgcaagtcgaacgagtggcgaacgggtgagtaacacgtgggtaacctgcccatcagagggggataacattcggaaacggatgctaaaaccgcatagggaaaactgctgatggatggntccgcggtgcattagctagttgnngaggtaacggctcaccaaggcgatgatgcatagccgacctgagagggtgatcggccacattgggactgagacacggcccaaactcctacgggaggcagcagtagggaatcttccgcaatggacgcaagtctgacggagcccgccgtttgagtgaagaaggatttcggttcgtaaaactctgttgttagagaccatgacggtatctaaccagaaagccacggctaactacgcgccagcagccgcggtaatacgtaggtggcaagcgtngtccggatttattgggcgtaaagcgagcgcaggcggtcaattaagtctgatgtgaaagcccccggctcaaccggggagggtcattggaaactggttgacttgagtgcagaagaggagagtggaattccatgtgtagcggtgaaatgcgtagatatatggaggaacaccagtggcgaaggcgactctctggtctgactgacgctgaggctcgaaagcgtgggtagcaaacaggattagataccctggtagtccacgccgtaaacgatgagtgctanatgttggagctacagtgctgcagttaacgcattaagcactccgcctggggagtacgaccgcaaggttgaaactcaaaggaattgacggggacccgcacaagcggtggagcatgtggtttaattcgaagcaacgcgaagaaccttaccaagtcttgacatcgacaggtggtgcatggttgtcgtcagctcgtgtcgtgagatgttggttaagtccgcaacgagcgcaacccttattactagttgccagcatgggcactctagtgagactgccggtgacaaaccggaggaaggtggggatgacgtcaaatcatcatgccccttatgacttgggctacacacgtgctacaatggatggcaacgagcagcgaactcgcgagggtaagcgaatctcttccattctcagttcggatgtaggctgcaactcgcctacagaagccggaatcgctagtaatcgcggatcagcacgccgcggtgaatacgttcccgggtcttgtacacaccgcccgtcacaccacgagagtttgtaacacccaaagtcggtaggtagccagccgcctaaggtgggatagatgattggggtgaagtcgtaacaaggtagccgtatcggaaggtgcggctggaacac

SEQ ID NO: 965 - DNA, 1560 bp, Granulicatella sp.
  oral clone ASCB09
  modified_base (887)..(887): a, c, t, g, unknown or other
  modified_base (907)..(907): a, c, t, g, unknown or other
  modified_base (993)..(993): a, c, t, g, unknown or other
  modified_base (1055)..(1055): a, c, t, g, unknown or other
gagagtttgatcatggctcaggacgaacgctggcggcgtgcctaatacatgcaagtcgaacgagaagcgaccggtgcttgcactggtcaatctagtggcgaacgggtgagtaacacgtgggtaacctgcccatcagagggggataacattcggaaacggatgctaaaaccgcataggttctttagtcgcatgactgaagaaggaaaagaggcttcggcttctgctgatggatggacccgcggtgcattagctagttggtgaggtaacggctcaccaaggcgatgatgcatagccgacctgagagggtgatcggccacattgggactgagacacggcccaaactcctacgggaggcagcagtagggaatcttccgcaatggacgcaagtctgacggagcaacgccgcgtgagtgaagaaggatttcggttcgtaaaacttctgttgttagagaagaacagcgcatagagtaactgttatgcgtgtgacggtatctaaccagaaagccacggctaactacgtgccagcagccgcggtaatacgtaggtggcaagcgttgtccggatttattgggcgtaaagcgagcgcaggcggtcaattaagtctgatgtgaaagcccccggctcaaccggggagggtcattggaaactggttgacttgagtgcagaagaggagagtggaattccatgtgtagcggtgaaatgcgtagatatatggaggaacaccagtggcgaaggcgactctctggtctgtaactgacgctgaggctcgaaagcgtgggtagcaaacaggattagatacccctggtagtccacgccgtaaacgatgagtgctaagtgttggagggtttccgcccttcagtgctgcagttaacgcattaagcactccngcctgggtgagtacgaccgncaaggttgaaactcaaaggaattgacggggacccgcacaagcggtggagcatgtggtttaattcgaagcaacgcgaagaaccttanccaagtcttgacatcctttgaccactctagagatagagctttcccttcggggacaaagtgancaggtggtgcatggttgtcgtcagctcgtgtcgtgagatgttgggttaagtcccgcaacgagcagcaaaccacattattactagttgccagcattgagttgggcactctagcgagactgccaggtaacaaacccggaggaaggtggggatgacagtcaaatcatcatgccccttatgacctgggctacacacgtgctacaatggctggtacaacgagttgcaagtcggtgacggcaagctaatctcttaaagccagtctcagttcggattgtaggctgcaactcgcctacatgaagtcggaatcgctagtaatcgcggatcagcacgccgcggtgaatacgttcccgggccttgtacacaccgcccgtcacaccacgagagtttgtaacacccgaagtcggtgaggtaaccttttaggagccagccgcctaaggtgggatagatgattggggtgaagtcgtaacaaggtagccgtatcggaaggtgcggttggaacacctccttc

SEQ ID NO: 966 - DNA, 1331 bp, Granulicatella sp.
  oral clone ASCG05
  modified_base (1154)..(1154): a, c, t, g, unknown or other
gcgtgcctaatacatgcaagtcgaacgagtggcgaacgggtgagtaacacgtgggtaacctgcccatcagagggggataacattcggaaacggatgctaaaaccgcatagggaaaactgctgatggatggacccgcggtgcattagctagttggtgaggtaacggctcaccaaggccgtgatgcatagccgacctgagagggtgatcggccacattgggactgagacacggcccaaactcctacgggaggcagcagtagggaatcttccgcaatggacgcaagtctgacggagcaacgccgcgtgagtgaagaaggttttcggatcgtaaaactctgttgttagagaagatgacggtatctaaccagaaagccacggctaactacgtgccagcagccgcggtaatacgtaggtggcaagcgttgtccggatttattgggcgtaaagcgagcgcaggcggttccttaagtctgatgtgaaagcccccggctcaaccggggagggtcattggaaactggggaacttgagtgcagaagaggagagtggaattccatgtgtagcggtgaaatgcgtagatatatggaggaacaccagtggcgaaggcgactctctggtctgactgacgctgaggctcgaaagcgtgggtagcaaacaggattagataccctggtagtccacgccgtaaacgatgagtgctaagtgttggagcttcagtgcttcagttaacgcattaagcactccgcctggggagtacgaccgcaaggttgaaactcaaaggaattgacggggacccgcacaagcggtggagcatgtggtttaattcgaagcaacgcgaagaaccttaccaagtcttgacatcgacaggtggtgcatggttgtcgtcagctcgtgtcgtgagatgttgggttaagtcccgcggcgagcgcaacccttattactagttgccagcatgggcactctagtgagactgccggtgacaaaccggaggaaggtggggatgacgtcaaatcatcatgccccttatgacttgggctacacacgtgctacaatggatggcaacgagcagcgaactcgcgagggtaagcgaatctcttccattctcagttcggatgtaggctgcaactcgcctacagaagccggaatcgctagtaatcncggatcagcacgccgcggtgaatacgttcccgggtcttgtacacaccgcccgtcacaccacgagagtttgtaacacccaaagtcggtaggtagccagccgcctaaggtgggatagatgattggggtgaagtcgtaacaaggtagccgtatcggaaggtgcggctggaacacctcctt

SEQ ID NO: 967 - DNA, 1488 bp, Grimontia hollisae
ctaattgaagagtttgatcatggctcagattgaacgctggcggcaggcctaacacatgcaagtcgagcggcagcgacatgaacaatccttcgggtgcgttcatgggcggcgagcggcggacgggtgagtaaaggctgggaacctgccctgacgagggggataaccactggaaacggtggctaataccgcataatgtcttcggaccaaagagggggactttcgggcctctcgcgtcaggatgggcccagttgggattagctggttggtggggtaaaggctcaccaaggcgacgatccctagctggtttgagaggatgatcagccacactggaactgagacacggtccagactcctacgggaggcagcagtggggaatattgcacaatgggcgcaagcctgatgcagccatgccgcgtgtgtgaagaaggccttcgggttgtaaagcactttcagccgtgaggaaggtagcgtagttaatacctgcgttacttgacgttagcggcagaagaagcaccggctaactccgtgccagcagccgcggtaatacggagggtgcgagcgttaatcggaattactgggcgtaaagcgcatgcaggcggtctgttaagcaagatgtgaaagccccgggcttaacctgggagtggcattttgaactggcaggctagagtcttgtagaggggggtagaatttcaggtgtagcggtgaaatgcgtagagatctgaaggaataccggtggcgaaggcggccccctggacaaagactgacgctcagatgcgaaagcgtggggagcaaacaggattagataccctggtagtccacgctgtaaacgatgtctacttggaggctgtggtctagaaccgtggctttcggagctaacgcgttaagtagaccgcctggggagtacggtcgcaagattaaaactcaaatgaattgacgggggcccgcacaagcggtggagcatgtggtttaattcgatgcaacgcgaagaaccttacctactcttgacatcctcagaagccggaagagattctggtgtgccttcgggaactgagagacaggtgctgcatggctgtcgtcagctcgtgttgtgaaatgttgggttaagtcccgcaacgagcgcaacccttatccttgtttgccagcacttcgggtgggaactccagggagactgccggtgataaaccggaggaaggtggggacgacgtcaagtcatcatggcccttacgagtagggctacacacgtgctacaatggtgcatacagagggcagcgagaccgcgaggtggagcgaatcccagaaagtgcatcgtagtccggattggagtctgcaactcgactccatgaagtcggaatcgctagtaatcgtggatcagaatgccacggtgaatacgttcccgggccttgtacacaccgcccgtcacaccatgggagtgggctgcaccagaagtagatagcttaaccttcgggagggcgtttaccacggtgtggt

SEQ ID NO: 968 - DNA, 1425 bp, Haematobacter sp.
  BC14248
cgaacgctggcggcaggcctaacacatgcaagtcgagcggggacttcggtcctagcggcggacgggtgagtaacgcgtgggaacgtgccctttgcttcggaatagccccgggaaactgggagtaataccggatgagccctttgggggaaagatttatcggcgaaggatcggcccgcgttggattaggtagttggtggggtaatggcctaccaagccgacgatccatagctggtttgagaggatgatcagccacactgggactgagacacggcccagactcctacgggaggcagcagtggggaatcttagacaatgggggaaaccctgatctagccatgccgcgtgagcgatgaaggccttagggttgtaaagctctttcaccggggaagataatgacggtacccggagaagaagccccggctaactccgtgctagcagccgcggtaatacggagggggctagcgttgttcggaattactgggcgtaaagcgcacgtaggcggatcggtaagtcagaggtgaaatcccggggctcaaccccggaactgcctttgaaactcccggtcttgaggtcgagagaggtgagtggaattccgagtgtagaggtgaaattcgtagatattcggaggaacaccagtggcgaaggcggctcactggctcgatactgacgctgaggtgcgaaagcgtggggagcaaacaggattagataccctggtagtccacgccgtaaacgatgaatgccagtcgtcgggtagcatgctattcggtgacacacctaacggattaagcattccgcctggggagtacggccgcaaggttaaaactcaaaggaattgacgggggcccgcacaagcggtggagcatgtggtttaattcgaagcaacgcgcagaaccttaccaacccttgacatgggcgtcgcgggaccagagatggttctttcagttcggctggacgccacacaggtgctgcatggctgtcgtcagctcgtgtcgtgagatgttcggttaagtccggcaacgagcgcaacccacactcccagttgccatcattcagttgggcactctgggagaactgccgatgataagtcggaggaaggtgtggatgacgtcaagtcctcatggcccttacgggttgggctacacacgtgctacaatggtggtgacaatgggttaatccccaaaagccatctcagttcggattggggtctgcaactcgaccccatgaagtcggaatcgctagtaatcgcgtaacagcatgacgcggtgaatacgttcccgggccttgtacacaccgcccgtcacaccatgggaattgggtctacccgacgacggtgcgccaacctcgcaagaggaagcagccggccacggtaggctcagtgactggggggaagtcgtaacaaggtggccgtaggggaacctgcggttg

SEQ ID NO: 969 - DNA, 1543 bp, Haemophilus aegyptius
ttgaattgaagagtttgatcatggctcagattgaacgctggcggcaggcttaacacatgcaagtcgaacggtagcaggagaaagcttgctttcttgctgacgagtggcggacgggtgagtaatgcttgggaatctggcttatggagggggataacgacgggaaactgtcgctaataccgcgtagtgtcgagagacgaaagtgcgggactgagaggccgcatgccataggatgagcccaagtgggattaggtagttggtggggtaaaggtctaccaagcctgcgatctctagctggtctgagaggatgaccagccacactggaactgagacacggtccagactcctacgggaggcagcagtggggaatattgcgcaatggggggaaccctgacgcagccatgccgcgtgaatgaagaaggccttcgggttgtaaagttctttcggtattgaggaaggttgatgtgttaatagcacatcaaattgacgttaaatacagaagaagcaccggctaactccgtgccagcagccgcggtaatacggagggtgcgagcgttaatcggaataactgggcgtaaagggcacgcaggcggttatttaagtgaggtgtgaaagccctgggcttaacctaggaattgcatttcagactgggtaactagagtactttagggaggggtagaattccacgtgtagcggtgaaatgcgtagagatgtggaggaataccgaaggcgaaggcagccccttgggaatgtactgacgctcatgtgcgaaagcgtggggagcaaacaggattagataccctggtagtccacgctgtaaacgctgtcgatttgggggttggggtttaactctggcgcccgtagctaacgtgataaatcgaccgcctggggagtacggccgcaaggttaaaactcaaatgaattgacgggggcccgcacaagcggtggagcatgtggtttaattcgatgcaacgcgaagaaccttacctactcttgacatcctaagaagagctcagagatgagcttgtgccttcgggaacttagagacaggtgctgcatggctgtcgtcagctcgtgttgtgaaatgttgggttaagtcccgcaacgagcgcaacccttatcctttgttgccagcgacttggtcgggaactcaaaggagactgccagtgataaactggaggaaggtggggatgacgtcaagtcatcatggcccttacgagtagggctacacacgtgctacaatggcgtatacagagggaagcgaagctgcgaggtggagcgaatctcataaagtacgtctaagtccggattggagtctgcaactcgactccatgaagtcggaatcgctagtaatcgcgaatcagaatgtcgcggtgaatacgttcccgggccttgtacacaccgcccgtcacaccatgggagtgggttgtaccagaagtagatagcttaaccttttggagggcgtttaccacggtatgattcatgactggggtgaagtcgtaacaaggtaaccgtaggggaacctgcggttggatcacctccttac

SEQ ID NO: 970 - DNA, 1544 bp, Haemophilus ducreyi
ttaaattgaagagtttgatcatggctcagattgaacgctggcggcaggcttaacacatgcaagtcgaacggtagcacgaaggggcttgctccttgggtgacgagtggcggacgggtgagtaatgcttgggaatctggcttatggagggggataactacgggaaactgtagctaataccgcgtaatatcttcggattaaagggtgggaccttcgggccacctgccataagatgagcccaagtgggattaggtagttggttaggtaaaggctgaccaagccgacgatctctagctggtctgagaggatgaccagccacactggaactgagacacggtccagactcctacgggaggcagcagtggggaatattgcacaatgggggaaaccctgatgcagccatgccgcgtgaatgaagaaggccttcgggttgtaaagttctttcggtgatgaggaaggcagttttgttaatagcaaaattgattgacgttagtcacagaagaagcaccggctaactccgtgccagcagccgcggtaatacggagggtgcgagcgttaatcggaataactgggcgtaaagggcacgcaggcggttgattaagtgagatgtgaaagccccgggcttaacctgggaattgcatttcatactggtcaactagagtactttagggaggggtagaattccacgtgtagcggtgaaatgcgtagagatgtggaggaataccgaaggcgaaggcagccccttgggaatatactgacgctcatgtgcgaaagcgtggggagcaaacaggattagataccctggtagtccacgctgtaaacgatgtcgatttgggggttggtctttaagactggcgcccgaagctaacgtgataaatcgaccgcctggggagtacggccgcaaggttaaaactcaaatgaattgacgggggcccgcacaagcggtggagcatgtggtttaattcgatgcaacgcgaagaaccttacctactcttgacatccatagaagaactcagagatgagtttgtgccttcgggaactatgtgacaggtgctgcatggctgtcgtcagctcgtgttgtgaaatgttgggttaagtcccgcaacgagcgcaacccttatcctttgttgccagcatgtagtgatgggaactcaaaggagactgccagtgataaactggaggaaggtggggatgacgtcaagtcatcatggcccttacgagtagggctacacacgtgctacaatggcgtatacagagggcggcaaacctgcaaaggggagcgaatctcacaaagtacgtctaagtccggattggagtctgcaactcgactccatgaagtcggaatcgctagtaatcgcaaatcagaatgttgcggtgaatacgttcccgggccttgtacacaccgcccgtcacaccatgggagtgggttgtaccagaagtagatagcttaaccttcgggagggcgtttaccacggtatgattcatgactggggtgaagtcgtaacaaggtaaccgtaggggaacctgcggttggatcacctccttac

SEQ ID NO: 971 - DNA, 1281 bp, Haemophilus sp.
  P2 oral clone MB3_C24
caggcttaacacatgcaagtcgaacgagtggcggacgggtgagtaatgcttgggaatctggcttatggagggggataacgacgggaaactatcgctaataccgcgtagtgaaagatgccataggatgagcccaagtgggattaggtagttggtggggtaaaggcctaccaagccgacgatctctagctggtctgagaggatgaccagccacaccgggactgagacacggcccggactcctacgggaggcagcagtggggaatattgcgcaatgggggcaaccctgacgcagccatgccgcgtgaatgaagaaggccttcgggttgtaaagttctttcggtgacgaggatgacgttaatcacagaagaagcaccggctaactccgtgccagcagccgcggtaatacggaggatgcgagcgttaatcggaataactgggcgtaaagggcacgcaggcggctatttaagtgaggtgtgaaatccccgggcttaacctgggaattgcatttcagactgggtagctagagtactttagggaggggtagaattccacgtgtagcggtgaaatgcgtagagatgtggaggaataccgaaggcgaaggcagccccttgggaatactgacgctcatgtgcgaaagcgtggggagcaaacaggattagataccctggtagtccacgctgtaaacgctgtcgatttggggattgggcttggtgcccgaagctaacgtgataaatcgaccgcctggggagtacggccgcaacgttaaaactcaaatgaattgacgggggcccgcacaagcggtggagcatgtggtttaattcgatgcaacgcgaagaaccttacctactcttgacatcgacaggtgctgcatggctgtcgtcagctcgtgttgtgaaatgttgggttaagtcccgcaacgagcgcaacccttatcctttgttgccagcgatcgggaactcaaaggagactgccggtgataaaccggaggaaggtggggatgacgtcaagtcatcatggcccttacgagtagggctacacacgtgctacaatggcgtacagagggcgacgaagccgcgaggtggagtgaatctcactacgtctaagtccggatggagtctgcaactcgactccagaagtcggaatcgctagtaatcgcgaatcagaatgtcgcggtgaatacgttcccgggccttgtacacaccgcccgtcacaccatgggagtgggttgtaccagaagtagatgcttagggcgtttaccacggtatgattcatgactggggtg

SEQ ID NO: 972 - DNA, 1296 bp, Haemophilus sp.
  P3 oral clone MB3_C38
attgaacgctggcggcaggcttaacacatgcaagtcgaacgagtggcggacgggtgagtaatgcttgggaatctggcttatggagggggataacgacgggaaactgtcgctaataccgcgtagagaaagatgccataggatgagcccaagtgggattaggtagttggtggggtaatagcctaccaagccgacgatctctagctggtctgagaggatgaccagccacaccgggactgagacacggcccggactcctacgggaggcagcagtggggaatattgcgcaatgggggcaaccctgacgcagccatgccgcgtgaatgaagaaggccttcgggttgtaaagttctttcggtattgaggatgacgttaaatacagaagaagcaccggctaactccgtgccagcagccgcggtaatacggagggtgcgagcgttaatcggaataactgggcgtaaagggcacgcaggcggacttttaagtgaggtgtgaaatccccgggcttaacctgggaattgcatttcagactgggagtctagagtactttagggaggggtagaattccacgtgtagcggtgaaatgcgtagagatgtggaggaataccgaaggcgaaggcagccccttgggaatactgacgctcatgtgcgaaagcgtggggagcaaacaggattagataccctggtagtccacgctgtaaacgctgtcgatttggggattgggcttggtgcccgaagctaacgtgataaatcgaccgcctggggagtacggccgcaaggttaaaactcaaatgaattgacgggggcccgcacaagcggtggagcatgtggtttaattcgatgcaacgcgaagaaccttacctactcttgacatcgacaggtgctgcatggctgtcgtcagctcgtgttgtgaaatgttgggttaagtcccgcaacgagcgcaacccttatcctttgttgccagcgatcgggaactcaaaggagactgccggtgataaaccggaggaaggtggggatgacgtcaagtcatcatggcccttacgagtagggctacacacgtgctacaatggcgtacagagggcgacgaagccgcgaggtggagtgaatctcactacgtctaagtccggatggagtctgcaactcgactccagaagtcggaatcgctagtaatcgcgaatcagaatgtcgcggtgaatacgttcccgggccttgtacacaccgcccgtcacaccatgggagtgggttgtaccagaagtagatgcttagggcgtttaccacggtatgattcatgactggggtg

SEQ ID NO: 973 - DNA, 1486 bp, Haemophilus haemolyticus
gctcagattgaacgctggcggcaggcttaacacatgcaagtcgaacggtagcaggagaaagcttgctttcttgctgacgagtggcggacgggtgagtaatgcttgggaatctggcttatggagggggataactacgggaaactgtagctaataccgcgtagtgtcgagagacgaaagtgcgggaccgcaaggccgcatgccatgagatgagcccaagtgggattaggtagttggtggggtaaaggcctaccaagcctgcgatctctagctggtctgagaggatggccagccacactggaactgagacacggtccagactcctacgggaggcagcagtggggaatattgcgcaatggggggaaccctgacgcagccatgccgcgtgaatgaagaaggccttcgggttgtaaagttctttcggtattgaggaaggagtgtatgttaatagcatacattattgacgttaaatacagaagaagcaccggctaactccgtgccagcagccgcggtaatacggagggtgcgagcgttaatcggaataactgggcgtaaagggcacgcaggcggttatttaagtgaggtgtgaaagccccgggcttaacctgggaattgcatttcagactgggtaactagagtactttagggaggggtagaattccacgtgtagcggtgaaatgcgtagagatgtggaggaataccgaaggcgaaggcagccccttgggaatgtactgacgctcatgtgcgaaagcgtggggagcaaacaggattagataccctggtagtccacgctgtaaacgctgtcgatttggggattgggcttaaagcttggtgcccgtagctaacgtgataaatcgaccgcctggggagtacggccgcaaggttaaaactcaaatgaattgacgggggcccgcacaagcggtggagcatgtggtttaattcgatgcaacgcgaagaaccttacctactcttgacatccatggaattctgtagagatacgggagtgccttcgggaaccatgagacaggtgctgcatggctgtcgtcagctcgtgttgtgaaatgttgggttaagtcccgcaacgagcgcaacccttatcctttgttgccagcgattcggtcgggaactcaaaggagactgccagtgataaactggaggaaggtggggatgacgtcaagtcatcatggcccttacgagtagggctacacacgtgctacaatggcgtatacagagggtggcgaaactgcgaggtggagcgaatctcagaaagtacgtctaagtccggattggagtctgcaactcgactccatgaagtcggaatcgctagtaatcgcgaatcagaatgtcgcggtgaatacgttcccgggccttgtacacaccgcccgtcacaccatgggagtgggttgtaccagaagtagatagcttaaccgcaaggggggcgtttaccacggtatgattcatgactggggtgaagtcgtaacaaggtaac

SEQ ID NO: 974 - DNA, 1544 bp, Haemophilus influenzae
ttgaattgaagagtttgatcatggctcagattgaacgctggcggcaggcttaacacatgcaagtcgaacggtagcaggagaaagcttgctttcttgctgacgagtggcggacgggtgagtaatgcttgggaatctggcttatggagggggataacgacgggaaactgtcgctaataccgcgtattatcggaagatgaaagtgcgggactgagaggccgcatgccataggatgagcccaagtgggattaggtagttggtggggtaaatgcctaccaagcctgcgatctctagctggtctgagaggatgaccagccacactggaactgagacacggtccagactcctacgggaggcagcagtggggaatattgcgcaatggggggaaccctgacgcagccatgccgcgtgaatgaagaaggccttcgggttgtaaagttctttcggtattgaggaaggttgatgtgttaatagcacatcaaattgacgttaaatacagaagaagcaccggctaactccgtgccagcagccgcggtaatacggagggtgcgagcgttaatcggaataactgggcgtaaagggcacgcaggcggttatttaagtgaggtgtgaaagccctgggcttaacctaggaattgcatttcagactgggtaactagagtactttagggaggggtagaattccacgtgtagcggtgaaatgcgtagagatgtggaggaataccgaaggcgaaggcagccccttgggaatgtactgacgctcatgtgcgaaagcgtggggagcaaacaggattagataccctggtagtccacgctgtaaacgctgtcgatttggggattgggcttagagcttggtgcccgtagctaacgtgataaatcgaccgcctggggagtacggccgcaaggttaaaactcaaatgaattgacgggggcccgcacaagcggtggagcatgtggtttaattcgatgcaacgcgaagaaccttacctactcttgacatcctaagaagagctcagagatgagcttgtgccttcgggaacttagagacaggtgctgcatggctgtcgtcagctcgtgttgtgaaatgttgggttaagtcccgcaacgagcgcaacccttatcctttgttgccagcgacttggtcgggaactcaaaggagactgccagtgataaactggaggaaggtggggatgacgtcaagtcatcatggcccttacgagtagggctacacacgtgctacaatggcgtatacagagggaagcgaagctgcgaggtggagcgaatctcataaagtacgtctaagtccggattggagtctgcaactcgactccatgaagtcggaatcgctagtaatcgcgaatcagaatgtcgcggtgaatacgttcccgggccttgtacacaccgcccgtcacaccatgggagtgggttgtaccagaagtagatagcttaaccttttggagggcgtttaccacggtatgattcatgactggggtgaagtcgtaacaaggtaaccgtaggggaacctgcggttggatcacctccttact

SEQ ID NO: 975 - DNA, 1424 bp, Haemophilus parahaemolyticus
cccaatgcaagtcgaacggtaacagggattagcttgctaatttgctgacgagtggcggacgggtgagtaatgcttgggaatctggcttatggagggggataactacgggaaactgtagctaataccgcgtaaaatcttcggattaaagggtgggactttcgggccacctgccataagatgagcccaagtgggattaggtagttggttaggtaaaggctgaccaagccgacgatctctagctggtctgagaggatgaccagccacactggaactgagacacggtccagactcctacgggaggcagcagtggggaatattgcacaatggggggaaccctgatgcagccatgccgcgtgaatgaagaaggccttcgggttgtaaagttctttcggtgacgaggaaggttgataggttaatagcctatcaaattgacgttaatcacagaagaagcaccggctaactccgtgccagcagccgcggtaatacggggggtgcgagcgttaatcggaataactgggcgtaaagggcacgcaggcggtgacttaagtgagatgtgaaagccccgggcttaacctgggaattgcatttcatactgggtcgctagagtactttagggaggggtagaattccacgtgtagcggtgaaatgcgtagagatgtggaggaataccgaaggcgaaggcagccccttgggaatgtactgacgctcatgtgcgaaagcgtggggagcaaacaggattagataccctggtagtccacgctgtaaacgatgtcgatttggggattgggctttgagcttggtgcccgtagctaacgtgataaatcgaccgcctggggagtacggccgcaaggttaaaactcaaatgaattgacgggggcccgcacaagcggtggagcatgtggtttaattcgatgcaacgcgaagaaccttacctactcttgacatccatggaatcttgtagagatacgagagtgccttcgggaaccatgagacaggtgctgcatggctgtcgtcagctcgtgttgtgaaatgttgggttaagtcccgcaacgagcgcaacccttatcctttgttgccagcgattaggtcgggaactcaaaggagactgccagtgataaactggaggaaggtggggatgacgtcaagtcatcatggcccttacgagtagggctacacacgtgctacaatggcgtatacagagggaagcgagcctgcgagggggagcaaatctcagaaagtacgtctaagtccggattggagtctgcaactcgactccatgaagtcggaatcgctagtaatcgcgaatcagaatgtcgcggtgaatacgttcccgggccttgtacacaccgcccgtcacaccatgggagtgggttgtaccagaagtagatagcttaaccttcgggagggcgttacccacggtagat

SEQ ID NO: 976 - DNA, 1543 bp, Haemophilus parainfluenzae
ttgaattgaagagtttgatcatggctcagattgaacgctggcggcaggcttaacacatgcaagtcgaacggtaacatgaagaagcttgcttctttgatgacgagtggcggacgggtgagtaatgcttgggaatctagcttatggagggggataactacgggaaactgtagctaataccgcgtagtatcggaagatgaaagtgtgggaccttcgggccacatgccataggatgagcccaagtgggattaggtagttggtgaggtaaaggctcaccaagccgacgatctctagctggtctgagaggatgaccagccacactgggactgagacacggcccagactcctacgggaggcagcagtggggaatattgcgcaatgggggcaaccctgacgcagccatgccgcgtgaatgaagaaggccttcgggttgtaaagttctttcggtagcgaggaaggcatttagtttaatagactaggtgattgacgttaactacagaagaagcaccggctaactccgtgccagcagccgcggtaatacggagggtgcgagcgttaatcggaataactgggcgtaaagggcacgcaggcggtgacttaagtgaggtgtgaaagccccgggcttaacctgggaattgcatttcatactgggtcgctagagtactttagggaggggtagaattccacgtgtagcggtgaaatgcgtagagatgtggaggaataccgaaggcgaaggcagccccttgggaatgtactgacgctcatgtgcgaaagcgtggggagcaaacaggattagataccctggtagtccacgctgtaaacgatgtcgatttgggggttgagctttaagcttggcgcccgtagctaacgtgataaatcgaccgcctggggagtacggccgcaaggttaaaactcaaatgaattgacgggggcccgcacaagcggtggagcatgtggtttaattcgatgcaacgcgaagaaccttacctactcttgacatccagagaacattccagagatggattggtgccttcgggaactctgagacaggtgctgcatggctgtcgtcagctcgtgttgtgaaatgttgggttaagtcccgcaacgagcgcaacccttatcctttgttgccagcgattcggtcgggaactcaaaggagactgccggtgataaaccggaggaaggtggggatgacgtcaagtcatcatggcccttacgagtagggctacacacgtgctacaatggcgtatacagagggaagcgagagtgcgagctggagcgaatctcacaaagtacgtctaagtccggattggagtctgcaactcgactccatgaagtcggaatcgctagtaatcgcaaatcagaatgttgcggtgaatacgttcccgggccttgtacacaccgcccgtcacaccatgggagtgggttgtaccagaagtagatagcttaaccttcgggggggcgtttaccacggtatgattcatgactggggtgaagtcgtaacaaggtaaccgtaggggaacctgcggttggatcacctccttac

SEQ ID NO: 977 - DNA, 1471 bp, Haemophilus paraphrophaemolyticus
  modified_base (16)..(16): a, c, t, g, unknown or other
  modified_base (29)..(29): a, c, t, g, unknown or other
  modified_base (50)..(50): a, c, t, g, unknown or other
  modified_base (81)..(81): a, c, t, g, unknown or other
  modified_base (85)..(85): a, c, t, g, unknown or other
  modified_base (132)..(132): a, c, t, g, unknown or other
  modified_base (366)..(366): a, c, t, g, unknown or other
  modified_base (368)..(368): a, c, t, g, unknown or other
  modified_base (478)..(478): a, c, t, g, unknown or other
  modified_base (488)..(488): a, c, t, g, unknown or other
  modified_base (497)..(497): a, c, t, g, unknown or other
  modified_base (499)..(500): a, c, t, g, unknown or other
  modified_base (505)..(505): a, c, t, g, unknown or other
  modified_base (624)..(624): a, c, t, g, unknown or other
  modified_base (653)..(653): a, c, t, g, unknown or other
  modified_base (666)..(666): a, c, t, g, unknown or other
  modified_base (785)..(785): a, c, t, g, unknown or other
  modified_base (838)..(838): a, c, t, g, unknown or other
  modified_base (959)..(959): a, c, t, g, unknown or other
  modified_base (1084)..(1084): a, c, t, g, unknown or other
  modified_base (1161)..(1161): a, c, t, g, unknown or other
  modified_base (1262)..(1262): a, c, t, g, unknown or other
  modified_base (1452)..(1452): a, c, t, g, unknown or other
tgaagagtttgatcanggctcagattgancgctggcggcaggcttaacanatgcaagtcgaacggtaacagggattagctngctnattgctgacgagtggcggacgggtgagtaatgcttgggaatctggcntatggagggggataactacgggaaactgtagctaataccgcgtaatatcggaagattaaagggtgggactttcgggccacctgccataagatgagcccaagtgggattaggtagttggttaggtaaaggctgaccaagccgacgatctctagctggtctgagaggatgaccagccacactggaactgagacacggtccagactcctacgggaggcagcagtggggaatattgcncnatggggggaaccctgatgcagccatgccgcgtgaatgaagaaggccttcgggttgtaaagttctttcggtgacgaggaaggttgataggttaatagcctatcaaattgangttaattacngaagaagcncnngctanctccgtgccagcagccgcggtaatacggagggtgcgagcgttaatcggaataactgggcgtaaagggcacgcaggcggtgacttaagtgagatgtgaaagccccgggcttaacctgggnattgcatttcatactgggtcgctagagtnctttagggagggntagaattccacgtgtagcggtgaaatgcgtagagatgtggaggaataccgaaggcgaaggcagccccttgggaatgtactgacgctcatgtgcgaaagcgtggggagcaaacaggattngataccctggtagtccacgctgtaaacgatgtcgatttggggattgggctttnagcttggtgcccgtagctaacgtgataaatcgaccgcctggggagtacggccgcaaggttaaaactcaaatgaattgacgggggccgcacaagcggtggagcatgtggtttaattcgatgnaacgcgaagaaccttacctactcttgacatccatggaatcttgtagagatacgagagtgccttcgggaaccatgagacaggtgctgcatggctgtcgtcagctcgtgttgtgaaatgttgggttnagtcccgcaacgagcgcaacccttatcctttgttgccagcggtttggccgggaactcaaaggagactgccagtgatnaactggaggaaggtggggatgacgtcaagtcatcatggcccttacgagtagggctacacacgtgctacaatggcgtatacagagggaagcaatcctgcganggggagcaaatctcagaaagtacgtctaagtccggattggagtctgcaactcgactccatgaagtcggaatcgctagtaatcgcgaatcagaatgtcgcggtgaatacgttcccgggccttgtacacaccgcccgtcacaccatgggagtgggttgtaccagaagtagatagcttaaccgcaaggggggngtttaccacggtatgattc

SEQ ID NO: 978 - DNA, 1394 bp, Haemophilus parasuis
taacacatgcaagtcgaacggtagcaggaagaagcttgcttctttgctgacgagtggcggacgggtgagtaatgcttgggaatctggcttatggagggggataactacgggaaactgtagctaataccgcgtagtatcttcagatgaaagggtgggaccgcaaggccagttgccataagatgagcccaagtgggattaggtagttggtggggtaaaggcctaccaagccgacgatctctagctggtctgagaggatgaccagccacactggaactgagacacggtccagactcctacgggaggcagcagtggggaatattgcacaatggggggaaccctgatgcagccatgccgcgtgaatgaagaaggccttcgggttgtaaagttctttcggtgatgaggaagggtagtgttttaatagaacattacattgacgttagtcacagaagaagcaccggctaactccgtgccagcagccgcggtaatacggagggtgcgagcgttaatcggaatgactgggcgtaaagggcacgcaggcggtgacttaagtgagatgtgaaagccccgagcttaacttgggaattgcatttcatactgggttgctagagtattttagggaggggtagaattccacgtgtagcggtgaaatgcgtagagatgtggaggaataccgaaggcgaaggcagccccttgggaaaatactgacgctcatgtgcgaaagcgtggggagcaaacaggattagataccctggtagtccacgctgtaaacgctgtcgatttggggattgggcttagagcttggtgcccgtagctaacgtgataaatcgaccgcctggggagtacggccgcaaggttaaaactcaaatgaattgacgggggcccgcacaagcggtggagcatgtggtttaattcgatgcaacgcgaagaaccttacctactcttgacatcctaagaagaactcagagatgagtttgtgccttcgggaacttagagacaggtgctgcatggctgtcgtcagctcgtgttgtgaaatgttgggttaagtcccgcaacgagcgcaacccttatcctttgttgccagcgattcggtcgggaactcaaaggagactgccagtgataaactggaggaaggtggggatgacgtcaagtcatcatggcccttacgagtagggctacacacgtgctacaatggtgcatacagagggtgacgaagccgcgaggtggagtgaatctcagaaagtgcatctaagtccggattggagtctgcaactcgactccatgaagtcggaatcgctagtaatcgcgaatcagaatgtcgcggtgaatacgttcccgggccttgtacacaccgcccgtcacaccatgggagtgggttgtaccagaagtagatagct

SEQ ID NO: 979 - DNA, 1543 bp, Haemophilus somnus
ttaaattgaagagtttgatcatggctcagattgaacgctggcggcaggcttaacacatgcaagtcgaacggtaacggggagggagattactttctctgctgacgagtggcggacgggtgagtaaagcttgggaatctggcgaatggagggggatagccacgggaaactgtgggtaataccgcgtaatgtctaaggaccaaaggggtgggactgagaggccacctgccatttgatgagcccaagtgggattaggtagttggtgaggtaagggctcaccaagctgacgatctctagctggtctgagaggatggccagccacactggaactgagacacggtccagactcctacgggaggcagcagtggggaatattgcgcaatggggggaaccctgacgcagccatgccgcgtgaatgaagaaggccttcgggttgtaaagttctttcggtgatgaggaaggcgattagtttaagagattaattgattgacgataatcacagaagaagcaccggctaactccgtgccagcagccgcggtaatacggagggtgcgagcgttaatcggaatgactgggcgtaaagggcacgcaggtggtgacttaagtgaggtgtgaaatccccgggcttaacctgggaacagcatttcagactgggtgactagagtactttagggaggggtagaattccacgtgtagcggtgaaatgcgtagagatgtggaggaataccgaaggcgaaggcagccccttgggaagatactgacgctcgagtgcgaaagcgtggggagcaaacaggattagataccctggtagtccacgctgtaaacgatgtcgatttggggattgggtgaacacttggtgcccgaagctaacgtgataaatcgaccgcctggggagtacggccgcaaggttaaaactcaaatgaattgacgggggcccgcacaagcggtggagcatgtggtttaattcgatgcaacgcgaagaaccttacctactcttgacatcctaagaagccgccagagatggtggtgtgcctacgggagcttagagacaggtgctgcatggctgtcgtcagctcgtgttgtgaaatgttgggttaagtcccgcaacgagcgcaacccttatcctttgttgccagcatgttagggtgggaactcaaaggagactgccggtgataaactggaggaaggtggggatgacgtcaagtcatcatggcccttacgagtagggctacacacgtgctacaatggcgtatacagagggaggcgagcctgcgagggtaagcgaagctcagaaagtacgtctaagtccggattggagtctggaactcgactccatgaagtcggaatcgctagtaatcgcggatcagaatgtcgcggtgaatacgttcccgggccttgtacacaccgcccgtcacaccatgggagtgggttgtaccagaagtagatagcttaacgaaagggggcgtttaccacggtatggttcatgactggggtgaagtcgtaacaaggtaaccgtaggggaacctgcggttggatcacctcctta

SEQ ID NO: 980 - DNA, 1393 bp, Haemophilus sp.
  70334
gcaagtcgaacggtagcaggagaaagcttgctttcttgctgacgagtggcggacgggtgagtaatgcttgggaatctggcttatggagggggataactacgggaaactgtagctaataccgcgtaatatcgaaagattaaagtgtgggaccttcgggccacatgccatgggatgagcccaagtgggattaggtagttggtggggtaaaggcctaccaagcctgcgatctctagctggtctgagaggatggccagccacactggaactgagacacggtccagactcctacgggaggcagcagtggggaatattgcgcaatggggggaaccctgacgcagccatgccgcgtgaatgaagaaggccttcgggttgtaaagttctttcggtattgaggaaggttgatgtgttaatagtacatcttattgacgttaaatacagaagaagcaccggctaactccgtgccagcagccgcggtaatacggagggtgcgagcgttaatcggaataactgggcgtaaagggcacgcaggcggttatttaagtgaggtgtgaaagccccgggcttaacctgggaattgcatttcagactgggtaactagagtactttagggaggggtagaattccacgtgtagcggtgaaatgcgtagagatgtggaggaataccgaaggcgaaggcagccccttgggaatgtactgacgctcatgtgcgaaagcgtggggagcaaacaggattagataccctggtagtccacgctgtaaacgctgtcgatttggggattgggcttagagcttggtgcccgtagctaacgtgataaatcgaccgcctggggagtacggccgcaaggttaaaactcaaatgaattgacgggggcccgcacaagcggtggagcatgtggtttaattcgatgcaacgcgaagaaccttacctactcttgacatccagagaactttccagagatggattggtgccttcgggaactctgagacaggtgctgcatggctgtcgtcagctcgtgttgtgaaatgttgggttaagtcccgcaacgagcgcaacccttatcctttgttgccagcgatttggtcgggaactcaaaggagactgccagtgataaactggaggaaggtggggatgacgtcaagtcatcatggcccttacgagtagggctacacacgtgctacaatggcgtatacagagggtggcgaaactgcgaggtggagcgaatctcagaaagtacgtctaagtccggattggagtctgcaactcgactccatgaagtcggaatcgctagtaatcgcgaatcagaatgtcgcggtgaatacgttcccgggccttgtacacaccgcccgtcacaccatgggagtgggttgtaccagaagtagatagcttaaccgc

SEQ ID NO: 981 - DNA, 1513 bp, Haemophilus sp.
  HK445
agagtttgatcatggctcagattgaacgctggcggcaggcttaacacatgcaagtcgaacggtaacaggrgaaagcttgctttcttgctgacgagtggcggacgggtgagtaatgcttgggaatctggcttacggagggggataactgcgggaaactgcagctaataccgcgtaatatcttaggattaaagggggcrtttgctccagccgtgagatgagcccaagtgggattaggtagttggtgaggtaatggctcaccaagcctgcgatctctagctggtctgagaggatggccagccacaccgggactgagacacggcccggactcctacgggaggcagcagtggggaatattgcgcaatggggggaaccctgacgcagccatgccgcgtgaatgaagaaggccttcgggttgtaaagttctttcggtgacgaggaaggtacttaggttaataccctaagyaattgacgttaatcacagaagaagcaccggctaactccgtgccagcagccgcggtaatacggagggtgcgagcgttaatcggaataactgggcgtaaagggcacgcaggcggatttttaagtgaggtgtgaaagcccckggcttaacctgggaattgcatttcagactgggaatctagagtactttagggaggggtagaattccacgtgtagcggtgaaatgcgtagagatgtggaggaataccgaaggcgaaggcagccccttgggaatgtactgacgctcatgtgcgaaagcgtggggagcaaacaggattagataccctggtagtccacgctgtaaacgctgtcgatttgggggttgggctttaagcttggcgcccgtagctaacgtgataaatcgaccgcctggggagtacggccgcaaggttaaaactcaaatgaattgacgggggcccgcacaagcggtggagcatgtggtttaattcgatgcaacgcgaagaaccttacctactcttgacatccagagaagagactagagatagtcttgtgccttcgggagctttgagacaggtgctgcatggctgtcgtcagctcgtgttgtgaaatgttgggttaagtcccgcaacgagcgcaacccttatcctttgttgccagcgattaggtcgggaactcaaaggagactgccggtgataaaccggaggaaggtggggatgacgtcaagtcatcatggcccttacgagtagggctacacacgtgctacaatggcgtatacagagggaagcgaagcagcgatgtggagcgaatctcataaagtgcgtctaagtccggattggagtctgcaactcgactccatgaagtcggaatcgctagtaatcgcgaatcagaatgtcgcggtgaatacgttcccgggccttgtacacaccgcccgtcacaccatgggagtgggttgtaccagaagtagatagcttaaccttcgggggggcgtttaccacggtatgattcatgactggggtgaagtcgtaacaaggtaaccgtaggggaacctgcggct

SEQ ID NO: 982 - DNA, 1361 bp, Haemophilus sp.
  oral clone ASCA07
  modified_base (1337)..(1337): a, c, t, g, unknown or other
gagtttgatcatggctcagattgaacgctggcggcaggcttaacacatgcaagtcgaacgagtggcggacgggtgagtaatgcttgggaatctggcttatggagggggataactacgggaaactgtagctaataccgcgtagtgaaagatgccatgagatgagcccaagtgggattaggtagttggtggggtaaaggcctaccaagcctgcgatctctagctggtctgagaggatggccagccacactggaactgagacacggtccagactcctacgggaggcagcagtggggaatattgcgcaatggggggaaccctgacgcagccatgccgcgtgaatgaagaaggccttcgggttgtaaagttctttcggtattgaggatgacgttaaatacagaagaagcaccggctaactccgtgccagcagccgcggtaatacggagggtgcgagcgttaatcggaataactgggcgtaaagggcacgcaggcggttatttaagtgaggtgtgaaagcccccggcttaacctgggaattgcatttcagacgggataactagagtactttagggaggggtagaatcccacgtgtagcggtgaaatgcgtagagatgtggaggaatacccggggcgaaggcagccccttgggaatactgacgctcatgtgcgaaagcgtggggagcaaacaggattagataccctggtagtccacgctgtaaacgctgtcgatttggggattgggcttggtgcccgtagctaacgtgataaatcgaccgcctggggagtacggccgcaaggttaaaactcaaatgaattgaccggggcccgcacaagccgtggagcatgtggtttaattcgatgcaacgcgaagaaccttacctactcttgacatcgacaggtgctgcatggctgtcgtcagctcgtgttgtgaaatgttgggttaagtcccgcaacgagcgcaaccttatcctttgttgccagcgatcgggaactcaaaggagactgccgtgataaacggaggaaggtgggatgacgtcaagtcatcatggcccttacgagtagggctacacacgtgctacaatggcgtacagagggtggcgaaactgcgaggtggagcgaatctcagtacgtctaagtccggatggagtctgcaactcgactccagaagtcggaatcgctagtaatcgcgaatcagaatgtcgcggtgaatacgttcccgggccttgtacacaccgcccgtcacaccatgggagtgggttgtaccagaagtagatgcttagggcgtttaccacggtatgattcatgactggggtgaagtcgtaacaaggtaaccgtagggnaacctgcggctggatcacctcctt

SEQ ID NO: 983 - DNA, 1329 bp, Haemophilus sp.
  oral clone ASCG06
  modified_base (579)..(579): a, c, t, g, unknown or other
gagtttgattatggctcagattgaacgctggcggcaggcttaacacatgcaagtcgaacgagtggcgaacgggtgagtgatgcttgggaatctggcttatggagggggataactacgggaaactgtagctaataccgcgaggtgaaagatgccatgggatgagcccaagtgggattaggtagttggtggggtaaaggcctaccaagcctgcgatctctagctggtctgagaggatggccagccacactggaactgagacacggtccagactcctacgggaggcagcagtggggaatattgcgcaatggggggaaccctgacgcagccatgccgcgtgaatgaagaagccttcgggtgtaaagttctttcggtattgaggatgacgttaaatacagaagaagcaccggctaactccgtgccagcagccgcggtaatacggagggtgcgagcgttaatcggaataactgggcgtaaagggcacgcaggcggttatttaagtgaggtgtgaaagccccgggcttaacctgggaattgcatttcagactgggtaactagagtactttagggaggggtagaatnccacgtgtagcggtgaaatgcgtagagatgtggaggaataccgaaggcgaaggcagccccttgggaatactgacgcacaagtgccaaagcgtggggagcaaacaggattagataccctggtagtccacgctgtaaacgtgccgatttggggattgggcttggtccccgtagctaacgtgataatcgaccgcctggggagtacggccgcaaggttaaaacccaaatgaattgacgggggcccgcacaagcggtggagcatgtggtttaattcgatgcaacgcgaagaaccttacctactcttgacatcgacaggtgctgcatggctgtcgtcagctcgtgttgtgaaatgttgggttaagtcccgcaacgagcgcaacccttatcctttgttgccagcgatcgggaactcaaaggagactgccagtgataaactggaggaaggtggggatgacgtcaagtcatcatggcccttacgagtagggctacacacgtgctacaatggcgtacagagggtggcgaagctgcgaggtggagcgaatctcagtacgtctaagtccggatggagtctgcaactcgactccagaagtcggaatcgctagtaatcgcgaatcagaatgtcgcggtgaatacgttcccgggccttgtacacaccgcccgtcacaccatgggagtgggttgtaccagaagtagatgcttagggcgtttaccacggtatgattcatgactggggtgaagtcgtaacaaggtaac

SEQ ID NO: 984 - DNA, 1536 bp, Haemophilus sp.
  oral clone BJ021
ttaagagtttgatcatggctcagattgaacgctggcggcaggcttaacacatgcaagtcgaacggtaacagggattagcttgctaatttgctgacgagtggcggacgggtgagtaatgcttgggaatctggcttatggagggggataactacgggaaactgtagctaataccgcgtaaaatcttcggattaaagggtgggactttcgggccacctgccatgagatgagcccaagtgggattaggtagttggttaggtaaaggctgaccaagccgacgatctctagctggtctgagaggatgaccagccacactggaactgagacacggtccagactcctacgggaggcagcagtggggaatattgcacaatggggggaaccctgatgcagccatgccgcgtgaatgaagaaggccttcgggttgtaaagttctttcggtgacgaggaaggttggtatgttaatagcatatcaaattgacgttaatcacagaagaagcaccggctaactccgtgccagcagccgcggtaatacggggggtgcgagcgttaatcggaataactgggcgtaaagggcacgcaggcggtgacttaagtgagatgtgaaagccccgggcttaacctgggaattgcatttcatactgggtcgctagagtactttagggaggggtagaattccacgtgtagcggtgaaatgcgtagagatgtggaggaataccgaaggcgaaggcagccccttgggaatgtactgacgctcatgtgcgaaagcgtggggagcaaacaggattagataccctggtagtccacgctgtaaacgatgtcgatttggggattgggctttaagcttggtgcccgtagctaacgtgataaatcgaccgcctggggagtacggccgcaaggttaaaactcaaatgaattgacgggggcccgcacaagcggtggagcatgtggtttaattcgatgcaacgcgaagaaccttacctactcttgacatccatggaatcttgtagagatacgagagtgccttcgggaaccatgagacaggtgctgcatggctgtcgtcagctcgtgttgtgaaatgttgggttaagtcccgcaacgagcgcaacccttatcctttgttgccagcggttaggccgggaactcaaaggagactgccagtgataaactggaggaaggtggggatgacgtcaagtcatcatggcccttacgagtagggctacacacgtgctacaatggcgtatacagagggaagcaatcctgcgagggggagcaaatctcagaaagtgcgtctaagtccggattggagtctgcaactcgactccatgaagtcggaatcgctagtaatcgcgaatcagaatgtcgcggtgaatacgttcccgggccttgtacacaccgcccgtcacaccatgggagtgggttgtaccagaagtagatagcttaaccgcaaggggggcgtttaccacggtatgattcatgactggggtgaagtcgtaacaaggtaaccgtaggggaacctgcggctggaacacctccttc

SEQ ID NO: 985 - DNA, 1533 bp, Haemophilus sp.
  oral clone BJ095
agagtttgatcatggctcagattgaacgctggcggcaggcttaacacatgcaagtcgaacggtagcaggagaaagcttgctttcttgctgacgagtggcggacgggtgagtaatgcttgggaatctggcttatggagggggataactacgggaaactgcagctaataccgcgtagtatcggaagatgaaagtgcgggaccgcaaggccgcatgccatgagatgagcccaagtgggattaggtagttggtggggtaaaggcctaccaagcctgcgatctctagctggtctgagaggatggccagccacactggaactgagacacggtccagactcctacgggaggcagcagtggggaatattgcgcaatggggggaaccctgacgcagccatgccgcgtgaatgaagaaggccttcgggttgtaaagttctttcggtattgaggaaggagtgtatgttaatagcatacattattgacgttaaatacagaagaagcaccggctaactccgtgccagcagccgcggtaatacggagggtgcgagcgttaatcggaataactgggcgtaaagggcacgcaggcggttatttaagtgaggtgtgaaagccctgggcttaacctgggaattgcatttcagactgggtaactagagtactttagggaggggtagaattccacgtgtagcggtgaaatgcgtagagatgtggaggaataccgaaggcgaaggcagccccttgggaatgtactgacgctcatgtgcgaaagcgtggggagcaaacaggattagataccctggtagtccacgctgtaaacgatgtcgatttggggattgggctttaagcttggtgcccgtagctaacgtgataaatcgaccgcctggggagtacggccgcaaggttaaaactcaaatgaattgacgggggcccgcacaagcggtggagcatgtggtttaattcgatgcaacgcgaaaaaccttacctactcttgacatccatggaatcctgtagagatacgggagtgccttcgggaaccatgagacaggtgctgcatggctgtcgtcagctcgtgttgtgaaatgttgggttaagtcccgcaacgagcgcaacccttatcctttgttgccagcgatccggtcgggaactcaaaggagactgccagtgataaactggaggaaggtggggatgacgtcaagtcatcatggcccttacgagtagggctacacacgtgctacaatggcgtatacagagggtggcgatgccgcgaggtggagcgaatctcagaaagtacgtctaagtccggattggagtctgcaactcgactccatgaagtcggaatcgctagtaatcgcgaatcagaatgtcgcggtgaatacgttcccgggccttgtacacaccgcccgtcacaccatgggagtgggttgtaccagaagtagacagcttaaccgcaaggggggcgtttaccacggtatgattcatgactggggtgaagtcgtaacaaggtaaccgtargggaacctgcggctggatcacctccttc

SEQ ID NO: 986 - DNA, 1364 bp, Haemophilus sp.
  oral clone JM053
gagtttgatcatggctcagattgaacgctggcggcaggcttaacacatgcaagtcgaacgagtggcggacgggtgagtaatgcttgggaatctggcttatggagggggataacgacgggaaactgtcgctaataccgcgtagagaaagatgccatgagatgagcccaagtgggattaggtagttggtggggtaaaggcctaccaagccgacgatctctagctggtctgagaggatgaccagccacaccgggactgagacacggcccggactcctacgggaggcagcagtggggaatattgcgcaatgggggcaaccctgacgcagccatgccgcgtgaatgaagaaggccttcgggttgtaaagttctttcggtgacgaggatgacgttaatcacagaagaagcaccggctaactccgtgccagcagccgcggtaatacggagggtgcgagcgttaatcggaataactgggcgtaaagggcacgcaggcggctatttaagtgaggtgtgaaatccccgggcttaacctgggaattgcatttcagactgggtagctagagtactttagggaggggtagaattccacgtgtagcggtgaaatgcgtagagatgtggaggaataccgaaggcgaaggcagccccttgggaatactgacgctcatgtgcgaaagcgtggggagcaaacaggattagataccctggtagtccacgctgtaaacgctgtcgatttggggattgggcttggtgcccgtagctaacgtgataaatcgaccgcctggggagtacggccgcaaggttaaaactcaaatgaattgacgggggcccgcacaagcggtggagcatgtggtttaattcgatgcaacgcgaagaaccttacctactcttgacatcgacaggtgctgcatggctgtcgtcagctcgtgttgtgaaatgttgggttaagtcccgcaacgagcgcaacccttatcctttgttgccagcgatcgggaactcaaaggagactgccggtgataaaccggaggaaggtggggatgacgtcaagtcatcatggcccttacgagtagggctacacacgtgctacaatggcgtacagagggtgacgaagccgcgaggtggagtgaatctcagtacgtctaagtccggatggagtctgcaactcgactccagaagtcggaatcctagtaatcgcgaatcagaatgtcgcggtgaatacgttcccgggccttgtacacaccgcccgtcacaccatgggagtgggttgtaccagaagtagatgcttagggcgtttaccacggtatgattcatgactggggtgaagtcgtaacaaggtaaccgtaggggaacctgcggttggatcacctcctt

SEQ ID NO: 987 - DNA, 1528 bp, Haemophilus sp.
  oral taxon 851
agagtttgatcatggctcagattgaacgctggcggcaggcttaacacatgcaagtcgaacggtagcaggagaaagcttgctttcttgctgacgagtggcggacgggtgagtaatgcttgggaatctggcttatggagggggataactacgggaaactgtagctaataccgcgtagtatcggaagatgaaagtgcgggaccgcaaggccgcatgccatgagatgagcccaagtgggattaggtagttggtggggtaaaggcctaccaagcctgcgatctctagctggtctgagaggatggccagccacactggaactgagacacggtccagactcctacgggaggcagcagtggggaatattgcgcaatggggggaaccctgacgcagccatgccgcgtgaatgaagaaggccttcgggttgtaaagttctttcggtattgaggaaggttgatgtgttaatagtacatcaaattgacgttaaatacagaagaagcaccggctaactccgtgccagcagccgcggtaatacggagggtgcgagcgttaatcggaataactgggcgtaaagggcacgcaggcggttatttaagtgaggtgtgaaagccccgggcttaacctgggaattgcatttcagactgggtaactagagtactttagggaggggtagaattccacgtgtagcggtgaaatgcgtagagatgtggaggaataccgaaggcgaaggcagccccttgggaatgtactgacgctcatgtgcgaaagcgtggggagcaaacaggattagataccctggtagtccacgctgtaaacgctgtcgatttggggattgggcttaaagcttggtgcccgtagctaacgtgataaatcgaccgcctggggagtacggccgcaaggttaaaactcaaatgaattgacgggggcccgcacaagcggtggagcatgtggtttaattcgatgcaacgcgaagaaccttacctactcttgacatccagagaactttccagagatggattggtgccttcgggaactctgagacaggtgctgcatggctgtcgtcagctcgtgttgtgaaatgttgggttaagtcccgcaacgagcgcaacccttatcctttgttgccagcgatttggtcgggaactcaaaggagactgccagtgataaactggaggaaggtggggatgacgtcaagtcatcatggcccttacgagtagggctacacacgtgctacaatggcgtatacagagggtggcgaagctgcgaggtggagcgaatctcagaaagtacgtctaagtccggattggagtctgcaactcgactccatgaagtcggaatcgctagtaatcgcgaatcagaatgtcgcggtgaatacgttcccgggccttgtacacaccgcccgtcacaccatgggagtgggttgtaccagaagtagatagcttaaccgcaaggggggcgtttaccacggtatgattcatgactggggtgaagtcgtaacaaggtaaccgtaggggaacctgcggttggatcacct

SEQ ID NO: 988 - DNA, 1522 bp, Haemophilus sputorum
agagtttgatcatggctcagattgaacgctggcggcaggcttaacacatgcaagtcgaacggtaacaggaagaaagcttgctttctttgctgacgagtggcggacgggtgagtaatgcttgggaatctggcttatggagggggataactacgggaaactgtagctaataccgcgtaatatcgagagattaaagggtgggaccgcaaggccacctgccatgagatgagcccaagtgggattaggtagttggtgaggtaaaggctcaccaagccgacgatctctagctggtctgagaggatgaccagccacactggaactgagacacggtccagactcctacgggaggcagcagtggggaatattgcacaatggggggaaccctgatgcagccatgccgcgtgaatgaagaaggccttcgggttgtaaagttctttcggtagcgaggaaggcatttagtttaatagactagatgattgacgttaactacagaagaagcaccggctaactccgtgccagcagccgcggtaatacggggggtgcgagcgttaatcggaataactgggcgtaaagggcacgcaggcggtgacttaagtgagatgtgaaagccccgggcttaacctgggaattgcatttcatactgggtcgctagagtactttagggaggggtagaattccacgtgtagcggtgaaatgcgtagagatgtggaggaataccgaaggcgaaggcagccccttgggaatgtactgacgctcatgtgcgaaagcgtggggagcaaacaggattagataccctggtagtccacgctgtaaacgatgtcgatttgggggttgggctttaagcttggcgcccgtagctaacgtgataaatcgaccgcctggggagtacggccgcaaggttaaaactcaaatgaattgacgggggcccgcacaagcggtggagcatgtggtttaattcgatgcaacgcgaagaaccttacctactcttgacatccagagaactttccagagatggattggtgccttcgggaactctgagacaggtgctgcatggctgtcgtcagctcgtgttgtgaaatgttgggttaagtcccgcaacgagcgcaacccttatcctttgttgccagcgattaggtcgggaactcaaaggagactgccggtgataaaccggaggaaggtggggatgacgtcaagtcatcatggcccttacgagtagggctacacacgtgctacaatggcgtatacagagggaagcaatcctgcgagggggagcaaatctcacaaagtacgtctaagtccggattggagtctgcaactcgactccatgaagtcggaatcgctagtaatcgcaaatcagaatgttgcggtgaatacgttcccgggccttgtacacaccgcccgtcacaccatgggagtgggttgtaccagaagtagatagcttaaccttcgggggggcgtttaccacggtatgattcatgactggggtgaagtcgtaacaaggtaaccgtaggggaacctgcggttg

SEQ ID NO: 989 - DNA, 1421 bp, Hafnia alvei
  modified_base (421)..(421): a, c, t, g, unknown or other
  modified_base (538)..(538): a, c, t, g, unknown or other
  modified_base (1359)..(1359): a, c, t, g, unknown or other
catgcaagtcgagcggtagcacaagagagcttgctctctgggtgacgagcggcggacgggtgagtaatgtctgggaaactgcctgatggagggggataactactggaaacggtagctaataccgcatgacgtcttcggaccaaagtgggggaccttcgggcctcacgccatcagatgtgcccagatgggattagctagtaggtggggtaatggctcacctaggcgacgatctctagctggtctgagaggatgaccagccacactggaactgagacacggtccagactcctacgggaggcagcagtggggaatattgcacaatgggcgcaagcctgatgcagccatgccgcgtgtatgaagaaggccttcgggttgtaaagtactttcagcgaggaggaaggcattaaggttaataaccttngtgattgacgttactcgcagaagaagcaccggctaactccgtgccagcagccgcggtaatacggagggtgcaagcgttaatcggaattactgggcgtaaagcgcacgcaggcggttngttaagtcagatgtgaaatccccgagcttaacttgggaactgcatttgaaactggcaagctagagtcttgtagaggggggtagaattccaggtgtagcggtgaaatgcgtagagatctggaggaataccggtggcgaaggcggccccctggacaaagactgacgctcaggtgcgaaagcgtggggagcaaacaggattagataccctggtagtccacgctgtaaacgatgtcgacttggaggttgtgcccttgaggcgtggcttccggagctaacgcgttaagtcgaccgcctggggagtacggccgcaaggttaaaactcaaatgaattgacgggggcccgcacaagcggtggagcatgtggtttaattcgatgcaacgcgaagaaccttacctactcttgacatccagagaatttgctagagatagcttagtgccttcgggaactctgagacaggtgctgcatggctgtcgtcagctcgtgttgtgaaatgttgggttaagtcccgcaacgagcgcaacccttatcctttgttgccagcgagtcatgtcgggaactcaaaggagactgccggtgataaaccggaggaaggtggggatgacgtcaagtcatcatggcccttacgagtagggctacacacgtgctacaatggcatatacaaagagaagcgaactcgcgagagcaagcggacctcataaagtatgtcgtagtccggattggagtctgcaactcgactccatgaagtcggaatcgctagtaatcgtagatcagaatgctacggtgaatacgttcccgggccttgtacacaccgcccgtcacancatgggagtgggttgcaaaagaagtaggtagcttaaccttcgggagggcgcttaccactttg

SEQ ID NO: 990 - DNA, 1533 bp, Halomonas elongata
agagtttgatcatggctcagattgaacgctggcggcaggcctaacacatgcaagtcgagcggaaacgatcctagcttgctaggaggcgtcgagcggcggacgggtgagtaatgcataggaatctgcccggtagtgggggataacttgaggaaactcaagctaataccgcatacgccctacgggggaaagcaggggctcttcggaccttgcgctatcggatgagcttatgtcggattagctggttggtgaggtaacggctcaccaaggcgacgatccgtagctggtctgagaggatgatcagccacatcgggactgagacacggcccgaactcctacgggaggcagcagtggggaatattggacaatgggggcaaccctgatccagccatgccgcgtgtgtgaagaaggccctcgggttgtaaagcactttcagcgaggaagaatgcttgtcggttaatacccggcaagggagacatcactcgcagaagaagcaccggctaactccgtgccagcagccgcggtaatacggagggtgcgagcgttaatcggaattactgggcgtaaagcgtgcgtaggcggcttgataagccggttgtgaaagccccgggctcaacctgggaacggcatccggaactgttaggctagagtgcaggagaggaaggtagaattcccggtgtagcggtgaaatgcgtagagatcgggaggaataccagtggcgaaggcggccttctggactgacactgacgctgaggtacgaaagcgtgggtagcaaacaggattagataccctggtagtccacgccgtaaacgatgtcgactagccgttggggtcctcgagacctttgtggcgcagttaacgcactaagtcgaccgcctggggagtacggccgcaaggttaaaactcaaatgaattgacgggggcccgcacaagcggtggagcatgtggtttaattcgatgcaacgcgaagaaccttacctacccttgacatcgtgcgaactttccagagatggattggtgccttcgggagcgcacagacaggtgctgcatggctgtcgtcagctcgtgttgtgaaatgttgggttaagtcccgtaacgagcgcaacccttgtccctatttgccagcgattcggtcgggaactctagggagactgccggtgacaaaccggaggaaggtggggacgacgtcaagtcatcatggcccttacgggtagggctacacacgtgctacaatggccggtacaatgggttgcaaagcggcgacgtggagctaatctcataaagccggtctcagtccggatcggagtctgcaactcgactccgtgaagtcggaatcgctagtaatcgtgcatcagaatggcacggtgaatacgttcccgggccttgtacacaccgcccgtcacaccatgggagtggactgcaccagaagtggttagcctaacttcggagggcgatcaccacggtgtggttcatgactggggtgaagtcgtaacaaggtagccgtaggggaacctgcggctggatcacctccttaat

SEQ ID NO: 991 - DNA, 1296 bp, Halomonas johnsoniae
attgaacgctggcggcaggcctaacacatgcaagtcgagcgagcggcggacgggtgagtaatgcataggaatctgcccgatagtgggggataacctggggaaacccaggctaataccgcatacggaaagccgctatcggatgagcctatgtcggattagctagttggtgaggtaaaggctcaccaaggcgacgatccgtagctggtctgagaggatgatcagccacatcgggactgagacacggcccgaactcctacgggaggcagcagtggggaatattggacaatggggggaaccctgatccagccatgccgcgtgtgtgaagaaggccctcgggttgtaaagcactttcagtgaggaagaagacatcactcacagaagaagcaccggctaactccgtgccagcagccgcggtaatacggagggtgcgagcgttaatcggaattactgggcgtaaagcgcgcgtaggtggcttgataagccggttgtgaaagccccgggctcaacctgggaacggcatccggaactgtcaagctagagtgcaggagaggaaggtagaattcccggtgtagcggtgaaatgcgtagagatcgggaggaataccagtggcgaaggcggccttctggactgactgacactgaggtgcgaaagcgtgggtagcaaacaggattagataccctggtagtccacgccgtaaacgatgtcgaccagccgttgggtactttgtggcgaagttaacgcgataagtcgaccgcctggggagtacggccgcaaggttaaaactcaaatgaattgacgggggcccgcacaagcggtggagcatgtggtttaattcgatgcaacgcgaagaaccttacctactcttgacatcgacaggtgctgcatggctgtcgtcagctcgtgttgtgaaatgttgggttaagtcccgtaacgagcgcaacccttgtccttatttgccagcgcgcgggaactctaaggagactgccggtgacaaaccggaggaaggtggggacgacgtcaagtcatcatggcccttacgagtagggctacacacgtgctacaatggtcggcaaagggttgccaactcgcgagagtgagccaatcccgaccgatctcagtccggacggagtctgcaactcgactccggaagtcggaatcgctagtaatcgtggatcagaatgccacggtgaatacgttcccgggccttgtacacaccgcccgtcacaccatgggagtggactgcaccagaagtggttgcctagggcgatcaccacggtgtggttcatgactggggtg

SEQ ID NO: 992 - DNA, 1430 bp, Halorubrum lipolyticum
aggccattgctattgggattcgatttagccatgctagtcgcacgagttcagactcgtggcgaatagctcagtaacacgtggccaaactacccttcggagcacaataccctcgggaaactgaggctaatagtgcataccacagtccacctggaatgaggactgtgccaaacgctccggcgccgaaggatgtggctgcggccgattaggtagacggtggggtaacggcccaccgtgccaataatcggtacgggtcatgagagtgagaacccggagacggaatctgagacaagattccgggccctacggggcgcagcaggcgcgaaacctttacactgcacgccagtgcgataagggaatcccaagtgcgtaggcatagagcctacgcttttgtccaccgtagggaggtggacgaataagggctgggcaagaccggtgccagccgccgcggtaataccggcagcccgagtgatggccgatcttattgggcctaaagcgtccgtagctggccgcacaagtccatcggaaaatccacccgctcaacgggtgggcgtccggtggaaactgtgtggcttgggaccggaaggcgcgacgggtacgtccggggtaggagtgaaatcccgtaatcctggacggaccgccgatggcgaaagcacgtcgcgaggacggatccgacagtgagggacgaaagccagggtctcgaaccggattagatacccgggtagtcctggccgtaaacaatgtctgttaggtgtggctcccactacgagtgggtgctgtgccgtagggaagccgctaaacagaccgcctgggaagtacgtccgcaaggatgaaacttaaaggaattggcgggggagcactacaaccggaggagcctgcggtttaattggactcaacgccggacatctcaccagcatcgactgtaataatgacgatcaggttgatgaccttatccgagtttcagagaggaggtgcatggccgccgtcagctcgtaccgtgaggcgtcctgttaagtcaggcaacgagcgagacccgcatccttacttgccagcagcactgcgaagtggctggggacagtagggagaccgccgtggccaacacggaggaaggaacgggcaacggtaggtcagtatgccccgaatgtgctgggcaacacgcgggctacaatggtcgagacaaagggttccaactccgaaaggagacggtaatctcagaaactcgatcgtagttcggattgtgggctgcaactcgcccacatgaagctggattcggtagtaatcgcgtgtcacaagcgcgcggtgaatacgtccctgctccttgcacacaccgcccgtcaaagcacccgagtgaggtccggatgaggcgcgtcacacgcgtcgaatctgggcttcgcaagggggcttaagtcgtaacaaggtagccgtaggggaat

SEQ ID NO: 993 - DNA, 1506 bp, Helicobacter bilis
tttatggagagtttgatcctggctcagagtgaacgctggcggcgtgcctaatacatgcaagtcgaacgatgaagcttctagcttgctagaagtggattagtggcgcacgggtgagtaatgcataggttatgtgccctttagtctgggatagccactggaaacggtgattaatactggatactccctacgggggaaaggtttttcgctaaaggatcagcctatgtcctatcagcttgttggtgaggtaatggctcaccaaggctatgacgggtatccggcctgagagggtgatcggacacactggaactgagacacggtccagactcctacgggaggcagcagtagggaatattgctcaatgggggaaaccctgaagcagcaacgccgcgtggaggatgaaggttttaggattgtaaactccttttgttagagaagattatgacggtatctaacgaataagcaccggctaactccgtgccagcagccgcggtaatacggagggtgcaagcgttactcggaatcactgggcgtaaagagcgcgtaggcgggtggtcaagtcagatgtgaaatcctgtagcttaactacagaactgcatttgaaactgaccatctagagtatgggagaggtaggtggaattcttggtgtaggggtaaaatccgtagagatcaagaggaatactcattgcgaaggcgacctgctggaacattactgacgctgatgcgcgaaagcgtggggagcaaacaggattagataccctggtagtccacgccctaaacgatgaatgctagttgttgccctgcttgtcagggcagtaatgcagctaacgcattaagcattccgcctggggagtacggtcgcaagattaaaactcaaaggaatagacggggacccgcacaagcggtggagcatgtggtttaattcgaagctacgcgaagaaccttacctaggcttgacattgatagaatccgctagagatagtggagtgctggcttgccagagcttgaaaacaggtgctgcacggctgtcgtcagctcgtgtcgtgagatgttgggttaagtcccgcaacgagcgcaaccctcgtccttagttgctagcagctcggctgagcactctaaggagactgccttcgtaaggaggaggaaggtgaggacgacgtcaagtcatcatggcccttacgcctagggctacacacgtgctacaatgggacatacaaaaagatgcaataccgcgaggtggagcaaatctctaaaatgtctctcagttcggattgtagtctgcaactcgactacatgaagctggaatcgctagtaatcgtgaatcagccatgtcacggtgaatacgttcccgggtcttgtactcaccgcccgtcacaccatgggagttgtattcgccttaagtcgggatactaaattggttaccgcccacggcggatgcagcgactggggtgaagtcgtaacaaggtaaccgtaggtgaacctgcggttggatcacctcctttctagaga

SEQ ID NO: 994 - DNA, 1499 bp, Helicobacter canadensis
ttctatggagagtttgatcctggctcagagtgaacgctggcggcgtgcctaatacatgcaagtcgaacgatgaagcttctagcttgctagaagtggattagtggcgcacgggtgagtaatgcataggttatgtgccctttagtctgggatagccactggaaacggtgattaatactagatactccctacgggggaaagtttttcgctaaaggatcagcctatgtcctatcagcttgttggtgaggtaatggctcaccaaggctatgacgggtatccggcctgagagggtgatcggacacactggaactgagacacggtccagactcctacgggaggcagcagtagggaatattgctcaatgggggaaaccctgaagcagcaacgccgcgtggaggatgaaggttttcggattgtaaactccttttgttagagaagattatgacggtatctaacgaataagcaccggctaactccgtgccagcagccgcggtaatacggagggtgcaagcgttactcggaatcactgggcgtaaagagcgcgtaggcggggtagcaagtcagatgtgaaatcctatggcttaaccatagaactgcatttgaaactgttactctagagtatgggagaggtaggtggaattcttggtgtaggggtaaaatccgtagagatcaagaggaatactcattgcgaaggcgacctgctggaacattactgacgctgatgcgcgaaagcgtggggagcaaacaggattagataccctggtagtccacgccctaaacgatgaatgctagttgttgtgaggcttgtccttgcagtaatgcagctaacgcattaagcattccgcctggggagtacggtcgcaagattaaaactcaaaggaatagacggggacccgcacaagcggtggagcatgtggtttaattcgaagatacgcgaagaaccttacctaggcttgacattgatagaatctactagagatagtggagtgcccttttagggagcttgaaaacaggtgctgcacggctgtcgtcagctcgtgtcgtgagatgttgggttaagtcccgcaacgagcgcaaccctcgtccttagttgctagcagtttggctgagcactctaaggagactgccttcgtaaggaggaggaaggtgaggatgacgtcaagtcatcatggcccttacgcctagggctacacacgtgctacaatggggtgcacaaagagaagcaatactgcgaagtggagccaatctctaaaacatctctcagttcggattgtagtctgcaactcgactacatgaagctggaatcgctagtaatcgtgaatcagccatgtcacggtgaatacgttcccgggtcttgtactcaccgcccgtcacaccatgggagttgtattcgccttaagtcggaatactaaactagttaccgcccacggcggatgcagcgactggggtgaagtcgtaacaaggtaaccgtaggtgaacctgcggttggatcacctcctttc

SEQ ID NO: 995 - DNA, 1502 bp, Helicobacter cinaedi
ttttatggagagtttgatcctggctcagagtgaacgctggcggcgtgcctaatacatgcaagtcgaacgatgaagcttttagcttgctagaagtggattagtggcgcacgggtgagtaatgcataggttatgtgccctttagtctgggatagccactggaaacggtgattaatactggatactccctacgggggaaaggtttttcgctaaaggatcagcctatgtcctatcagcttgttggtgaggtaatggctcaccaaggctatgacgggtatccggcctgagagggtgatcggacacactggaactgagacacggtccagactcctacgggaggcagcagtagggaatattgctcaatgggggaaaccctgaagcagcaacgccgcgtggaggatgaaggttttaggattgtaaactccttttgtaagagaagattatgacggtatcttacgaataagcaccggctaactccgtgccagcagccgcggtaatacggagggtgcaagcgttactcggaatcactgggcgtaaagagtgcgtaggcgggtagtcaagtcagatgtgaaatcctgtagcttaactacagaactgcatttgaaactgactatctagagtatgggagaggtaggtggaattcttggtgtaggggtaaaatccgtagagatcaagaggaatactcattgcgaaggcgacctgctggaacattactgacgctgatgcgcgaaagcgtggggagcaaacaggattagataccctggtagtccacgccctaaacgatgaatgctagttgttgccctgcttgtcagggcagtaatgcagctaacgcattaagcattccgcctggggagtacggtcgcaagattaaaactcaaaggaatagacggggacccgcacaagcggtggagcatgtggtttaattcgagtatacgcgaagaaccttacctaggcttgacattgatagaatccgctagagatagtggagtgttggcttgccagagcttgaaaacaggtgctgcacggctgtcgtcagctcgtgtcgtgagatgttgggttaagtcccgcaacgagcgcaaccctcgtccttagttgctagcagctcggctgagcactctaaggagactgccttcgtaaggaggaggaaggtgaggacgacgtcaagtcatcatggcccttacgcctagggctacacacgtgctacaatgggacatacaaaaagatgcaatatcgcgagatggagcaaatctctaaaatgtctctcagttcggattgtagtctgcaactcgactacataaagctggaatcgctagtaatcgcaaatcagcaatgttgcggtgaatacgttcccgggtcttgtactcaccgcccgtcacaccatgggagttgtattcgccttaagtcgggatactaaattggttaccgcccacggcggatgcagcgactggggtgaagtcgtaacaaggtaaccgtaggtgaacctgcggttggatcacctcctttct

SEQ ID NO: 996 - DNA, 1508 bp, Helicobacter pullorum
ttttatggagagtttgatcctggctcagagtgaacgctggcggcgtgcctaatacatgcaagtcgaacgatgaagcttttagcttgctagaagtggattagtggcgcacgggtgagtaatgcataggttatgtgccctttagtctgggatagccactggaaacggtgattaatactagatactccctacgggggaaagtttttcgctaaaggatcagcctatgtcctatcagcttgttggtgaggtaatggctcaccaaggctatgacgggtatccggcctgagagggtgatcggacacactggaactgagacacggtccagactcctacgggaggcagcagtagggaatattgctcaatgggggaaaccctgaagcagcaacgccgcgtggaggatgaaggttttcggattgtaaactccttttgttagagaagataatgacggtatctaacgaataagcaccggctaactccgtgccagcagccgcggtaatacggagggtgcaagcgttactcggaatcactgggcgtaaagagcgcgtaggcggggtagtaagtcagatgtgaaatcctatggcttaaccatagaactgcatttgaaactactactctagagtatgggagaggtaggtggaattcttggtgtaggggtaaaatccgtagagatcaagaggaatactcattgcgaaggcgacctgctggaacattactgacgctgatgcgcgaaagcgtggggagcaaacaggattagataccctggtagtccacgccctaaacgatgaatgctagttgttgtgaggcttgtccttgcagtaatgcagctaacgcattaagcattccgcctggggagtacggtcgcaagattaaaactcaaaggaatagacggggacccgcacaagcggtggagcatgtggtttaattcgatgatacgcgaagaaccttacctaggcttgacattgatagaatctgctagagatagcggagtgctggcttgccagagcttgaaaacaggtgctgcacggctgtcgtcagctcgtgtcgtgagatgttgggttaagtcccgcaacgagcgcaaccctcgtccttagttgctagcagttcggctgagcactctaaggagactgccttcgtaaggaggaggaaggtgaggatgacgtcaagtcatcatggcccttacgcctagggctacacacgtgctacaatggggtgtacaaagagaagcaatactgcgaagtggagccaatctctaaaacatctctcagttcggattgtagtctgcaactcgactacatgaagctggaatcgctagtaatcgcaaatcagccatgttgcggtgaatacgttcccgggtcttgtactcaccgcccgtcacaccatgggagttgtattcgccttaagtcggaatactaaactagttaccgcccacggcggatgcagcgactggggtgaagtcgtaacaaggtaaccgtaggtgaacctgcggttggatcacctcctttcaagagaaa

SEQ ID NO: 997 - DNA, 1550 bp, Helicobacter pylori
atcaaaaaacaaaagagctttaggacaaacacttttatggagagtttgatcctggctcagagtgaacgctggcggcgtgcctaatacatgcaagtcgaacgatgaagctttctagcttgctagaaggctgattagtggcgcacgggtgagtaacgcataggtcatgtgcctcttagtttgggatagccattggaaacgatgattaataccagatactccctacgggggaaagatttatcgctaagagatcagcctatgtcctatcagcttgttggtaaggtaatggcttaccaaggctatgacgggtatccggcctgagagggtgaacggacacactggaactgagacacggtccagactcctacgggaggcagcagtagggaatattgctcaatgggggaaaccctgaagcagcaacgccgcgtggaggatgaaggttttaggattgtaaactccttttgttagagaagataatgacggtatctaacgaataagcaccggctaactccgtgccagcagccgcggtaatacggagggtgcaagcgttactcggaatcactgggcgtaaagagcgcgtaggcgggatagtcagtcaggtgtgaaatcctatggcttaaccatagaactgcatttgaaactactattctagagtgtgggagaggtaggtggaattcttggtgtaggggtaaaatccgtagagatcaagaggaatactcattgcgaaggcgacctgctggaacattactgacgctgattgcgcgaaagcgtggggagcaaacaggattagataccctggtagtccacgccctaaacgatggatgctagttgttggagggcttagtctctccagtaatgcagctaacgcattaagcatcccgcctggggagtacggtcgcaagattaaaactcaaaggaatagacggggacccgcacaagcggtggagcatgtggtttaattcgaagatacacgaagaaccttacctaggcttgacattgagagaatccgctagaaatagtggagtgtctggcttgccagaccttgaaaacaggtgctgcacggctgtcgtcagctcgtgtcgtgagatgttgggttaagtcccgcaacgagcgcaaccccctttcttagttgctaacaggtcatgctgagaactctaaggatactgcctccgtaaggaggaggaaggtggggacgacgtcaagtcatcatggcccttacgcctagggctacacacgtgctacaatggggtgcacaaagagaagcaatactgcgaagtggagccaatcttcaaaacatctctcagttcggattgtaggctgcaactcgcctgcatgaagctggaatcgctagtaatcgcaaatcagccatgttgcggtgaatacgttcccgggtcttgtactcaccgcccgtcacaccatgggagttgtgtttgccttaagtcaggatgctaaattggctactgcccacggcacacacagcgactggggtgaagtcgtaacaaggtaaccgtaggtgaacctgcggttggatcacctcctttctagagaaaagc

SEQ ID NO: 998 - DNA, 1456 bp, Helicobacter sp.
  None
tagtgaacgctggcggcgtgcctaatacatgcaagtcgaacgatgaagcttttagcttgctagaagtggattagtggcgcacgggtgagtaatgcataggttatgtgccctttagtctgggatagccactggaaacggtgattaatactggatactccctgcgggggaaaggtttttcgctagaggatcagcctatgtcctatcagcttgttggtgaggtaatggctcaccaagactatgacgggtatccggcctgagagggtgatcggacacactggaactgagacacggtccagactcctacgggaggcagcagtagggaatattgctcaatgggggaaaccctgaagcagcaacgccgcgtggaggatgaaggttttaggattgtaaactccttttgtaagagaagattatgacggtatcttacgaataagcaccggctaactccgtgccagcagccgcggtaatacggagggtgtaagcgttactcggaatcactgggcgtaaagagtgcgtaggcgggtagtcaagtcagatgtgaaatcctgtagcttaactacagaactgcatttgaaactgactatctagagtatgggagaggtaggtggaattcttggtgtaggggtaaaatccgtagagatcaagaggaatactcattgcgaaggcgacctgctggaacattactgacgctgatgcgcgaaagcgtggggagcaaacaggattagataccctggtagtccacgccctaaacgatgaatgctagttgttgccctgcttgtcagggcagtaatgcagctaacgcattaagcattccgcctggggagtacggtcgcaagattaaaactcaaaggaatagacggggacccgcacaagcggtggagcatgtggtttaattcgaagctacgcgaagaaccttacctaggcttgacattgatagaatctgctagagatagcggagtgctggcttgccagagcttgaaaacaggtgctgcacggctgtcgtcagctcgtgtcgtgagatgttgggttaagtcccgcaacgagcgcaaccctcgtccttagttgttagcagctcggctgagcactctaaggagactgccttcgcaaggaggaggaaggtgaggacgacgtcaagtcatcatggcccttacgcctagggctacacacgtgctacaatgggacatacaaaaagatgcaatatcgcgagatggagcaaatctctaaaatgtctctcagttcggattgtagtctgcaactcgactacataaagctggaatcgctagtaatcgcaaatcagcaatgttgcggtgaatacgttcccgggtcttgtactcaccgcccgtcacaccatgggagttgtattcgccttaagtcgggatactaaattggttaccgcccacggcggatgcagcgactggggtgaagtcgtaacaaggtaaccgtgtcatagttgttt

SEQ ID NO: 999 - DNA, 1507 bp, Helicobacter winghamensis
ttttatggagagtttgatcctggctcagagtgaacgctggcggcgtgcctaatacatgcaagtcgaacgatgaagcttctagcttgctagaagtggattagtggcgcacgggtgagtaatgcataggttatgtgccctttagtctgggatagccactggaaacggtgattaataccggatattccctacgggggaaaggtttttcgctaaaggatcagcctatgtcctatcagcttgttggtgaggtaatggctcaccaaggctatgacgggtatccggcctgagagggtgatcggacacactggaactgagacacggtccagactcctacgggaggcagcagtagggaatattgctcaatgggggaaaccctgaagcagcaacgccgcgtggaggatgaaggttttcggattgtaaactccttttgttagagaagattatgacggtatctaacgaataagcaccggctaactccgtgccagcagccgcggtaatacggagggtgcaagcgttactcggaatcactgggcgtaaagagcgcgtaggcgggataataagtcagatgtgaaatcctatggcttaaccatagaactgcatttgaaactattattctagagtatgggagaggtaggtggaattcttggtgtaggggtaaaatccgtagagatcaagaggaatactcattgcgaaggcgacctgctggaacattactgacgctgatgcgcgaaagcgtggggagcaaacaggattagataccctggtagtccacgccctaaacgatgaatgctagttgttggggtgcttgtcactccagtaatgcagctaacgcattaagcattccgcctggggagtacggtcgcaagattaaaactcaaaggaatagacggggacccgcacaagcggtggagcatgtggtttaattcgaagatacgcgaagaaccttacctaggcttgacattgatagaatccgctagagatagtggagtgctagcttgctagaacttgaaaacaggtgctgcacggctgtcgtcagctcgtgtcgtgagatgttgggttaagtcccgcaacgagcgcaaccctcgtccttagttgctaactattcggtagagcactctaaggagactgccttcgtaaggaggaggaaggtgaggatgacgtcaagtcatcatggcccttacgcctagggctacacacgtgctacaatggtatgtacaaagagaagcaataccgcgaggtggagcaaatctataaaacatatctcagttcggattgtagtctgcaactcgactacatgaagctggaatcgctagtaatcgcaaatcagcaatgttgcggtgaatacgttcccgggtcttgtactcaccgcccgtcacaccatgggagttgtattcgccttaagtcggaatgccaaactggctaccgcccacggcggatgcagcgactggggtgaagtcgtaacaaggtaaccgtaggtgaacctgcggttggatcacctcctttcaagaga

SEQ ID NO: 1000 - DNA, 1510 bp, Heliobacterium modesticaldum
gatcctggctcaggacgaacgctggcggcatgcctaacacatgcaagtcgaacggagagctgaagtttcgatggaggctcttagtggcggacgggtgagtaacgcgtggataacctgcctgagagtgggggataacagcccgaaagggctgctaataccgcataacgttgtccggggacatccccggataaccaaaggagcaatccgctgtcagatgggtccgcgtccgattagctagttggcggggtaagagcccaccaaggcaacgatcggtagccggcctgagagggtgaacggccacactgggactgagacacggcccagactcctacgggaggcagcagtggggaatcttccgcaatgggcgaaagcctgacggagcaatgccgcgtgggggacgaaggtcttcggattgtaaacccttgtcttcagggaagaagaatgacggtacctgaggaggaagccccggctaactacgtgccagcagccgcggtaatacgtagggggcgagcgttgtccggaattactgggcgtaaagcgcgtgcaggcggacctttaagtctgaggtgaaagaccggagctcaactccggggcggccttggaaactggaggtcttgagggatggagaggacagtggaattcccggtgtagcggtgaaatgcgtagatatcgggaggaaccccagtggcgaaggcgactgtctggacattacctgacgctgaggcgcgaaagcgtggggagcaaacaggattagataccctggtagtccacgccgtaaacgatgagtgctaggtgttgggggtatcgacccctccagtgccgcagtcaacacaataagcactccgcctggggagtacggccgcaaggttgaaactcaaaggaattgacgggggcccgcacaagcggtggagcatgtggtttaattcgacgcaacgcgaagaaccttaccaaggcttgacatcctccgaaccttgcagagatgcgagggtgcccttcggggagcggagagacaggtggtgcatggttgtcgtcagctcgtgtcgtgagatgttgggttaagtcccgcaacgagcgcaacccttatcctcagttgccagcgagagagacggggactctggggagactgcccgggacgaccgggaggaaggcggggatgacgtcaaatcatcatgccccttatgtcttgggctacacacgtgctacaatgggcggtacaaaccgaggcgaagccgcgaggcggagcgaaccggagaaagccgctcacagttcggattgctctctgcaactcgagagcatgaaggcggaatcgctagtaatcgcgggtcagcataccgcggtgaatacgttcccgggccttgtacacaccgcccgtcacaccacgaaagtcggcaacacccgaagtcggtgcgctaaccgcaaggaggcagccgccgaaggtggggtcgatgattggggtgaagtcgtaacaaggtagccgtatcggaaggtgcggctggatcacctcctttct

SEQ ID NO: 1001 - DNA, 1528 bp, Herbaspirillum seropedicae
agagtttgatcctggctcagattgaacgctggcggcatgccttacacatgcaagtcgaacggcagcataggagcttgctcctgatggcgagtggcgaacgggtgagtaatatatcggaacgtgccctagagtgggggataactagtcgaaagattagctaataccgcatacgatctacggatgaaagtgggggatcgcaagacctcatgctcctggagcggccgatatctgattagctagttggtggggtaaaagcctaccaaggcgacgatcagtagctggtctgagaggacgaccagccacactgggactgagacacggcccagactcctacgggaggcagcagtggggaattttggacaatgggggcaaccctgatccagcaatgccgcgtgagtgaagaaggccttcgggttgtaaagctcttttgtcagggaagaaacggttttggctaatatccagaactaatgacggtacctgaagaataagcaccggctaactacgtgccagcagccgcggtaatacgtagggtgcaagcgttaatcggaattactgggcgtaaagcgtgcgcaggcggttgtgtaagacagatgtgaaatccccgggctcaacctgggaattgcatttgtgactgcacggctagagtgtgtcagaggggggtagaattccacgtgtagcagtgaaatgcgtagatatgtggaggaataccgatggcgaaggcagccccctgggataacactgacgctcatgcacgaaagcgtggggagcaaacaggattagataccctggtagtccacgccctaaacgatgtctactagttgtcgggtcttaattgacttggtaacgcagctaacgcgtgaagtagaccgcctggggagtacggtcgcaagattaaaactcaaaggaattgacggggacccgcacaagcggtggatgatgtggattaattcgatgcaacgcgaaaaaccttacctacccttgacatggtcggaatcctgaagagatttgggagtgctcgaaagagaaccggcgcacaggtgctgcatggctgtcgtcagctcgtgtcgtgagatgttgggttaagtccccgcaacgagcgcaacccttgtcattagttgctacgaaagggcactctaatgagactgccggtgacaaaccggaggaaggtggggatgacgtcaagtcctcatggcccttatgggtagggcttcacacgtcatacaatggtacatacagagggccgccaacccgcgaggggggagctaatcccagaaagtgtatcgtagtccggattggagtctgcaactcgactccatgaagttggaatcgctagtaatcgcggatcagcatgtcgcggtgaatacgttcccgggtcttgtacacaccgcccgtcacaccatgggagcgggttttaccagaagtgggtagcctaaccgtaaggagggcgctcaccacggtaggattcgtgactggggtgaagtcgtaacaaggtagccgtatcggaaggtgcggctggatcacctccttt

SEQ ID NO: 1002 - DNA, 1489 bp, Herbaspirillum sp.
  JC206
agagtttgatcctggctcagattgaacgctggcggcatgccttacacatgcaagtcgaacggcagcgcgggcttcggcctggcggcgagtggcgaacgggtgagtaatatatcggaacgtgccctagagtgggggataactagtcgaaagattagctaataccgcatacgatctacggatgaaagtgggggaccgcaaggcctcacgctcctggagcggccgatatctgattagctagttggtggggtaaaggcctaccaaggcgacgatcagtagctggtctgagaggacgaccagccacactgggactgagacacggcccagactcctacgggaggcagcagtggggaattttggacaatgggggcaaccctgatccagcaatgccgcgtgtgtgaagaaggccttcgggttgtaaagcacttttgtctgggaagaaatcccttgggctaatacctcgaggggatgacggtaccggaagaataagcaccggctaactacgtgccagcagccgcggtaatacgtagggtgcgagcgttaatcggaattactgggcgtaaagcgtgcgcaggcggttgtgcaagacagatgtgaaatccccgggcttaacctgggaactgcatttgtgactgcacggctagagtgtgtcagaggggggtagaattccacgtgtagcagtgaaatgcgtagagatgtggaggaataccgatggcgaaggcagccccctgggataacactgacgctcatgcacgaaagcgtggggagcaaacaggattagataccctggtagtccacgccctaaacgatgtctactagttgtcgggtcttaattgacttggtaacgcagctaacgcgtgaagtagaccgcctggggagtacggtcgcaagattaaaactcaaaggaattgacggggacccgcacaagcggtggatgatgtggattaattcgatgcaacgcgaaaaaccttacctacccttgacatggtcggaatcctccagagatgggggagtgcccgaaagggaaccgacgcacaggtgctgcatggctgtcgtcagctcgtgtcgtgagatgttgggttaagtcccgcaacgagcgcaacccttgtcattagttgctacgaaagggcactctaatgagactgccggtgacaaaccggaggaaggtggggatgacgtcaagtcctcatggcccttatgggtagggcttcacacgtcatacaatggtacatacagagggccgccaacccgcgagggggagctaatcccagaaagtgtatcgtagtccggattgcagtctgcaactcgactgcatgaagttggaatcgctagtaatcgcggatcagcatgtcgcggtgaatacgttcccgggtcttgtacacaccgcccgtcacaccatgggagcgggttttaccagaagtgggtagcctaaccgcaaggagggcgcttaccacggtaggattcgtgactggggtgaagtcgtaacaaggta

SEQ ID NO: 1003 - DNA, 1361 bp, Histophilus somni
ctttctctgctgacgagtggcggacgggtgagtaaagcttgggaatctggcgaatggagggggatagccacgggaaactgtgggtaataccgcgtaaggtctaaggactaaaggggtgggactgagaggccacctgccatttgatgagcccaagtgggattaggtagttggtgaggtaagggctcaccaagctgacgatctctagctggtctgagaggatggccagccacactggaactgagacacggtccagactcctacgggaggcagcagtggggaatattgcgcaatggggggaaccctgacgcagccatgccgcgtgaatgaagaaggccttcgggttgtaaagttctttcggtgatgaggaaggcgattagtttaagagattaattgattgacgataatcacagaagaagcaccggctaactccgtgccagcagccgcggtaatacggagggtgcgagcgttaatcggaatgactgggcgtaaagggcacgcaggtggtgacttaagtgaggtgtgaaatccccgggcttaacctgggaacagcatttcagactgggtgactagagtactttagggaggggtagaattccacgtgtagcggtgaaatgcgtagagatgtggaggaataccgaaggcgaaggcagccccttgggaagatactgacgctcgagtgcgaaagcgtggggagcaaacaggattagataccctggtagtccacgctgtaaacgatgtcgatttggggattgggtgaatacttggtgcccgaagctaacgtgataaatcgaccgcctggggagtacggccgcaaggttaaaactcaaatgaattgacgggggcccgcacaagcggtggagcatgtggtttaattcgatgcaacgcgaagaaccttacctactcttgacatcctaagaagccgccagagatggtggtgtgcctacgggagcttagagacaggtgctgcatggctgtcgtcagctcgtgttgtgaaatgttgggttaagtcccgcaacgagcgcaacccttatcctttgttgccagcatgttagggtgggaactcaaaggagactgccggtgataaactggaggaaggtggggatgacgtcaagtcatcatggcccttacgagtagggctacacacgtgctacaatggcgtatacagagggaggcgagcctgcgagggtaagcgaagctcagaaagtacgtctaagtccggattggagtctggaactcgactccatgaagtcggaatcgctagtaatcgcggatcagaatgtcgcggtgaatacgttcccgggccttgtacacaccgcccgtcacaccatgggagtgggttgtaccagaagtagatagcttaa

SEQ ID NO: 1004 - DNA, 1332 bp, Holdemania filiformis
gcgaacgggtgagtaatacataagcaatctgcccatcggcctgggataacagttggaaacgactgctaataccggataggtgatgaagaggcatctctcgatcattaaagttgggatacaacacggatggatgagcttatggcgtattagctagtaggtgaggtaacggctcacctaggcgatgatacgtagccgacctgagagggtgaccggccacattgggactgagacacggcccaaactcctacgggaggcagcagtagggaattttcggcaatgggcgaaagcctgaccgagcaacgccgcgtgagtgaagaaggccttcgggttgtaaagctctgttgtgaaggaagaacggctcatacagggaatggtatgggagtgacggtactttaccagaaacccggctaactacgtgccacagccgcggtaatacgtaggtggcgagcgttatccggaattattgggcgtaaagggtgcgcaggcggtttgttaagtttaaggtgaaagcgtggggcttaaccccatatagtaaaactgacagactaagtacaggagagggcaatggaattccatgtgtagcggtaaaatgcgtagatatatggaggaacaccagtggcgaaggcggttgcctggcctgtaactgacgctcatgcacgaaagcgtggggagcaatagattaataccctatagtccacgccgtaaacgatgagaactaagtgttggggaaactcatgctgcagttaacgcaataagttctccgcctggggagtatgcacgcaagtgtgaaactcagaggaattgacgggggcccgcacaagcggtggagtatgtggtttaattcgacgcaacgcgaagaaccttaccaggtcttgacatcccctgcaaagacatagagatatgttggaggttatcagggagacaggtggtgcatggttgtcgtcagctcgtgtcgtgagatgttgggttaagtcccgcaacgagcgcaacccttgtctttagttgctaacattaagttgaggactctagagagactgccggtgacaaaccggaggaaggtggggatgacgtcaaatcatcatgccccttatgacctgggctacacacgtactacaatggcggatacaacgagaagcaagacagtgatgtggagcaaaactcagaaagtccgtctcagttcggattgaagtctgcaacccgacttcatgaagccggaatcgctagtaatcgcggatcagcatgccgcggtgaatacgttctcgggccttgtacacaccgcccgtcaaaccatgagagttggcaatacccgaagccggtggcctaacctcgcaa

SEQ ID NO: 1005 - DNA, 1510 bp, Hydrogenoanaerobacterium saccharovorans
gagtttgatcatggctcaggacgaacgctggcggcgcgcctaacacatgcaagtcgaacggaactgttcggatgaagttttcggatggatgaagaacagtttagtggcggacgggtgagtaacacgtgagcaacctgcctttcagaggggaataacattcggaaacgaatgctaataccgcataatgcaacgagatggcatcatcttgctgccaaagatttatcgctgaaagatgggctcgcgcccgattagctagttggtgaggtaatggcccaccaaggcaacgatcggtagccggactgagaggttgatcggccacattgggactgagacacggcccagactcctacgggaggcagcagtgggggatattgcacaatgggcgaaagcctgatgcagcgacgccgcgtgagggaagacggttttcggattgtaaacctctgtcttcagggacgataatgacggtacctgaggaggaagcaccggctaactacgtgccagcagccgcggtaatacgtagggtgcaagcgttgtccggaattactgggtgtaaagggagcgtaggcgggattgtaagttggatgtgtaatgtaccggctcaaccggtaacttgcattcaaaactgcagttcttgagtgaagtagaggcaggcggaattcctagtgtagcggtgaaatgcgtagatattaggaggaacaccagtggcgaaggcggcctgctgggcttttactgacgctgaggctcgaaagcatgggtagcaaacaggattagataccctggtagtccatgccgtaaacgatgattactaggtgtgggtgtgcaagcatccgtgccgcagctaacgcaataagtaatccacctggggagtacggccgcaaggctgaaactcaaaggaattgacgggggcccgcacaagcagtggattatgtggtttaattcgaagcaacgcgaagaaccttaccaggtcttgacatcccttgcataccatagagatatgggaagcccttcggggcaaggagacaggtggtgcatggttgtcgtcagctcgtgtcgtgagatgttgggttaagtcccgcaacgagcgcaacccttactattagttgctacgcaagagcactctaataggactgccgttgacaaaacggaggaaggtggggatgacgtcaaatcatcatgccccttatgacctgggctacacacgtaatacaatgacgataaacagagggtagcgaagccgcgaggtggagccaatccccaaaagtcgtctcagttcggattgcaggctgcaactcgcctgcatgaagtcggaattgctagtaatcgcaggtcagcatactgcggtgaatacgttcccgggccttgtacacaccgcccgtcacaccatgggagtcggtaacacccgaagccagtagtctaaccgcaaggaggacgctgccgaaggtgggattgatgactggggtgaagtcgtaacaaggtagccgtatcggaaggtgcggctggatcacctcct

SEQ ID NO: 1006 - DNA, 1507 bp, Hyperthermus butylicus
actccggttgatcctgccggacccgaccgctatcggggtgggactaagccatgggagtcgtgcgcccccggatgcgggggcgcggcggacggctgagtaacacgtggctaacctaccctcgggacggggataaccccgggaaactggggctaatccccgataggcgagggggcctggaacgggtccctcgccgaaagggcgcgcggagcttccccgcgcgccgcccgaggatggggctgcggcccatcaggtagttggcggggtaacggcccgccaagccgataacgggtaggggccgtgggagcgggaccccccagatgggcactgagacaagggcccaggccctacggggcgcaccaggcgcgaaacctccgcaatgcgggcaaccgtgacggggtcaccccgagtgccgccgataaggcggctgttccccgctgtaagaaggcgggggagtaagcggggggcaagtctggtgtcagccgccgcggtaataccagccccgcgagcggtcgggatgcttactgggcctaaagcgcccgtagccggcccggtaagtccccccctaaagccccgggctcaacccggggagtgggggggatactaccgggctagggggcgggagaggccgagggtactcccggggtaggggcgaaatccgataatcccgggaggaccaccagtggcgaaggcgctcggctggaacgcgcccgacggtgaggggcgaaagccgggggagcaaaccggattagatacccgggtagtcccggctgtaaacgatgcgggctaggtgttgggcgggcttggagcccgcccagtgccgcagggaagccgttaagcccgccgcctggggagtacggccgcaaggctgaaacttaaaggaattggcgggggagcaccacaaggggtggagcctgcggcttaattggagtcaacgccgggaatcttaccgggggcgacagcaggatgacggccaggctgacgaccttgcccgacgcgctgagaggaggtgcatggccgtcgccagctcgtgccgtgaggtgtccggttaagtccggcaacgagcgagacccccacccctagttgctaccccgggggccaccccgggggcacactagggggactgccgccgtccaaggcggaggaaggagggggccacggcaggtcagcatgccccgaatcccccgggctgcacgcgggctacaatggcggggacagcgggatccgaccccgaaagggggaggcaatcccttaaaccccgccgcagttgggatcgagggctgcaactcgccctcgtgaacgcggaatccctagtaaccgcgcgttagcatcgcgcggtgaatacgtccctgctccttgcacacaccgcccgtcgctccacccgagcgggggaggggtgaggccctgcccctgggggcaaccccgggggtggggtcgaacccctcccccgcgaggggggagaagtcgtaacaaggtagccgtaggggaacctgcggctggatcacctcct

SEQ ID NO: 1007 - DNA, 1333 bp, Hyphomicrobium sulfonivorans
gagtttgatcctggctcagaacgaacgatggcggcaggcctaacacatgcaagtcgaacgagtggcagacgggtgagtaacgcgcgggaaccttcccaatggtgcggaatagcccagggaaacttggagtaataccgcataaggaaagtcgccattggatgggcccgcgtcgattagctagttggtagggtaacggcctaccaaggcgacgatccgtagctggtttgagagaatgaccagccacactgggactgagacacggcccagactcctacgggaggcagcagtggggaatcttggacaatgggcgcaagcctgatccagccatgccgcgtgagtgacgaaggccttagggttgtaaagctcttttgccggggacgatgacggtacccggagaataagtcccggctaacttcgtgccagcagccgcggtaatacgaaggggactagcgttgttcggaattactgggcgtaaagcgcacgtaggcggattattaagtcaggggtgaaatcccggggctcaacctcggaactgcctttgatactggtaatctagagtccgatagaggtgggtggaattcctagtgtagaggtgaaattcgtagatattaggaagaacaccagtggcgaaggcggcccactggatcgactgacgctgaggtgcgaaagcgtggggagcaaacaggattagataccctggtagtccacgccgtaaacgatggatgctagccgtcggcatgtcggtggcgcagctaacgcattaagcatcccgcctggggagtacggccgcaaggttaaaactcaaaggaattgacgggggcccgcacaagcggtggagcatgtggtttaattcgacgcaacgcgaagaaccttaccagctcttgacatgcacaggtgctgcatggctgtcgtcagctcgtgtcgtgagatgttgggttaagtcccgcaacgagcgcaaccctcgccattagttgccatcatgggcactctagtgggactgccggtgataagccggaggaaggtggggatgacgtcaagtcatcatggcccttacgggctgggctacacacgtgctacaatggcggtcagtgggcagcaacacagcgatgtgaagctaatctcagccgtctcagttcggatggtctctgcaactcgagaccagaagttggaatcgctagtaatcgcggatcagcatgccgcggtgaatacgttcccgggccttgtacacaccgcccgtcacaccatgggagttggttctacccgaaggcgatcgctaggcagtcgaccacggtagggtcagcgactggggtgaagtcgtaacaaggtaaccgta

SEQ ID NO: 1008 - DNA, 1448 bp, Hyphomonas neptunium
agagtttgattctggctcagaacgaacgctggcggcaggcctaacacatgcaagtcgaacgatatagtggcagacgggtgagtaacgcgtgggaacgtacctttcactacggaatagctctgggaaactggtggtaataccgtatacgcccttagggggaaagatttatcggtgaaagatcggcccgcgttggattagctagttggtgaggtaatggctcacaaaggcgacgatccatagctggtctgagaggatgatcagccacactgggactgagacacggcccagactcctacgggaggcagcagtggggaatcttgcacaatgggcgaaagcctgatgcagccatgccgcgtgaatgatgaaggccttagggttgtaaaattctttcgtcagggatgataatgaccgtacctgaagaagaagccccggctaacttcgtgccagcagccgcggtaatacgaagggggctagcgttgttcggaattactgggcgtaaagcgcacgtaggcggacttttaagtcaggtgtgaaatcccgaggctcaacctcggaactgcatttgaaactggaagtctggagatcaggagaggttagcggaataccgagtgtagaggtgaaattcgtagatattcggtggaacaccagtggcgaaggcggctaactggactgatactgacgctgaggtgcgaaagtgtggggagcaaacaggattagataccctggtagtccacaccgtaaacgatgagagctagttgttggcaggcatgcctgtcggtgacgcagttaacacattaagctctccgcctggggagtacggccgcaaggttaaaactcaaagaaattgacgggggcccgcacaagcggtggagcatgtggtttaattcgaagcaacgcgcagaaccttacctacccttgacatgtctagtatggtttccggagacggattccttcagttcggctggctagaacacaggtgctgcatggctgtcgtcagctcgtgtcgtgagatgttgggttaagtcccgcaacgagcgcaaccctcatccttagttgccatcacgtttgggtgggcactctaaggaaactgccggtggcaagccggaggaaggtggggatgacgtcaagtcctcatggcccttacgggtagggctacacacgtgctacaatggcagtgacaatgggataatcccaaaaagctgtctcagttcggattgtcgtctgcaactcgacggcatgaaggtggaatcgctagtaatcgtggatcagcatgccacggtgaatacgttcccgggccttgtacacaccgcccgtcacatcatgggaattggttctacccgaagatcgtgcgctaacttcggaggcagcgagccacggtaggatcagtaactgggatgaagtcgtaacaaggtagccgtaggggaacctgcggctggatcacctccttt

SEQ ID NO: 1009 - DNA, 1287 bp, Ignatzschineria indica
ttaacacatgcaagtcgaacgagtggcggacgggtgagtaatgcataggaatctaccttttagtctaggataactacccgaaagggtggctaatactggatgtgtaaaggcgctaagagatgagcctatgtgggattagctagttggtgaggtaacggctcaccaaggcgacgatctctagctggtttgagaggatgatcagccacactgggactgagacacggcccagactcctacgggaggcagcagtggggaatattggacaatgggcgaaagcctgatccagcaataccgcgtgtgtgaagaaggccctagggttgtaaagcacttttgttagggagaatgatgttacctaaagaataagcaccggctaactccgtgccagcagccgcggtaatacggagggtgcaagcgttaatcggaattactgggcgtaaagggcgcgtaggtggtatcttaagttgggtgtgaaatccccgggctcaacctgggaattgcatccaaaactggggtgctagagtgtggtagagggtagcggaatttctggtgtagcggtgaaatgcgtagatatcagaaggaacatcaatggcgaaggcagctacctgggccaactgacgctgaggcgcgaaagcgtggggagcaaacaggattagataccctggtagtccacgctataaacgatgacaacttgttgatggggcttcgttgacggagctaacgcgttaagttgtccgcctggggagtacggtcgcaaggctgaaactcaaaggaattgacggggacccgcacaagcggtggagcatgtggtttaattcgatgcaacgcgaagaaccttacctggtcttgacatcgacaggtgctgcatggctgtcgtcagctcgtgtcgtgagatgttcggttaagtccggcaacgagcgcaacccttgtccttatttgccagcacgtgggaactctaaggagactgccggtgataaaccggaggaaggtagggacgacgtcaagtcatcatggcccttatgaccagggctacacacgtgctacaatggtcggcaatgggttgccaaaccgcgaggtggagctaatcccacccgatcccagtccggatgtagtctgcaactcgactacagaagtcggaatcgctagtaatcgtggatcagaatgccacggtgaatacgttcccgggtcttgtacacaccgcccgtcacaccatggaagttgattgctccagaagtaggtgcttagggcgcttaccacggagtggtcgatgactggggtgaagtcgtaaca

SEQ ID NO: 1010 - DNA, 1317 bp, Ignatzschineria sp.
  NML 95-0260
acgctggcggtatgcttaacacatgcaagtcgaacgagtggcggacgggtgagtaatgcataggaatctaccttttagtctaggataactacccgaaagggtggctaatactggatgtgtaaaggcgctaagagatgagcctatgtgggattagctagttggtgaggtaatggctcaccaaggcgacgatctctagctggtttgagaggatgatcagccacactgggactgagacacggcccagactcctacgggaggcagcagtggggaatattggacaatgggcgcaagcctgatccagcaataccgcgtgtgtgaagaaggccctagggttgtaaagcacttttgttagggagaatgatgttacctaaagaataagcaccggctaactccgtgccagcagccgcggtaatacggagggtgcaagcgttaatcggaattactgggcgtaaagggcgcgtaggtggtactttaagttgggtgtgaaatccccgggctcaacctgggaattgcatccaaaactggggtgctagagtgtggtagagggtagcggaatttctggtgtagcggtgaaatgcgtagatatcagaaggaacatcaatggcgaaggcagctacctgggccaactgacgctgaggcgcgaaagcgtggggagcaaacaggattagataccctggtagtccacgctgtaaacgatgacaacttgttgatggggcttcgttgacggagctaacgcgttaagttgtccgcctggggagtacggtcgcaaggctgaaactcaaaggaattgacggggacccgcacaagcggtggagcatgtggtttaattcgatgcaacgcgaagaaccttacctggtcttgacatcgacaggtgctgcatggctgtcgtcagctcgtgtcgtgagatgttcggttaagtccggcaacgagcgcaacccttgtccttatttgccagcacgtgggaactctaaggagactgccggtgataaaccggaggaaggtagggacgacgtcaagtcatcatggcccttatgaccagggctacacacgtgctacaatggtcggcaatgggttgccaagccgcgaggtggagctaatctcatccgatcccagtccggatgtagtctgcaactcgactacagaagtcggaatcgctagtaatcgtggatcagaatgccacggtgaatacgttcccgggtcttgtacacaccgcccgtcacaccatggaagttgattgctccagaagtaggtgcttagggcgcttaccacggagtggtcgatgactggggtgaagtcgtaacaaggtagccgtagggg

SEQ ID NO: 1011 - DNA, 1469 bp, Ignicoccus islandicus
  modified_base (1377)..(1380): a, c, t, g, unknown or other
cggacccgaccgctatcggggtaaggctaagccatgggagtcgaacgcccgccgccgcgggcgtggcggacggctgagtaacacgtggctaacctaccctcgggagggggataacaccgggaaactggtgctaatcccccataggggcggtggcctggaagggtaccgccccgaaagggggaggcgggggttatcgccgcctctccgcccgaggatgcggctgcgccctatcaggtagttggcggggtaacggcccgccaagcctaagacgggtaggggccgtgggagcgggagcccccagatgggcactgagacaagggcccaggccctacggggcgcaccaggcgcgaaaactcgccaatgcgggcaaccgtgacggggttaccccgagtgcccccattacgggggcttttccccgctgtaaacaggcgggggtaataagcggggggcaagtctggtgtcagccgccgcggtaataccagccccgcgagtggtcgggacgtttattgggcctaaagcgcccgtagccggcctggtaggtcccctcctaaaacccggggctcaaccccgggggtggaggggaaaccaccaggctagggggcgggagaggccgagggtactcccggggtaggggcgaaatccgataatcccgggaggaccgccagtggcgaaggcgctcggctggaacgcgcccgacggtgaggggcgaaagccgggggagcgaaccggattagataccgggtagtcccggctgtaaacgatgcgggctaggtgttgggtgggcttcgagcccgcccagtgccgcagggaagccgttaagcccgccgcctggggagtacggccgcaaggctgaaacttaaaggaattggcgggggagcaccacaaggggtggcaggtgcggcttaattggagtcaacgccgggaacctcaccgggggcgacagcaggatgaaggtcaggctgaagaccttacctgacgcgctgagaggaggtgcatggccgtcgccagctcgtgccgtgaggtgtccggttaagtccggcaacgagcgagacccccacccctacttgctacccggggctccggccccggggcacagtagggggactgccgccgtataaggcggaggaaggagggggctatggcaggtcagcatgccccgaaacccccgggctgcacgcgggctacaatggcggggacagcgggttgcgaccccgaaagggggagcaaatccctcaaaccccgccgaggttgggatcgagggctgcaactcgccctcgtgaacgcggaatccctagtaaccgcacgttagcatcgtgcggtgaacacgtccctgctccttgcacacaccgcccgtcgctccacccgaggggacgggtnnnnaggcccccgtagggaaactcccgggtatcctcgaactccctcctctcgaggggggagaagtcgtaacaaggtagccgtaggggaacctg

SEQ ID NO: 1012 - DNA, 1414 bp, Inquilinus limosus
ttgaatcctggctcagaacgaacgctggcggcaggcctaacacatgcaagtcgaacgccccgcaaggggagtggcgcacgggtgagtaacacgtgggaacctaccttctggtacggaacaaccaagggaaactttggctaataccgtatacgacctccgggtgaaagatttatctgccggaagaggggccccgcgtccgattaggtagttggtggggtaaccggcctaccaagccgacgatcggtagctggtctgagaggatgaccagccacactgggactgagacacggcccagactcctacgggaggcagcagtggggaatattggacaatgggcgcaagcctgatccagccatgccgcgtgagtgatgaaggccttcgggttgtaaagctctttcacccacgacgatgatgacggtagtgggagaagaagccccggctaacttcgtgccagcagccgcggtaatacgaagggggcaagcgttgttcggaatgactgggcgtaaagggcgcgtaggcggttcgttgcgtcagatgtgaaagccccgggctcaacctgggaactgcatttgatacgggcgggcttgaatccaagagagggtggtggaattcccagtgtagaggtgaaattcgtagatattgggaagaacaccagtggcgaaggcggccacctggcttggcattgacgctgaggcgcgaaagcgtggggagcaaacaggattagataccctggtagtccacgccgtaaacgatgtgtgctagccgtcgggcagcttgctgttcggtggcgcagctaacgcgataagcacaccgcctggggagtacggtcgcaagattaaaactcaaaggaattgacgggggcccgcacaagcggtggagcatgtggtttaattcgaagcaacgcgcagaaccttaccaacccttgacatggggagtgtgggcctgagagatcgggtccgggtccttcagttcggctggctcccacacaggtgctgcatggctgtcgtcagctcgtgtcgtgagatgttgggttaagtcccgcaacgagcgcaaccctcctcttcagttgccatcattgagttgggcactctggagatactgccggtgacaagccggaggaaggcggggatgacgtcaagtcctcatggcccttacgggttgggctacacacgtgctacaatggcggtgacagtgggcagcgaaggggcgacctggagctaatccccaaaagccgtctcagttcggattgcactctgcaactcgggtgcatgaagttggaatcgctagtaatcgcggatcagcacgccgcggtgaatacgttcccgggccttgtacacaccgcccgtcacaccatgggagttggttttacccgaagacggtgcgctgacccgcaagggaggcagccggccacggt

SEQ ID NO: 1013 - DNA, 1473 bp, Janibacter limosus
gacgaacgctggcggcgtgcttaacacatgcaagtcgaacggtgaagctccagcttgctggagtggatcagtggcgaacgggtgagtaacacgtgagcaacctgccccagactctggaataagcgctggaaacggcgtctaatactggatacgagaccaacctgcatgggtatggtctggaaagtttttcggtttgggatgggctcgcggcctatcagcttgttggtgaggtaatggctcaccaaggcgacgacgggtagccggcctgagagggcgaccggccacactgggactgagacacggcccagactcctacgggaggcagcagtggggaatattgcacaatgggcgaaagcctgatgcagcgacgccgcgtgagggatgacggccttcgggttgtaaacctctttcagcagggaagaagcgaaagtgacggtacctgcagaagaagcaccggctaactacgtgccagcagccgcggtaatacgtagggtgcgagcgttgtccggaattattgggcgtaaagagcttgtaggcggtttgtcgcgtctgctgtgaaaatccggggctcaaccccggacttgcagtgggtacgggcagactagagtgtggtaggggagactggaattcctggtgtagcggtgaaatgcgcagatatcaggaggaacaccgatggcgaaggcaggtctctgggccactactgacgctgagaagcgaaagcatggggagcgaacaggattagataccctggtagtccatgccgtaaacgttgggaactaggtgtgggtctcattccacgagatccgtgccgcagctaacgcattaagttccccgcctggggagtacggccgcaaggctaaaactcaaaggaattgacgggggcccgcacaagcggcggagcatgcggattaattcgatgcaacgcgaagaaccttaccaaggcttgacatataccggaaacttccagagatggttgccccttttaggtcggtatacaggtggtgcatggttgtcgtcagctcgtgtcgtgagatgttgggttaagtcccgcaacgagcgcaaccctcgttctatgttgccagcacgtaatggtggggactcatggaagactgccggggtcaactcggaggaaggtggggatgacgtcaaatcatcatgccccttatgtcttgggcttcacgcatgctacaatggccggtacaaagggctgcgaaaccgcaaggtggagcgaatcccaaaaaaccggtctcagttcggattggggtctgcaactcgaccccatgaagtcggagtcgctagtaatcgcagatcagcaacgctgcggtgaatacgttcccgggccttgtacacaccgcccgtcaagtcacgaaagtcggtaacacccgaagccggtggcccaacccttgtggggggagccgtcgaaggtgggactggcgattgggactaagtcgtaacaaggtagccgtaccggaa

SEQ ID NO: 1014 - DNA, 1389 bp, Janibacter melonis
cgaacggtgaactttggagcttgctctaaggggatcagtggcgaacgggtgagtaacacgtgagtaacctgccccggactctggaataagcgctggaaacggcgtctaataccggatacgagacgcaaccgcatggttagtgtctggaaagtttttcggtctgggatggactcgcggcctatcagcttgttggtgaggtaatggctcaccaaggcgacgacgggtagccggcctgagagggcgaccggccacactgggactgagacacggcccagactcctacgggaggcagcagtggggaatattgcacaatgggcgaaagcctgatgcagcgacgccgcgtgagggatgacggccttcgggttgtaaacctctttcagcagggaagaagcgaaagtgacggtacctgcagaagaagcaccggctaactacgtgccagcagccgcggtaatacgtagggtgcgagcgttgtccggaattattgggcgtaaagagcttgtaggcggtttgtcgcgtctgctgtgaaaatccggggctcaaccccggacttgcagtgggtacgggcagactagagtgtggtaggggagactggaattcctggtgtagcggtgaaatgcgcagatatcaggaggaacaccgatggcgaaggcaggtctctgggccactactgacgctgagaagcgaaagcatggggagcgaacaggattagataccctggtagtccatgccgtaaacgttgggcgctaggtgtgggactcattccacgagttccgtgccgcagctaacgcattaagcgccccgcctggggagtacggccgcaaggctaaaactcaaaggaattgacgggggcccgcacaagcggcggagcatgcggattaattcgatgcaacgcgaagaaccttaccaaggcttgacatataccggaaacatccagagatgggtgccccttttggtcggtatacaggtggtgcatggttgtcgtcagctcgtgtcgtgagatgttgggttaagtcccgcaacgagcgcaaccctcgttctatgttgccagcacgtgatggtggggactcataggagactgccggggtcaactcggaggaaggtggggatgacgtcaaatcatcatgccccttatgtcttgggcttcacgcatgctacaatggccggtacaaagggctgcgataccgcaaggtggagcgaatcccaaaaaaccggtctcagttcggattggggtctgcaactcgaccccatgaagtcggagtcgctagtaatcgcagatcagcaacgctgcggtgaatacgttcccgggccttgtacacaccgcccgtcaagtcacgaaagtcggtaacacccgaagccggtggcccaacccttgtggggggagccgtcgaa

SEQ ID NO: 1015 - DNA, 1496 bp, Janthinobacterium sp.
  SY12
tagagtttgatcatggctcagattgaacgctggcggcatgccttacacatgcaagtcgaacggcagcacggagcttgctctggtggcgagtggcgaacgggtgagtaatatatcggaacgtaccctggagtgggggataacgtagcgaaagttacgctaataccgcatacgatctacggatgaaagtgggggatcgcaagacctcatgctcgtggagcggccgatatctgattagctagttggtagggtaaaagcctaccaaggcatcgatcagtagctggtctgagaggacgaccagccacactggaactgagacacggtccagactcctacgggaggcagcagtggggaattttggacaatgggcgaaagcctgatccagcaatgccgcgtgagtgaagaaggccttcgggttgtaaagctcttttgtcagggaagaaacggtgagggctaatatcccttgctaatgacggtacctgaagaataagcaccggctaactacgtgccagcagccgcggtaatacgtagggtgcaagcgttaatcggaattactgggcgtaaagcgtgcgcaggcggctttgtaagtctgatgtgaaatccccgggctcaacctgggaattgcattggagactgcaaggctagaatctggcagaggggggtagaattccacgtgtagcagtgaaatgcgtagatatgtggaggaacaccgatggcgaaggcagccccctgggtcaagattgacgctcatgcacgaaagcgtggggagcaaacaggattagataccctggtagtccacgccctaaacgatgtctactagttgtcgggtcttaattgacttggtaacgcagctaacgcgtgaagtagaccgcctggggagtacggtcgcaagattaaaactcaaaggaattgacggggacccgcacaagcggtggatgatgtggattaattcgatgcaacgcgaaaaaccttacctacccttgacatggctggaatccctgagagattggggagtgctcgaaagagaaccagtacacaggtgctgcatggctgtcgtcagctcgtgtcgtgagatgttgggttaagtcccgcaacgagcgcaacccttgtcattagttgctacgaaagggcactctaatgagactgccggtgacaaaccggaggaaggtggggatgacgtcaagtcctcatggcccttacgggtagggcttcacacgtcatacaatggtacatacagagcgccgccaacccgcgagggggagctaatcgcagaaagtgtatcgtagtccggattgtagtctgcaactcgactgcatgaagttggaatcgctagtaatcgcggatcagcatgtcgcggtgaatacgttcccgggtcttgtacacaccgcccgtcacaccatgggagcgggttttaccagaagtaggtagcttaaccgcaaggagggcgcttaccacggtaggattcgtgactggggtgaagtcgtaacaaggtagccgta

SEQ ID NO: 1016 - DNA, 1478 bp, Johnsonella ignava
  modified_base (37)..(37): a, c, t, g, unknown or other
  modified_base (86)..(86): a, c, t, g, unknown or other
  modified_base (408)..(408): a, c, t, g, unknown or other
  modified_base (452)..(452): a, c, t, g, unknown or other
  modified_base (477)..(477): a, c, t, g, unknown or other
  modified_base (480)..(480): a, c, t, g, unknown or other
  modified_base (1338)..(1338): a, c, t, g, unknown or other
tgaacgctggcggcgtgcttaacacatgcaagtcgancggagactttttcagtgcaaccttcggggagcaagagaagtcttagtgncggacgggtgagtaacgcgtgggcaacctgcctcgcaccgtgggataacagggggaagctcctgctaataccgcataaagtatatagacgcatgtcaatatacaaaaagggataccggtgagagatgggcccgcgtccgattagatagttggcaggatagcagcctaccaagtcaacgatcggtagccggcttgagagagtggacggccacactgggactgagacacggcccagactcctacgggaggcagcagtggggaatattggacaatgggggcaaccctgatccagcgacgccgcgtgagtgaagaagtatctcggnacgtaaagctctatcagcagggaagaaaaaagacggtacctgantaagaagccccggctaactacgtgncancagccgcggtaatacgtagggggcaagcgttatccggaattactgggtgtaaagggagcgtagacggctatgcaagtctggagtgaaatgccggggctcaaccccggagctgctctggaaactgcgtggcttgagtgtcggaggggcaggcggaattcccagtgtagcggtgaaatgcgtagatattgggaggaacaccggcggcgaaggcggcctgctggacgacaactgacgttgaggctcgaaggcgtgggtagcaaacaggattagataccctggtagtccacgcagtaaacgatgaatactaggtgtcggggagttaaatttccggtgccggcgcaaacgcaataagtattccacctggggagtacgttcgcaagaatgaaactcaaaggaattgacggggacccgcacaagcggtggagcatgtggtttaattcgaagcaacgcgaagaaccttaccaagccttgacatgccggtgaagggggagtaaaatcctctgccccttggggcaccggacacaggtggtgcatggttgtcgtcagctcgtgtcgtgagatgttgggttaagtcccgcaacgagcgcaaccctcattcccggtagccagcagtaagatggggactccggggagactgccgaggaagactcggaggaaggcggggatgacgtcaaatcatcatgccccttatggtttgggctacacacgtgctacaatggcgcagacagagggaagcaaggccgcgaggcagagcaaatctcaaaaactgcgtctcagttcggattgcaggctgcaactcgcctgcatgaagccggaatcgctagtaatcgcagatcagaatgctgcggtgaatacgtncccgggtcttgtacacaccgcccgtcacaccatgggagtcggcaatgcccgaagtcagtggcccaaccgtaaggagggagctgccgaaggcagggcggatgaccggggtgaagtcgtaacaaggtagccgtatcggaagg

SEQ ID NO: 1017 - DNA, 1523 bp, Jonquetella anthropi
gagagtttgatcctggctcaggataaacgctggcggcgtgcttaacacatgcaagttggacgggaatactcgaggaagagacttcggttaattttttgggtatgagagtagcggacgggtgagtaatgcataagaatctatccatcagagggggacaactgcgggaaaccggagctaataccccgtaagccggaaggtgaaagggagcaatccgctgatggaggagcttgtgtcctatcaggtagttggtgaggtaagagctcaccaagccgaagacgggtagccgggctgagaggttgtacggccacattggaactgagagacggtccagactcctacgggaggcagcagtggggaatattgggcaatgggcgaaagcctgacccagcgacgccgcgtgagggaagacggccttcgggttgtaaacctctgttgcaggggaagaaggaagtgacggtaccctgcgaggaagctccggcaaactacgtgccagcagccgcggtaatacgtagggagcgagcgttatccggaattactgggcgtaaagggcgcgtaggcggaatgacaagtcagcaagtgaaagcgtggggctcaaccccatgatgcggctgaaactgttattctagaggcatggagaggcaaacggaattcccggtgtagcggtgaaatgcgtagatatcgggaagaacaccagtggcgaaggcggtttgctggccatgaactgacgctcatagcgcgaaagctagggtagcaaacgggattagataccccggtagtcctagcagtaaacgatgtatgctgggtgtgggtgtagcgatacatccgtgccgaagttaacgcgataagcataccgcctggggagtacggtcgcaagattgaaactcaaaggaattgacgggggcccgcacaagcggtggagcacgtggtttaattcgatgcaaaccgaagaaccttacctgggcttgacatgtaaggaaaggtgtatggagacgtacaagtgtactgcttcggtagtacgccttacacaggtgctgcatggctgtcgtcagctcgtgtcgtgagatgttgggttaagtcccgcaacgagcgcaacccctattgccagttgctaacaggtagagctgagcactcaggcgagactgccgccgacaaggtggaggaaggtggggatgacgtcaagtcatcatggcccttatgcccagggccacacacatgctacaatggccggtacaaagggaagcgaggctgcgaagcggagcgaaccccaaaagccggtcccagttcggattgcagtctgcaactcgactgcatgaagttggaatcgctagtaatcgcgaatcagcgaagtcgcggtgaatacgttcccgggccttgtacacaccgcccgtcacaccatccgagttggatgcactccaagtcggtatctcaaccgcaaggggggagccgcccaaagtgtgtctggtgaggagggtgaagtcgtaacaaggtagccgtaccggaaggtgcggctggatcacctcctt

SEQ ID NO: 1018 - DNA, 1414 bp, Kerstersia gyiorum
gcgggatgctttacacatgcaagtcgaacggcagcacgaggagcttgctccttggtggcgagtggcgaacgggtgagtaatatatcggaacatgcccagtagcgggggataactactcgaaagagtggctaataccgcatacgtcctacgggagaaagcaggggaccttcgggccttgcactattggagtggccgagatcggattagctagttggtggggtaaaggcctaccaaggcgacgatccgtagctggtttgagaggacgaccagccacactgggactgagacacggcccagactcctacgggaggcagcagtggggaattttggacaatgggggaaaccctgatccagccatcccgcgtgtgcgatgaaggccttcgggttgtaaagcacttttgtcaggaaagaaatcgcccgggataatacctcgggtggatgacggtacctgaagaataagcaccggctaactacgtgccagcagccgcggtaatacgtagggtgcaagcgttaatcggaattactgggcgtaaagcgtgcgcaggcggttcggaaagaaagatgtgaaatcccagggcttaaccttggaactgcatttttaactaccgggctagagtgtgtcagaggggggtggaattccgcgtgtagcagtgaaatgcgtagatatgcggaggaacaccgatggcgaaggcagccccctgggataacactgacgctcatgcacgaaagcgtggggagcaaacaggattagataccctggtagtccacgccctaaacgatgtcaactagctgttggggccttcgggccttagtagcgcagctaacgcgtgaagttgaccgcctggggagtacggtcgcaagattaaaactcaaaggaattgacggggacccgcacaagcggtggatgatgtggattaattcgatgcaacgcgaaaaaccttacctacccttgacatgtctggaatcccgaagagatttgggagtgctcgcaagagaaccggaacacaggtgctgcatggctgtcgtcagctcgtgtcgtgagatgttgggttaagtcccgcaacgagcgcaacccttgtcattagttgctacgaaagggcactctaatgagactgccggtgacaaaccggaggaaggtggggatgacgtcaagtcctcatggcccttatgggtagggcttcacacgtcatacaatggtcgggacagagggttgccaaaccgcgaggtggagctaatctcagaaacccgatcgtagtccggattgtagtctgcaactcgactacatgaagtcggaatcgctagtaatcgcggatcagaatgtcgcggtgaatacgttcccgggtcttgtacacaccgcccgtcacaccatgggagtgggttctaccagaagtagttagcctaaccgcaaggaggg

SEQ ID NO: 1019 - DNA, 1541 bp, Kingella denitrificans
ttgaacataagagtttgatcctggctcagattgaacgctggcggcatgctttacacatgcaagtcggacggcagcgggggtgcttgcacctgccggcgagtggcgaacgggtgagtaacatattggaatgtaccgagtagtgggggataaccaatcgaaagattggctaataccgcatacgtcctgagggggaaagcaggggatcttcggaccttgcgctatttgagcagccaatatctgattagctagttggtggggtaaaggcccaccaaggcgacgatcagtagcgggtctgagaggatgatccgccacactgggactgagacacggcccagactcctacgggaggcagcagtggggaattttggacaatgggggcaaccctgatccagccatgccgcgtgtctgaagaaggccttcgggttgtaaaggacttttgttagggaagaaaagggaagtgttaataccactttttgttgacggtacctaaagaataagcaccggctaactacgtgccagcagccgcggtaatacgtagggtgcgagcgttaatcggaattactgggcgtaaagcgagcgcagacggttacttaagcaggatgtgaaatccccgggctcaacctgggaactgcgttctgaactgggtagctagagtatgtcagaggggggtagaattccacgtgtagcagtgaaatgcgtagagatgtggaggaataccgatggcgaaggcagccccctgggataatactgacgttcatgctcgaaagcgtgggtagcaaacaggattagataccctggtagtccacgccctaaacgatgtcgattagctgttgggcaacttgattgcttagtagcgtagctaacgcgtgaaatcgaccgcctggggagtacggtcgcaagattaaaactcaaaggaattgacggggacccgcacaagcggtggatgatgtggattaattcgatgcaacgcgaagaaccttacctggtcttgacatgtacggaagaactcagagacgagtttgtgccttcgggagccgtaacacaggtgctgcatggctgtcgtcagctcgtgtcgtgagatgttgggttaagtcccgcaacgagcgcaacccttgtcattagttgccatcatttagttgggcactctaatgagactgccggtgacaaaccggaggaaggtggggatgacgtcaagtcctcatggcccttatgaccagggcttcacacgtcatacaatggtcggtacagagggtagccaagccgcgaggtggagccaatcccagaaaaccgatcgtagtccggattgcactctgcaactcgagtgcatgaagtcggaatcgctagtaatcgcaggtcagcatactgcggtgaatacgttcccgggtcttgtacacaccgcccgtcacaccatgggagtgggggataccagaagtaggtagggtaaccgcaaggagcccgcttaccacggtatgcttcatgactggggtgaagtcgtaacaaggtagccgtaggggaacctgcggctggatcacctcctttct

SEQ ID NO: 1020 - DNA, 1288 bp, Kingella sp.
  P1 oral cone MB2_C20
cgctggcggcatgctttacacatgcaagtcgaacgagtggcgaacgggtgagtaagatattggaacgtaccgagtaatgggggataactatccgaaaggatagctaataccgcatacggaaagacgttattcgagcggccaataactgattagctagttggaggggtaaaggcccaccaaggcgacgatcagtagcgggtctgagaggatgatccgccacactgggactgagacacggcccagactcctacgggaggcagcagtggggaattttggacaatgggcgcaagcctgatccagccatgccgcgtgtctgaagaaggccttcgggttgtaaaggacttttgttagggaagatgacggtacctaaagaataagcaccggctaactacgtgccagcagccgcggtaatacgtagggtgcgagcgttaatcggaattactgggcgtaaagcgagcgcagacggtttattaagcaagatgtgaaatccccgagcttaacttgggaactgcgttttgaactggtaggctagagtatgtcagaggggggtagaattccacgtgtagcagtgaaatgcgtagatatcaagaagaatacctattgcgaaggcgatctgctggaactactgacgctaatgcgtgaaagcgtggggagcaaacaggattagataccctggtagtccacgccctaaacgatgtataccggttgttgctgcggcagtaatccacctaacggattaagtataccgcctggggagtacggtcgcaagattaaaactcaaaggaatagacggggacccgcacaagcggtggatgatgtggattaattcgatgcaacgcgaagaaccttacctggtcttgacatgcacaggtgctgcatggctgtcgtcagctcgtgtcgtgagatgttgggttaagtcccgcaacgagcgcaacccttgtcattagttgccaccatgggcactctaatgagactgccggtgacaaaccggaggaaggtggggatgacgtcaagtcctcatggcccttatgaccagggcttcacacgtcatacaatggtcggcagagggtagccaaaccgcgaggtggagccaatctcagccgatcgtagtccggatgcactctgcaactcgagtgcagaagtcggaatcgctagtaatcgcaggtcagcatactgcggtgaatacgttcccgggtcttgtacacaccgcccgtcacaccatgggagtgggggataccagaagtaggtggctaggccgcttaccacggtatgtttcatgactggggtg

SEQ ID NO: 1021 - DNA, 1541 bp, Kingella kingae
ttgaacataagagtttgatcctggctcagattgaacgctggcggcatgctttacacatgcaagtcggacggcagcacgagtacttgtacttggtggcgagtggcgaacgggtgagtaatatattggaacgtaccgagtaatgggggataactatccgaaaggatagctaataccgcatacgctttgagaaggaaagcaggggatcttcggaccttgcgttattcgagcggccaataactgattagctagttggtggggtaagggcccaccaaggcgacgatcagtagtgggtctgagaggatgatccgccacactgggactgagacacggcccagactcctacgggaggcagcagtggggaattttggacaatgggcgaaagcctgatccagccatgccgcgtgtctgaagaaggccttcgggttgtaaaggacttttgttagggaagaaaaggttgatgctaatatcattaactgatgacggtacctaaagaataagcaccggctaactacgtgccagcagccgcggtaatacgtagggtgcgagcgttaatcggaattactgggcgtaaagcgagcgcagacggttagttaagcaagatgtgaaatccccgagctcaacttgggaactgcgttttgaactggctagctagagtgtgtcagaggggggtagaattccacgtgtagcagtgaaatgcgtagagatgtggaggaataccgatggcgaaggcagccccctgggataacactgacgttcatgctcgaaagcgtgggtagcaaacaggattagataccctggtagtccacgccctaaacgatgtcaattagctgttgggcaacttgattgcttagtagcgtagctaacgcgtgaaattgaccgcctggggagtacggtcgcaagattaaaactcaaaggaattgacggggacccgcacaagcggtggatgatgtggattaattcgatgcaacgcgaagaaccttacctggtcttgacatgtacggaagagagtagagatactcttgtgccttcgggagccgtagcacaggtgctgcatggctgtcgtcagctcgtgtcgtgagatgttgggttaagtcccgcaacgagcgcaacccttgtcattagttgccatcattaagttgggcactctaatgagactgccggtgacaaaccggaggaaggtggggatgacgtcaagtcctcatggcccttatgaccagggcttcacacgtcatacaatggtcggtacagagggtagccaagccgcgaggtggagccaatcccagaaaaccgatcgtagtccggattgcactctgcaactcgagtgcatgaagtcggaatcgctagtaatcgcaggtcagcatactgcggtgaatacgttcccgggtcttgtacacaccgcccgtcacaccatgggagtgggggataccagaagtagatagggtaaccgcaaggagcccgtttaccacggtatgtttcatgactggggtgaagtcgtaacaaggtagccgtaggggaacctgcggctggatcacctcctttct

SEQ ID NO: 1022 - DNA, 1547 bp, Kingella oralis
aacataagagtttgatcctggctcagattgaacgctggcggcatgctttacacatgcaagtcgaacggcagcacgaaagagcttgctcttttggtggcgagtggcgaacgggtgagtaatgcatcggaacgtaccgagtaatgggggataactatccgaaaggatagctaataccgcatacgctttgagaaggaaagtgggggctcttcggacctcacgttattcgagcggccgatgtctgattagctagttggtggggtaaaggcctaccaaggcgacgatcagtagcgggtctgagaggatgatccgccacactgggactgagacacggcccagactcctacgggaggcagcagtggggaattttggacaatgggcgcaagcctgatccagccatgccgcgtgtctgaagaaggccttcgggttgtaaaggacttttgttagggaagaaaaggatagtgttaataccattatctgctgacggtacctaaagaataagcaccggctaactacgtgccagcagccgcggtaatacgtagggtgcgagcgttaatcggaattactgggcgtaaagcgagcgcagacggtttattaagcaagatgtgaaatccccgagcttaacttgggaactgcgttttgaactggtaagctagagtatgtcagaggggggtagaattccacgtgtagcagtgaaatgcgtagagatgtggaggaataccgatggcgaaggcagccccctgggataatactgacgttcatgctcgaaagcgtgggtagcaaacaggattagataccctggtagtccacgccctaaacgatgtcaattagctgttgggcaacatgattgcttagtagcgtagctaacgcgtgaaattgaccgcctggggagtacggtcgcaagattaaaactcaaaggaattgacggggacccgcacaagcggtggatgatgtggattaattcgatgcaacgcgaagaaccttacctggtcttgacatgtacggaatcttccagagacggaagagtgccttcgggagccgtaacacaggtgctgcatggctgtcgtcagctcgtgtcgtgagatgttgggttaagtcccgcaacgagcgcaacccttgtcattagttgccaccattcagttgggcactctaatgagactgccggtgacaaaccggaggaaggtggggatgacgtcaagtcctcatggcccttatgaccagggcttcacacgtcatacaatggtcggtacagagggtagccaagccgcgaggtggagccaatctcagaaaaccgatcgtagtccggattgcactctgcaactcgagtgcatgaagtcggaatcgctagtaatcgcaggtcagcatactgcggtgaatacgttcccgggtcttgtacacaccgcccgtcacaccatgggagtgggggataccagaagtaggtaggctaaccgcaaggaggccgcttaccacggtatgtttcatgactggggtgaagtcgtaacaaggtagccgtaggggaacctgcggctggatcacctcctttctagaga

SEQ ID NO: 1023 - DNA, 1360 bp, Kingella sp.
  oral clone ID059
gagtttgatcctggctcagattgaacgctggcggcatgctttacacatgcaagtcggacgagtggcgaacgggtgagtaatatattggaacgtaccgagtagtgggggataactaagcgaaagtttggctaataccgcatacggaaaggcgctatttgagcggccaatatctgattagctagttggtggggtaagggcttaccaaggcgatgatcagtagcgggtctgagaggatgatccgccacactgggactgagagacggcccagactcctacgggaggcagcagtggggaattttggacaatgggggcaaccctgatccagccatgccgcgtgtctgaagaaggccttcgggttgtaaaggacttttgttagggaagatgacggtacctaaagaataagcaccggctaactacgtgccagcagccgcggtaatacgtagggtgcgagcgttaatcggaattactgggcgtaaagcgagcgcagacggttatttaagtcagatgtgaaatccccgagcttaacttgggaactgcgtttgaaactgggtaactagagtatgtcagaggggggtagaattccacgtgtagcagtgaaatgcgtagagatgtggaggaataccgatggcgaaggcagccccctgggataactgacgttcatgctcgaaagcgtgggtagcaaacaggattagataccctggtagtccacgccctaaacgatgtcaattagctgttggtgcattagtagcgaagctaacgcgtgaaattgaccgcctggggagtacggtcgcaagattaaaactcaaaggaattgacggggacccgcacaagcgatggatgatgtggattaattcgatgcaacgcgaagaaccttacctggtcttgacatgcacaggtgctgcatggctgtcgtcagctcgtgtcgtgagatgttgggttaagtcccgcaacgagcgcaacccttgtcattagttgccatcatgggcactctaatgagactgccggtgacaaaccggaggaaggtggggatgacgtcaagtcctcatggcccttatgaccagggcttcacacgtcatacaatggtcggcagagggtagccaagccgcgaggtggagccaatcccaaccgatcgtagtccggatgcactctgcaactcgagtgcagaagtcggaatcgctagtaatcgcaggtcagcatactgcggtgaatacgttcccgggtcttgtacacaccgcccgtcacaccatgggagtgggggataccagaagtaggtgaatagttcgcttaccacggtatgtttcatgactggggtgaagtcgtaacaaggtagccgtaggggaacctgcggctggaacacctc

SEQ ID NO: 1024 - DNA, 1021 bp, Klebsiella oxytoca
  modified_base (741)..(742): a, c, t, g, unknown or other
  modified_base (969)..(969): a, c, t, g, unknown or other
  modified_base (974)..(975): a, c, t, g, unknown or other
  modified_base (985)..(985): a, c, t, g, unknown or other
  modified_base (1001)..(1001): a, c, t, g, unknown or other
gcacagagagcttgctctcgggtgacgagtggcggacgggtgagtaatgtctgggaaactgcctgatggagggggataactactggaaacggtagctaataccgcataacgtcgcaagaccaaagagggggaccttcgggcctcttgccatcagatgtgcccagatgggattagctagtaggtggggtaacggctcacctaggcgacgatccctagctggtctgagaggatgaccagccacactggaactgagacacggtccagactcctacgggaggcagcagtggggaatattgcacaatgggcgcaagcctgatgcagccatgccgcgtgtatgaagaaggccttcgggttgtaaagtactttcagcggggaggaagggagtaaggttaataaccttgttcattgacgttacccgcagaagaagcaccggctaactccgtgccagcagccgcggtaatacggagggtgcaagcgttaatcggaattactgggcgtaaagcgcacgcaggcggtctgtcaagtcggatgtgaaatccccgggctcaacctgggaactgcattcgaaactggcaggctggagtcttgtagaggggggtagaattccaggtgtagcggtgaaatgcgtagagatctggaggaataccggtggcgaaggcggccccctggacaaagactgacgctcaggtgcgaaagcgtggggagcaaacaggattagataccctggtagtccacgctgtnncgatgtcgacttggaggttgttcccttgaggagtggcttccggagctaacgcgttaagtcgaccgcctggggagtacggccgcaaggttaaaactcaaatgaattgacgggggcccgcacaagcggtggagcatgtggtttaattcgatgcaacgcgaagaaccttacctactcttgacatccagagaacttagcagagatgctttggtgccttcgggaactctganacagnngctgcatggntgtcgtcagctcgtgntgtgaaatgttgggttaagt

SEQ ID NO: 1025 - DNA, 1399 bp, Klebsiella pneumoniae
tcgagcggtagcacagagagcttgctctcgggtgacgagcggcggacgggtgagtaatgtctgggaaactgcctgatggagggggataactactggaaacggtagctaataccgcataacgtcgcaagaccaaagtgggggaccttcgggcctcatgccatcagatgtgcccagatgggattagctagtaggtggggtaacggctcacctaggcgacgatccctagctggtctgagaggatgaccagccacactggaactgagacacggtccagactcctacgggaggcagcagtggggaatattgcacaatgggcgcaagcctgatgcagccatgccgcgtgtgtgaagaaggccttcgggttgtaaagcactttcagcggggaggaaggcgttaaggttaataaccttgtcgattgacgttacccgcagaagaagcaccggctaactccgtgccagcagccgcggtaatacggagggtgcaagcgttaatcggaattactgggcgtaaagcgcacgcaggcggtctgtcaagtcggatgtgaaatccccgggctcaacctgggaactgcattcgaaactggcaggctagagtcttgtagaggggggtagaattccaggtgtagcggtgaaatgcgtagagatctggaggaataccggtggcgaaggcggccccctggacaaagactgacgctcaggtgcgaaagcgtggggagcaaacaggattagataccctggtagtccacgccgtaaacgatgtcgatttggaggttgtgcccttgaggcgtggcttccggagctaacgcgttaaatcgaccgcctggggagtacggccgcaaggttaaaactcaaatgaattgacgggggcccgcacaagcggtggagcatgtggtttaattcgatgcaacgcgaagaaccttacctggtcttgacatccacagaactttaggcggtctgtctagtcgcatgtggaactgtgagacaggtgctgcatggctgtcgtcagctcgtgttgtgaaatgttgggttaagtcccgcaacgagcgcaacccttatcctttgttgccagcggttcggccgggaactcaaaggagactgccagtgataaactggaggaaggtggggatgacgtcaagtcatcatggcccttacgaccagggctacacacgtgctacaatggcatatacaaagagaagcgacctcgcgagagcaagcggacctcataaagtatgtcgtagtccggattggagtctgcaactcgactccatgaagtcggaatcgctagtaatcgtagatcagaatgctacggtgaatacgttcccgggccttgtacacaccgcccgtcacaccatgggagtgggttgcaaaagaagtaggtagcttaaccttcgggagggcgc

SEQ ID NO: 1026 - DNA, 1277 bp, Klebsiella sp.
  AS10
cagattgaacgctggcggcaggcctaacacatgcaagtcgaacgagtggcggacgggtgagtaatgtctgggaaactgcctgatggagggggataactactggaaacggtagctaataccgcataaccaaagttgccatcagatgtgcccagatgggattagctagtaggtggggtaacggctcacctaggcgacgatccctagctggtctgagaggatgaccagccacactggaactgagacacggtccagactcctacgggaggcagcagtggggaatattgcacaatgggcgcaagcctgatgcagccatgccgcgtgtatgaagaaggccttcgggttgtaaagtactttcagcggggaggatgacgttacccgcagaagaagcaccggctaactccgtgccagcagccgcggtaatacggagggtgcaagcgttaatcggaattactgggcgtaaagcgcacgcaggcggtctgtcaagtcggatgtgaaatccccgggctcaacctgggaactgcattcgaaactggcaggctggagtcttgtagaggggggtagaattccaggtgtagcggtgaaatgcgtagagatctggaggaataccggtggcgaaggcggccccctggacaaactgacgctcaggtgcgaaagcgtggggagcaaacaggattagataccctggtagtccacgctgtaaacgatgtcgacttggaggttgttagtggcttccggagctaacgcgttaagtcgaccgcctggggagtacggccgcaaggttaaaactcaaatgaattgacgggggcccgcacaagcggtggagcatgtggtttaattcgatgcaacgcgaagaaccttacctactcttgacatcgacaggtgctgcatggctgtcgtcagctcgtgttgtgaaatgttgggttaagtcccgcaacgagcgcaacccttatcctttgttgccagcggccgggaactcaaaggagactgccagtgataaactggaggaaggtggggatgacgtcaagtcatcatggcccttacgagtagggctacacacgtgctacaatggcatacaaagagaagcgacctcgcgagagcaagcggacctcattatgtcgtagtccggatggagtctgcaactcgactccagaagtcggaatcgctagtaatcgtggatcagaatgccacggtgaatacgttcccgggccttgtacacaccgcccgtcacaccatgggagtgggttgcaaaagaagtaggtgcttagggcgcttaccac

SEQ ID NO: 1027 - DNA, 1398 bp, Klebsiella sp.
  Co9935
tcgaacggtagcacagagagcttgctctcgggtgacgagtggcggacgggtgagtaatgtctgggaaactgcccgatggagggggataactactggaaacggtagctaataccgcataacgtcgcaagaccaaagagggggaccttcgggcctcttgccatcggatgtgcccagatgggattagcttgtaggtgaggtaacggctcacctaggcgacgatccctagctggtctgagaggatgaccagccacactggaactgagacacggtccagactcctacgggaggcagcagtggggaatattgcacaatgggcgcaagcctgatgcagccatgccgcgtgtatgaagaaggccttcgggttgtaaagtactttcagcggggaggaagggagtgaggttaataaccttattcattgacgttacccgcagaagaagcaccggctaactccgtgccagcagccgcggtaatacggagggtgcaagcgttaatcggaattactgggcgtaaagcgcacgcaggcggtctgtcaagtcggatgtgaaatccccgggctcaacctgggaactgcattcgaaactggcaggctggagtcttgtagaggggggtagaattccaggtgtagcggtgaaatgcgtagagatctggaggaataccggtggcgaaggcggccccctggacaaagactgacgctcaggtgcgaaagcgtggggagcaaacaggattagataccctggtagtccacgctgtaaacgatgtcgacttggaggttgttcccttgaggagtggcttccggagctaacgcgttaagtcgaccgcctggggagtacggccgcaaggttaaaactcaaatgaattgacgggggcccgcacaagcggtggagcatgtggtttaattcgatgcaacgcgaagaaccttacctactcttgacatccagagaatttagcagagatgctttggtgccttcgggaaccgtgagacaggtgctgcatggctgtcgtcagctcgtgttgtgaaatgttgggttaagtcccgcaacgagcgcaacccttatcctttgttgccagcgattcggtcgggaactcaaaggagactgccagtgataaactggaggaaggtggggatgacgtcaagtcatcatggcccttacgagtagggctacacacgtgctacaatggcatatacaaagagaagcgacctcgcgagagcaagcggacctcataaagtatgtcgtagtccggattggagtctgcaactcgactccatgaagtcggaatcgctagtaatcgtggatcagaatgccacggtgaatacgttcccgggccttgtacacaccgcccgtcacaccatgggagtgggttgcaaaagaagtaggtagcttaaccttcgggagggcg

SEQ ID NO: 1028 - DNA, 1282 bp, Klebsiella sp.
  OBRC7
tggctcagattgaacgctggcggcaggcctaacacatgcaagtcgaacgagtggcggacgggtgagtaatgtctgggaaactgcctgatggagggggataactactggaaacggtagctaataccgcataaccaaagttgccatcagatgtgcccagatgggattagctagtaggtggggtaacggctcacctaggcgacgatccctagctggtctgagaggatgaccagccacactggaactgagacacggtccagactcctacgggaggcagcagtggggaatattgcacaatgggcgcaagcctgatgcagccatgccgcgtgtatgaagaaggccttcgggttgtaaagtactttcagcggggaggatgacgttacccgcagaagaagcaccggctaactccgtgccagcagccgcggtaatacggagggtgcaagcgttaatcggaattactgggcgtaaagcgcacgcaggcggtctgtcaagtcggatgtgaaatccccgggctcaacctgggaactgcattcgaaactggcaggctggagtcttgtagaggggggtagaattccaggtgtagcggtgaaatgcgtagagatctggaggaataccggtggcgaaggcggccccctggacaaactgacgctcaggtgcgaaagcgtggggagcaaacaggattagataccctggtagtccacgctgtaaacgatgtcgacttggaggttgttagtggcttccggagctaacgcgttaagtcgaccgcctggggagtacggccgcaaggttaaaactcaaatgaattgacgggggcccgcacaagcggtggagcatgtggtttaattcgatgcaacgcgaagaaccttacctactcttgacatcgacaggtgctgcatggctgtcgtcagctcgtgttgtgaaatgttgggttaagtcccgcaacgagcgcaacccttatcctttgttgccagcggccgggaactcaaaggagactgccagtgataaactggaggaaggtggggatgacgtcaagtcatcatggcccttacgagtagggctacacacgtgctacaatggcatacaaagagaagcgacctcgcgagagcaagcggacctcattatgtcgtagtccggatggagtctgcaactcgactccagaagtcggaatcgctagtaatcgtggatcagaatgccacggtgaatacgttcccgggccttgtacacaccgcccgtcacaccatgggagtgggttgcaaaagaagtaggtgcttagggcgcttaccac

SEQ ID NO: 1029 - DNA, 1237 bp, Klebsiella sp.
  SP-BA
  modified_base (358)..(358): a, c, t, g, unknown or other
  modified_base (369)..(370): a, c, t, g, unknown or other
aagtcgagcgagcggcggacgggtgagtaatgtctgggaaactgcctgatggagggggataactactggaaacggtagctaataccgcataatcaaagatgccatcagatgtgcccagatgggattagctagtaggtggggtaacggctcacctaggcgacgatccctagctggtctgagaggatgaccagccacactggaactgagacacggtccagactcctacgggaggcagcagtggggaatattgcacaatgggcgcaagcctgatgcagccatgccgcgtgtgtgaagaaggccttcgggttgtaaagcactttcagcggggaggatgacgttacccgcagaagaagcaccngctaactccgnnccagcagccgcggtaatacggagggtgcaagcgttaatcggaattactgggcgtaaagcgcacgcaggcggtctgtcaagtcggatgtgaaatccccgggctcaacctgggaactgcattcgaaactggcaggctagagtcttgtagaggggggtagaattccaggtgtagcggtgaaatgcgtagagatctggaggaataccggtggcgaaggcggccccctggacaaactgacgctcaggtgcgaaagcgtggggagcaaacaggattagataccctggtagtccacgccgtaaacgatgtcgatttggaggttgtgcgtggcttccggagctaacgcgttaaatcgaccgcctggggagtacggccgcaaggttaaaactcaaatgaattgacgggggcccgcacaagcggtggagcatgtggtttaattcgatgcaacgcgaagaaccttacctggtcttgacatcgacaggtgctgcatggctgtcgtcagctcgtgttgtgaaatgttgggttaagtcccgcaacgagcgcaacccttatcctttgttgccagcggccgggaactcaaaggagactgccagtgataaactggaggaaggtggggatgacgtcaagtcatcatggcccttacgaccagggctacacacgtgctacaatggcatacaaagagaagcgacctcgcgagagcaagcggacctcattatgtcgtagtccggatggagtctgcaactcgactccagaagtcggaatcgctagtaatcgtagatcagaatgctacggtgaatacgttcccgggccttgtacacaccgcccgtcacaccatgggagtgggttgcaaaagaagtaggtgcttagggcgct

SEQ ID NO: 1030 - DNA, 1509 bp, Klebsiella sp.
  SRC_DSD11
ccgcagagtttgatcctggctcagattgaacgctggcggcaggcctaacacatgcaagtcgagcggtagcacagagagcttgctctcgggtgacgagcggcggacgggtgagtaatgtctgggaaactgcctgatggagggggataactactggaaacggtagctaataccgcataacgtcgcaagaccaaagtgggggaccttcgggcctcatgccatcagatgtgcccagatgggattagctagtaggtggggtaacggctcacctaggcgacgatccctagccggtctgagaggatgaccagccacactggaactgagacacggtccagactcctacgggaggcagcagtggggaatattgcacaatgggcgcaagcctgatgcagccatgccgcgtgtgtgaagaaggccttcgggttgtaaagcactttcagcggggaggaaggcgtcaaggttaataaccttggcgattgacgttacccgcagaagaagcaccggctaactccgtgccagcagccgcggtaatacggagggtgcaagcgttaatcggaattactgggcgtaaagcgcacgcaggcggtctgtcaagtcggatgtgaaatccccgggctcaacctgggaactgcattcgaaactggcaggctagagtcttgtagaggggggtagaattccaggtgtagcggtgaaatgcgtagagatctggaggaataccggtggcgaaggcggccccctggacaaagactgacgctcaggtgcgaaagcgtggggagcaaacaggattagataccctggtagtccacgccgtaaacgatgtcgatttggaggttgtgcccttgaggcgtggcttccggagctaacgcgttaaatcgaccgcctggggagtacggccgcaaggttaaaactcaaatgaattgacgggggcccgcacaagcggtggagcatgtggtttaattcgatgcaacgcgaagaaccttacctggtcttgacatccacagaactttccagagatggattggtgccttcgggaactgtgagacaggtgctgcatggctgtcgtcagctcgtgttgtgaaatgttgggttaagtcccgcaacgagcgcaacccttatcctttgttgccagcggtccggccgggaactcaaaggagactgccagtgataaactggaggaaggtggggatgacgtcaagtcatcatggcccttacgaccagggctacacacgtgctacaatggcatatacaaagagaagcgacctcgcgagagcaagcggacctcataaagtatgtcgtagtccggattggagtctgcaactcgactccatgaagtcggaatcgctagtaatcgtagatcagaatgctacggtgaatacgttcccgggccttgtacacaccgcccgtcacaccatgggagtgggttgcaaaagaagtaggtagcttaaccttcgggagggcgcttaccactttgtgattcatgactggggtgaagtcgtaacaaggtaaccgtag

SEQ ID NO: 1031 - DNA, 1006 bp, Klebsiella sp.
  SRC_DSD12
  modified_base (952)..(952): a, c, t, g, unknown or other
  modified_base (957)..(957): a, c, t, g, unknown or other
  modified_base (962)..(962): a, c, t, g, unknown or other
  modified_base (971)..(973): a, c, t, g, unknown or other
  modified_base (984)..(985): a, c, t, g, unknown or other
  modified_base (995)..(995): a, c, t, g, unknown or other
tcgagcggtagcacagagagcttgctctcgggtgacgagcggcggacgggtgagtaatgtctgggaaactgcctgatggagggggataactactggaaacggtagctaataccgcataatgtcgcaagaccaaagtgggggaccttcgggcctcatgccatcagatgtgcccagatgggattagctagtaggtggggtaacggctcacctaggcgacgatccctagctggtctgagaggatgaccagccacactggaactgagacacggtccagactcctacgggaggcagcagtggggaatattgcacaatgggcgcaagcctgatgcagccatgccgcgtgtgtgaagaaggccttcgggttgtaaagcactttcagcggggaggaaggcggtgaggttaataaccttgtcgattgacgttacccgcagaagaagcaccggctaactccgtgccagcagccgcggtaatacggagggtgcaagcgttaatcggaattactgggcgtaaagcgcacgcaggcggtctgtcaagtcggatgtgaaatccccgggctcaacctgggaactgcattcgaaactggcaggctagagtcttgtagaggggggtagaattccaggtgtagcggtgaaatgcgtagagatctggaggaataccggtggcgaaggcggccccctggacaaagactgacgctcaggtgcgaaagcgtggggagcaaacaggattagataccctggtagtccacgccgtaaacgatgtcgatttggaggttgtgcccttgaggcgtggcttccggagctaacgcgttaaatcgaccgcctggggagtacggccgcaaggttaaaactcaaatgaattgacgggggcccgcacaagcggtggagcatgtggtttaattcgatgcaacgcgaagaaccttacctggtcttgacatccacagaactttccaganatggnttggngccttcggnnntgtgagacagnngctgcatggntgtcgtcagct

SEQ ID NO: 1032 - DNA, 1504 bp, Klebsiella sp.
  SRC_DSD15
agagtttgatcctggctcagattgaacgctggcggcaggcctaacacatgcaagtcgagcggtagcacagagagcttgctctcgggtgacgagcggcggacgggtgagtaatgtctgggaaactgcctgatggagggggataactactggaaacggtagctaataccgcataacgtcgcaagaccaaagtgggggaccttcgggcctcatgccatcagatgtgcccagatgggattagctagtaggtggggtaacggctcacctaggcgacgatccctagccggtctgagaggatgaccagccacactggaactgagacacggtccagactcctacgggaggcagcagtggggaatattgcacaatgggcgcaagcctgatgcagccatgccgcgtgtgtgaagaaggccttcgggttgtaaagcactttcagcggggaggaaggcgtcaaggttaataaccttggcgattgacgttacccgcagaagaagcaccggctaactccgtgccagcagccgcggtaatacggagggtgcaagcgttaatcggaattactgggcgtaaagcgcacgcaggcggtctgtcaagtcggatgtgaaatccccgggctcaacctgggaactgcattcgaaactggcaggctagagtcttgtagaggggggtagaattccaggtgtagcggtgaaatgcgtagagatctggaggaataccggtggcgaaggcggccccctggacaaagactgacgctcaggtgcgaaagcgtggggagcaaacaggattagataccctggtagtccacgccgtaaacgatgtcgatttggaggttgtgcccttgaggcgtggcttccggagctaacgcgttaaatcgaccgcctggggagtacggccgcaaggttaaaactcaaatgaattgacgggggcccgcacaagcggtggagcatgtggtttaattcgatgcaacgcgaagaaccttacctggtcttgacatccacagaactttccagagatggattggtgccttcgggaactgtgagacaggtgctgcatggctgtcgtcagctcgtgttgtgaaatgttgggttaagtcccgcaacgagcgcaacccttatcctttgttgccagcggtccggccgggaactcaaaggagactgccagtgataaactggaggaaggtggggatgacgtcaagtcatcatggcccttacgaccagggctacacacgtgctacaatggcatatacaaagagaagcgacctcgcgagagcaagcggacctcataaagtatgtcgtagtccggattggagtctgcaactcgactccatgaagtcggaatcgctagtaatcgtagatcagaatgctacggtgaatacgttcccgggccttgtacacaccgcccgtcacaccatgggagtgggttgcaaaagaagtaggtagcttaaccttcgggagggcgcttaccactttgtgattcatgactggggtgaagtcgtaacaaggtaaccgta

SEQ ID NO: 1033 - DNA, 1506 bp, Klebsiella sp.
  SRC_DSD1
agagtttgatcatggctcagattgaacgctggcggcaggcctaacacatgcaagtcgagcggtagcacagagagcttgctctcgggtgacgagcggcggacgggtgagtaatgtctgggaaactgcctgatggagggggataactactggaaacggtagctaataccgcataatgtcgcaagaccaaagtgggggaccttcgggcctcatgccatcagatgtgcccagatgggattagctagtaggtggggtaacggctcacctaggcgacgatccctagctggtctgagaggatgaccagccacactggaactgagacacggtccagactcctacgggaggcagcagtggggaatattgcacaatgggcgcaagcctgatgcagccatgccgcgtgtgtgaagaaggccttcgggttgtaaagcactttcagcggggaggaaggcggtgaggttaataacctcatcgattgacgttacccgcagaagaagcaccggctaactccgtgccagcagccgcggtaatacggagggtgcaagcgttaatcggaattactgggcgtaaagcgcacgcaggcggtctgtcaagtcggatgtgaaatccccgggctcaacctgggaactgcattcgaaactggcaggctagagtcttgtagaggggggtagaattccaggtgtagcggtgaaatgcgtagagatctggaggaataccggtggcgaaggcggccccctggacaaagactgacgctcaggtgcgaaagcgtggggagcaaacaggattagataccctggtagtccacgccgtaaacgatgtcgatttggaggttgtgcccttgaggcgtggcttccggagctaacgcgttaaatcgaccgcctgggggagtacggccgcaaggttaaaactcaaatgaattgacgggggcccgcacaagcggtggagcatgtggtttaattcgatgcaacgcgaagaaccttacctggtcttgacatccacagaactttccagagatggattggtgccttcgggaactgtgagacaggtgctgcatggctgtcgtcagctcgtgttgtgaaatgttgggttaagtcccgcaacgagcgcaacccttatcctttgttgccagcggtccggccgggaactcaaaggagactgccagtgataaactggaggaaggtggggatgacgtcaagtcatcatggcccttacgaccagggctacacacgtgctacaatggcatatacaaagagaagcgacctcgcgagagcaagcggacctcataaagtatgtcgtagtccggattggagtctgcaactcgactccatgaagtcggaatcgctagtaatcgtagatcagaatgctacggtgaatacgttcccgggccttgtacacaccgcccgtcacaccatgggagtgggttgcaaaagaagtaggtagcttaaccttcgggagggcgcttaccactttgtgattcatgactggggtgaagtcgtaacaaggtaaccgtag

SEQ ID NO: 1034 - DNA, 1506 bp, Klebsiella sp.
  SRC_DSD2
agagtttgatcctggctcagattgaacgctggcggcaggcctaacacatgcaagtcgagcggtagcacagagagcttgctctcgggtgacgagcggcggacgggtgagtaatgtctgggaaactgcctgatggagggggataactactggaaacggtagctaataccgcataacgtcgcaagaccaaagtgggggaccttcgggcctcatgccatcagatgtgcccagatgggattagctagtaggtggggtaacggctcacctaggcgacgatccctagccggtctgagaggatgaccagccacactggaactgagacacggtccagactcctacgggaggcagcagtggggaatattgcacaatgggcgcaagcctgatgcagccatgccgcgtgtgtgaagaaggccttcgggttgtaaagcactttcagcggggaggaaggcgtcaaggttaataaccttggcgattgacgttacccgcagaagaagcaccggctaactccgtgccagcagccgcggtaatacggagggtgcaagcgttaatcggaattactgggcgtaaagcgcacgcaggcggtctgtcaagtcggatgtgaaatccccgggctcaacctgggaactgcattcgaaactggcaggctagagtcttgtagaggggggtagaattccaggtgtagcggtgaaatgcgtagagatctggaggaataccggtggcgaaggcggccccctggacaaagactgacgctcaggtgcgaaagcgtggggagcaaacaggattagataccctggtagtccacgccgtaaacgatgtcgatttggaggttgtgcccttgaggcgtggcttccggagctaacgcgttaaatcgaccgcctggggagtacggccgcaaggttaaaactcaaatgaattgacgggggcccgcacaagcggtggagcatgtggtttaattcgatgcaacgcgaagaaccttacctggtcttgacatccacagaactttccagagatggattggtgccttcgggaactgtgagacaggtgctgcatggctgtcgtcagctcgtgttgtgaaatgttgggttaagtcccgcaacgagcgcaacccttatcctttgttgccagcggtccggccgggaactcaaaggagactgccagtgataaactggaggaaggtggggatgacgtcaagtcatcatggcccttacgaccagggctacacacgtgctacaatggcatatacaaagagaagcgacctcgcgagagcaagcggacctcataaagtatgtcgtagtccggattggagtctgcaactcgactccatgaagtcggaatcgctagtaatcgtagatcagaatgctacggtgaatacgttcccgggccttgtacacaccgcccgtcacaccatgggagtgggttgcaaaagaagtaggtagcttaaccttcgggagggcgcttaccactttgtgattcatgactggggtgaagtcgtaacaaggtaaccgtagc

SEQ ID NO: 1035 - DNA, 1497 bp, Klebsiella sp.
  SRC_DSD6
agagtttgatcctggctcagattgaacgctggcggcaggcctaacacatgcaagtcgagcggtagcacagagagcttgctctcgggtgacgagcggcggacgggtgagtaatgtctgggaaactgcctgatggagggggataactacggaaacggtagctaataccgcataatgtcgcaagaccaaagtgggggaccttcgggcctcatgccatcagatgtgcccagatgggattagctagtaggtggggtaacggctcacctaggcgacgatccctagctggtctgagaggatgaccagccacactggaactgagacacggtccagactcctacgggaggcagcagtggggaatattgcacaatgggcgcaagcctgatgcagccatgccgcgtgtgtgaagaaggccttcgggttgtaaagcactttcagcggggaggaaggcgttaaggttaataaccttggcgattgacgttacccgcagaagaagcaccggctaactccgtgccagcagccgcggtaatacggagggtgcaagcgttaatcggaattactgggcgtaaagcgcacgcaggcggtctgtcaagtcggatgtgaaatccccgggctcaacctgggaactgcattcgaaactggcaggctagagtcttgtagagggggtagaattccaggtgtagcggtgaaatgcgtagagatctgggggaataccggtggcgaagcggccccctggacaaagactgacgctcagtgcgaaagcgtggggagcaaacaggattagataccctggtagtcccgccgtaaacatgtcgatttggaggttgtgcccttgaggcgtggcttccggagctaacgcgttaaatcgacccctggggagtacggccgcaaggttaaaactcaaatgaattgacgggggcccgcacaagcggtggagcatgtggttaattcgatgcaacgcgaagaaccttacctggtcttgacatccacagaactttccagagatggattggtgcctcgggaactgtgagacaggtgctgcatggctgtcgtcagctcgtgttgtgaaatgttgggttaagtcccgcaacgagcgcaacccttatcctttgttgccagcggttaggccgggaactcaaaggagactgccagtgataaactggaggaaggtggggatgacgtcaagtcatcatggcccttacgaccagggctacacacgtgctacaatggcatatacaaagagaagcgacctcgcgagagcaagcggacctcataaagtatgtcgtagtccggattggagtctgcaactcgactccatgaagtcggaattgctagtaatcgtagatcagaatgctacggtgaatacgttcccgggccttgtacacaccgcccgtcacaccatgggagtgggttgcaaaagaagtaggtagcttaaccttcgggagggcgcttaccactttgtgattcatgactggggtgaaatcgtaacaaggtagccgtagc

SEQ ID NO: 1036 - DNA, 1420 bp, Klebsiella sp.
  enrichment culture clone SRC_DSD25
tcgggtgacgagcggcggacgggtgagtaatgtctgggaaactgcctgatggagggggataactactggaaacggtagctaataccgcataatgtcgcaagaccaaagtgggggaccttcgggcctcatgccatcagatgtgcccagatgggattagctagtaggtggggtaacggctcacctaggcgacgatccctagctggtctgagaggatgaccagccacactggaactgagacacggtccagactcctacgggaggcagcagtggggaatattgcacaatgggcgcaagcctgatgcagccatgccgcgtgtgtgaagaaggccttcgggttgtaaagcactttcagcggggaggaaggcgttaaggttaataaccttggcgattgacgttacccgcagaagaagcaccggctaactccgtgccagcagccgcggtaatacggagggtgcaagcgttaatcggaattactgggcgtaaagcgcacgcaggcggtctgtcaagtcggatgtgaaatccccgggctcaacctgggaactgcattcgaaactggcaggctagagtcttgtagaggggggtagaattccaggtgtagcggtgaaatgcgtagagatctgggggaataccggtggcgaaagcggccccctggacaaagactgacgctcagtgcgaaagcgtggggagcaaacaggattagataccctggtagtccacgccgtaaacgatgtcgatttggaggttgtgcccttgaggcgtggcttccggagctaacgcgttaaatcgaccgcctggggagtacggccgcaaggttaaaactcaaatgaattgacgggggcccgcacaagcggtggagcatgtggtttaattcgatgcaacgcgaagaaccttacctggtcttgacatccacagaactttccagagatggattggtgccttcgggaactgtgagacaggtgctgcatggctgtcgtcagctcgtgttgtgaaatgttgggttaagtcccgcaacgagcgcaacccttatcctttgttgccagcggttaggccgggaactcaaaggagactgccagtgataaactggaggaaggtggggatgacgtcaagtcatcatggcccttacgaccagggctacacacgtgctacaatggcatatacaaagagaagcgacctcgcgagagcaagcggacctcataaagtatgtcgtagtccggattggagtctgcaactcgactccatgaagtcggaattgctagtaatcgtagatcagaatgctacggtgaatacgttcccgggccttgtacacaccgcccgtcacaccatgggagtgggttgcaaaagaagtaggtagcttaaccttcgggagggcgcttaccactttgtgattcatgactggggtgaaatcgtaacaaggtagccg

SEQ ID NO: 1037 - DNA, 934 bp, Klebsiella variicola
  modified_base (705)..(706): a, c, t, g, unknown or other
cggtagcacagagagcttgctctcgggtgacgagcggcggacgggtgagtaatgtctgggaaactgcctgatggagggggataactactggaaacggtagctaataccgcataatgtcgcaagaccaaagtgggggaccttcgggcctcatgccatcagatgtgcccagatgggattagctggtaggtggggtaacggctcacctaggcgacgatccctagctggtctgagaggatgaccagccacactggaactgagacacggtccagactcctacgggaggcagcagtggggaatattgcacaatgggcgcaagcctgatgcagccatgccgcgtgtgtgaagaaggccttcgggttgtaaagcactttcagcggggaggaaggcggtgaggttaataacctcatcgattgacgttacccgcagaagaagcaccggctaactccgtgccagcagccgcggtaatacggagggtgcaagcgttaatcggaattactgggcgtaaagcgcacgcaggcggtctgtcaagtcggatgtgaaatccccgggctcaacctgggaactgcattcgaaactggcaggctagagtcttgtagaggggggtagaattccaggtgtagcggtgaaatgcgtagagatctggaggaataccggtggcgaaggcggccccctggacaaagactgacgctcaggtgcgaaagcgtnngagcaaacaggattagataccctggtagtccacgctgtaaacgatgtcgatttggaggttgtgcccttgaggcgtggcttccggagctaacgcgttaaatcgaccgcctggggagtacggccgcaaggttaaaactcaaatgaattgacgggggcccgcacaagcggtggagcatgtggtttaattcgatgcaacgcgaagaaccttacctggtcttgacatccacag

SEQ ID NO: 1038 - DNA, 1387 bp, Kluyvera ascorbata
  modified_base (964)..(965): a, c, t, g, unknown or other
gcacagagagcttgctcttgggtgacgagtggcggacgggtgagtaatgtctgggaaactgcccgatggagggggataactactggaaacggtagctaataccgcataacgtcgcaagaccaaagtgggggaccttcgggcctcacaccatcggatgtgcccagatgggattagctagtaggtgaggtaatggctcacctaggcgacgatccctagctggtctgagaggatgaccagccacactggaactgagacacggtccagactcctacgggaggcagcagtggggaatattgcacaatgggcgcaagcctgatgcagccatgccgcgtgtatgaagaaggccttcgggttgtaaagtactttcagcgaggaggaaggcgttaaggttaataaccttaacgattgacgttactcgcagaagaagcaccggctaactccgtgccagcagccgcggtaatacggagggtgcaagcgttaatcggaattactgggcgtaaagcgcacgcaggcggtctgtcaagtcggatgtgaaatccccgggctcaacctgggaactgcattcgaaactggcaggctagagtcttgtagaggggggtagaattccaggtgtagcggtgaaatgcgtagagatctggaggaataccggtggcgaaggcggccccctggacaaagactgacgctcaggtgcgaaagcgtggggagcaaacaggattagataccctggtagtccacgccgtaaacgatgtctatttgaaggttgttcccttgaggagtggctttcggagctaacgcgttaaatagaccgcctggggagtacggccgcaaggttaaaactcaaatgaattgacgggggcccgcacaagcggtggagcatgtggtttaattcgatgcaacgcgaagaaccttacctactcttgacatccagagaaattgggagagatgctttcgcgccttcggggtnnatgagacagtggctgcatgggtgtcgtcagctcgtgttgtgaaatgttgggttaagtcccgcaacgagcgcaacccttatcctttgttgccagcggttcggccgggaactcaaaggagactgccagtgataaactggaggaaggtggggatgacgtcaagtcatcatggcccttacgagtagggctacacacgtgctacaatggcatatacaaagagaagcgacctcgcgagagcaagcggacctcataaagtatgtcgtagtccggattggagtctgcaactcgactccatgaagtcggaatcgctagtaatcgtagatcagaatgctacggtgaatacgttcccgggccttgtacacaccgcccgtcacaccatgggagtgggttgcaaaagaagtaggtagcttaaccttcgggagggc

SEQ ID NO: 1039 - DNA, 1395 bp, Kluyvera cryocrescens
tcgaacggtagcacagagagcttgctcttgggtgacgagtggcggacgggtgagtaatgtctgggaaactgcccgatggagggggataactactggaaacggtagctaataccgcataacgtcgcaagaccaaagtgggggaccttcgggcctcacaccatcggatgtgcccagatgggattagctagtaggtggggtaatggctcacctaggcgacgatccctagctggtctgagaggatgaccagccacactggaactgagacacggtccagactcctacgggaggcagcagtggggaatattgcacaatgggcgcaagcctgatgcagccatgccgcgtgtatgaagaaggccttcgggttgtaaagtactttcagcgaggaggaaggcattaaggttaataaccttggtgattgacgttactcgcagaagaagcaccggctaactccgtgccagcagccgcggtaatacggagggtgcaagcgttaatcggaattactgggcgtaaagcgcacgcaggcggtctgtcaagtcggatgtgaaatccccgggctcaacctgggaactgcattcgaaactggcaggctagagtcttgtagaggggggtagaattccaggtgtagcggtgaaatgcgtagagatctggaggaataccggtggcgaaggcggccccctggacaaagactgacgctcaggtgcgaaagcgtggggagcaaacaggattagataccctggtagtccacgccgtaaacgatgtcgacttggaggttgtgcccttgaggcgtggcttccggagctaacgcgttaagtcgaccgcctggggagtacggccgcaaggttaaaactcaaatgaattgacgggggcccgcacaagcggtggagcatgtggtttaattcgatgcaacgcgaagaaccttacctactcttgacatccagagaacttagcagacatgctttggtgccttcgggaactctgagacagcaggcggtcggtcaagtcggatgtgaattcccaaggctcggcttaggacccgcaacgagcgcaacccttatcctttgttgccagcggttcggccgggaactcaaaggagactgccagtgataaactggaggaaggtggggatgacgtcaagtcatcatggcccttacgagtagggctacacacgtgctacaatggcatatacaaagagaagcgacctcgcgagagcaagcggacctcataaagtatgtcgtagtccggattggagtctgcaactcgactccatgaagtcggaatcgctagtaatcgtagatcagaatgctacggtgaatacgttcccgggccttgtacacaccgcccgtcacaccatgggagtgggttgcaaaagaagtaggtagcttaaccttcgggagg

SEQ ID NO: 1040 - DNA, 1482 bp, Kocuria marina
agagtttgatcatggctcaggaccaacgctggcggcgtgcttaacacatgcaagtcgaacgctgaagcttggtgcttgcactgggtggatgagtggcgaacgggtgagtaatacgtgagtaacctgcccttgactctgggataagcctgggaaactgggtctaatactggatatgacctcctgtcgcatggtggggggtggaaagggtttgtactggttgtggatgggctcacggcctatcagcttgttggtggggtaatggcctaccaaggcgacgacgggtatccggcccgagagggtgaccggccaccctgggactgagacacggcccagactcctacgggaggcagcagtggggaatattgcacaatgggcgcaagcctgatgcagcgacgccgcgtgagggatgacggccttcgggttgtaaacctctttcagcacggaagaagcgaaagtgacggtacgtgcagaagaagcgccggctaactacgtgccagcagccgcggtaatacgtaaggcgcaagcgttgtccggaattattgggcgtacagagctcgtaggcggtttgtcgcgtctgctgtgaaagcccggggcttaaccccgggtgtgcagtgggtacgggcagacttgagtgcagtaggggagactggaactcctggtgtagcggtgaaatgcgcacatatcaggaagaacaccgatggcgaaggcaggtctctgggctgttactgacgctgacgagctaaagcatggggagcgaactggattggataccctggtagtccatgccgtaaacattgggcactaggtgtgggggacattccacgttttccgcgccgtagctaacgcattaagtgccccgcctggggagtacggccgcaaggctaaaactcaaaggaattgacaggcgcccgtacaaggggcggggcatggggattatttggatgcaactcgaagaacttttccagggcttgacatacaccggatcggctcagagatgagtttccctccttttggggctggtgtacaggtggtgcatggttgtcgtcagctggtgtcgtgagatgtggggttaagtcccgcaacgagcgcaaccctcgttctatgttgccagcacgtgatggtggggactcataggagactgccggggtcaactcggaggaaggtggggatgacgtcaaatcatcatgccccttatgtcttgggcttcacgcatgctacaatggccagtacaatgggttgcgataccgtgaggtggagctaatcccaaaaagctggtctcagttcggatcgtggtctgcaactcgaccacgtgaagtcggagtcgctagtaatcgcagatcagcaacgctgcggtgaatacgttcccgggccttgtacacaccgcccgtcaagtcacgaaagttggtaacacccgaagccggtggcctaacccttgtggggggagccgtcgaaggtgggactggcgattgggactaagtcgta

SEQ ID NO: 1041 - DNA, 1419 bp, Kocuria palustris
ggcggcgtcttacacatgcagtcgaacgctgaagcaccagcttgctggtgtggatgagtggcgaacgggtgagtaatacgtgagtaacctgcccttgactctgggataagcccgggaaactgggtctaatactggatgctacatgtcaccgcatggtggtgtgtggaaagggtttactggtcttggatgggctcacggcctatcagcttgttggtgaggtaatggctcaccaaggcgacgacgggtagccggcctgagagggtgaccggccacactgggactgagacacggcccagactcctacgggaggcagcagtggggaatattgcacaatgggcgaaagcctgatgcagcgacgccgcgtgagggatgacggccttcgggttgtaaacctctttcagcagggaagaagccacaagtgacggtacctgcagaagaagcgccggctaactacgtgccagcagccgcggtaatacgtagggcgcaagcgttgtccggaattattgggcgtaaagagctcgtaggcggtttgtcgcgtctgctgtgaaagcccggggcttaaccccgggtgtgcagtgggtacgggcagactagagtgcagtaggggagactggaattcctggtgtagcggtggaatgcgcagatatcaggaggaacaccgatggcgaaggcaggtctctgggctgttactgacgctgaggagcgaaagcatggggagcgaacaggattagataccctggtagtccatgccgtaaacgttgggcactaggtgtgggggacattccacgttttccgcgccgtagctaacgcattaagtgccccgcctggggagtacggccgcaaggctaaaactcaaaggaattgacgggggcccgcacaagcggcggagcatgcggattaattcgatgcaacgcgaagaaccttaccaaggcttgacatataccggatcgttccagagatggttcttcccctttggggtcggtatacaggtggtgcatggttgtcgtcagctcgtgtcgtgagatgttgggttaagtcccgcaacgagcgcaaccctcgttccatgttgccagcacgtgatggtggggactcatgggagactgccggggtcaactcggaggaaggtggggatgacgtcaaatcatcatgccccttatgtcttgggcttcacgcatgctacaatggccggtacaaagggttgcgatactgtgaggtggagctaatcccaaaaagccggtctcagttcggattgaggtctgcaactcgacctcatgaagtcggagtcgctagtaatcgcagatcagcaacgctgcggtgaatacgttcccgggccttgtacacaccgcccgtcaagtcacgaaagtcggtaacacccgaagccggtggcccaacccttgtggagggagccgtcgaaggtgg

SEQ ID NO: 1042 - DNA, 1454 bp, Kocuria rhizophila
ggacgaacgctggcggcgtgcttaacacatgcaagtcgaacgctgaagcttggtgcttgcactgggtggatgagtggcgaacgggtgagtaatacgtgagtaacctgcccttgactctgggataagcctgggaaactgggtctaatactggatacgacatgtcaccgcatggtggtgtgtggaaagggttttactggttttggatgggctcacggcctatcagcttgttggtggggtaatggctcaccaaggcgacgacgggtagccggcctgagagggtgaccggccacactgggactgagacacggcccagactcctacgggaggcagcagtggggaatattgcacaatgggcggaagcctgatgcagcgacgccgcgtgagggatgacggccttcgggttgtaaacctctttcagcacggaagaagcgaaagtgacggtacgtgcagaagaagcgccggctaactacgtgccagcagccgcggtaatacgtagggcgcaagcgttgtccggaattattgggcgtaaagagctcgtaggcggtttgtcgcgtctgctgtgaaagcccggggcttaaccccgggtgtgcagtgggtacgggcagacttgagtgcagtaggggagactggaattcctggtgtagcggtgaaatgcgcagatatcaggaggaacaccgatggcgaaggcaggtctctgggctgttactgacgctgaggagcgaaagcatggggagcgaacaggattagataccctggtagtccatgccgtaaacgttgggcactaggtgtggggaacattccacgttttccgcgccgtagctaacgcattaagtgccccgcctggggagtacggccgcaaggctaaaactcaaaggaattgacgggggcccgcacaagcggcggagcatgcggattaattcgatgcaacgcgaagaaccttaccaaggcttgacatacaccggaccgggccagagatggtctttcccccttgtggggctggtgtacaggtggtgcatggttgtcgtcagctcgtgtcgtgagatgttgggttaagtcccgcaacgagcgcaaccctcgttctatgttgccagcacgtgatggtggggactcataggagactgccggggtcaactcggaggaaggtgaggatgacgtcaaatcatcatgccccttatgtcttgggcttcacgcatgctacaatggccagtacaatgggttgcgatgccgcgaggtggagctaatcccaaaaagctggtctcagttcggatcgtggtctgcaactcgaccacgtgaagtcggagtcgctagtaatcgcagatcagcaacgctgcggtgaatacgttcccgggccttgtacacaccgcccgtcaagtcacgaaagttggtaacacccgaagccggtggcctaacccttgtggggggagccgtcgaaggtgggactggcgattgggact

SEQ ID NO: 1043 - DNA, 1481 bp, Kocuria rosea
atcctggctcaggacgaacgctggcggcgtgcttaacacatgcaagtcgaacgatgatgcccagcttgctgggcggattagtggcgaacgggtgagtaatacgtgagtaacctgcccttgactctgggataagcctgggaaactgggtctaatactggatactacctcttaccgcatggtgggtggtggaaagggttttactggttttggatgggctcacggcctatcagcttgttggtggggtaatggctcaccaagccgacgacgggtagccggcctgagagggtgaccggccacactgggactgagacacggcccagactcctacgggaggcagcagtggggaatattgcacaatgggcggaagcctgatgcagcgacgccgcgtgagggatgacggccttcgggttgtaaacctctttcagtagggaagaagcgagagtgacggtacctgcagaagaagcgccggctaactacgtgccagcagccgcggtaatacgtagggcgcaagcgttgtccggaattattgggcgtaaagagctcgtaggcggtttgtcgcgtctgctgtgaaagcccggggcttaaccccgggtctgcagtgggtacgggcagactagagtgcagtaggggagactggaattcctggtgtagcggtgaaatgcgcagatatcaggaggaacaccgatggcgaaggcaggtctctgggctgttactgacgctgaggagcgaaagcatggggagcgaacaggattagataccctggtagtccatgccgtaaacgttgggcactaggtgtgggggacattccacgttttccgcgccgtagctaacgcattaagtgccccgcctggggagtacggccgcaaggctaaaactcaaaggaattgacgggggcccgcacaagcggcggagcatgcggattaattcgatgcaacgcgaagaaccttaccaaggcttgacattcaccggaccgccccagagatggggtttcccttcggggctggtggacaggtggtgcatggttgtcgtcagctcgtgtcgtgagatgttgggttaagtcccgcaacgagcgcaaccctcgttctatgttgccagcacgtgatggtggggactcataggagactgccggggtcaactcggaggaaggtggggatgacgtcaaatcatcatgccccttatgtcttgggcttcacgcatgctacaatggccggtacaaagggttgcgatactgtgaggtggagctaatcccaaaaagccggtctcagttcggattgaggtctgcaactcgacctcatgaagtcggagtcgctagtaatcgcagatcagcaacgctgcggtgaatacgttcccgggccttgtacacaccgcccgtcaagtcacgaaagttggtaacacccgaagccggtggcctaaccccttgtgggagggagccgtcgaaggtgggactggcgattgggactaagtcgtaacaaggtagccgt

SEQ ID NO: 1044 - DNA, 1333 bp, Kocuria varians
  modified_base (1040)..(1040): a, c, t, g, unknown or other
cgctgaagcttggtgcttgcactgggtggatgagtggcgaacgggtgagtaatacgtgagtaacctgcccttaactctgggataagcctgggaaactgggtctaatactggatatgacatgtcactgcatggtggcgtgtggaaagggttttactggttttggatgggctcacggcctatcagcttgttggtggggtaatggcccaccaaggcgacgacgggtagccggcctgagagggtgaccggccacactgggactgagacacggcccagactcctacgggaggcagcagtggggaatattgcacaatgggcgaaagcctgatgcagcgacgccgcgtgagggatgacggccttcgggttgtaaacctctttcagcacggaagaagcgagagtgacggtacgtgcagaagaagcgccggctaactacgtgccagcagccgcggtaatacgtagggcgcaagcgttgtccggaattattgggcgtaaagagctcgtaggcggtttgtcgcgtctgctgtgaaagcccggggcttaaccccgggtgtgcagtgggtacgggcagacttgagtgcagtaggggagactggaattcctggtgtagcggtgaaatgcgcagatatcaggaagaacaccgatggcgaaggcaggtctctgggctgttactgacgctgaggagcgaaagcatggggagcgaacaggattagataccctggtagtccatgccgtaaacgttgggcactaggtgtgggggacattccacgttttccgcgccgtagctaacgcattaagtgccccgcctggggagtacggccgcaaggctaaaactcaaaggaattgacgggggcccgcacaagcggcggagcatgcggattaattcgatgcaacgcgaagaaccttaccaaggcttgacatacaccggaccggtccagagatggatcttcccccttgtggggctggtgtacaggtggtgcatggttgtcgtcagctcgtgtcgtaagatgttgggttaagtcccgcaacgagcgcaaccctcgttntatgttgccagcacgtgatggtggggactcataggagactgccggggtcaactcggaggaaggtggggatgacgtcaaatcatcatgccccttatgtcttgggcttcacgcatgctacaatggccggtacaatgggttgcgataccgtgaggtggagctaatcccaaaaagccggtctcagttcggatcgtggtctgcaactcgaccacgtgaagtcggagtcgctagtaatcgcagatcagcaacgctgcggtgaatacgttcccgggccttgtacacaccgcccgtcaagt

SEQ ID NO: 1045 - DNA, 1493 bp, Lachnobacterium bovis
  modified_base (85)..(85): a, c, t, g, unknown or other
gagtttgatcatggctcaggatgaacgctggcggcgtgcttaacacatgcaagtcgaacgaagcacattatttgaattcttcggnaggaagataatgcgactgagtggcggacgggtgagtaacgcgtgggtaacctgccatgtacagggggacaacagttggaaacggctgctaataccgcataagcgcacgagattgcatgatctagtgtgaaaaactccggtggtatatgatggacccgcgtctgattagctagttggtaaggtaacggcttaccaaggcgacgatcagtagccgacctgagagggtgaccggccacattgggactgagacacggcccagactcctacgggaggcagcagtggggaatattgcacaatgggcgaaagcctgatgcagcgacgccgcgtgaacgaagaagtatttcggtatgtaaagttctatcagcagggaagaaaaaatgacggtacctgactaagaagccccggctaactacgtgccagcagccgcggtaatacgtagggggcaagcgttatccggatttactgggtgtaaagggagcgcaggcggcccggcaagtctgatgtgaaaacccaaggctcaaccatgggattgcattggaaactgtcgagctagagtatcggaggggtaagtggaattcctagtgtagcggtgaaatgcgtagatattaggaggaacaccagtggcgaaggcggcttactggacgataactgacgctgaggctcgaaagcgtggggagcaaacaggattagataccctggtagtccacgccgtaaacgatgaatactaggtgtcgggtgttatgaacattcggtgccggcgcaaacgcaataagtattccacctggggagtacgttcgcaagaatgaaactcaaaggaattgacggggacccgcacaagcggtggagcatgtggtttaattcgaagcaacgcgaagaaccttaccaagtcttgacatcccaatgacaagctatgtaatgtagcctctcttcggagcattggagacaggtggtgcatggttgtcgtcagctcgtgtcgtgagatgttgggttaagtcccgcaacgagcgcaacccttgtccttagtagccagcagtaagatgggcactctagggagactgccagggataacctggaggaaggtggggatgacgtcaaatcatcatgccccttatgacttgggctacacacgtgctacaatggcgtaaacaaagtgaagcgagatggtgacattaagcaaatcacaaaaataacgtctcagttcggactgtagtctgcaactcgactacacgaagctggaatcgctagtaatcgcagatcagaatgctgcggtgaatacgttcccgggtcttgtacacaccgcccgtcacaccatgggagttggtaatgcccgaagccggtgacctaaccgtaaggaaggagccgtcgaaggcaggatcgataactggggtgaagtcgtaacaaggtaacca

SEQ ID NO: 1046 - DNA, 1518 bp, Lachnospira multipara
tttgatcctggctcaggatgaacgctggcggcgtgcttaacacatgcaagtcgaacgaagcaacwtatcacgattccttcgggatgacgatttgttgactgagtggcggacgggtgagtaacgcgtgggtaacctgccttatacagggggatagcagctggaaacggctgataataccgcataagcgcacggcatcgcatgatgcagtgtgaaaaactccggtggtataagatggacccgcgtctgattagctagttggtgaggtaacggcccaccaaggcaacgatcagtagccgacctgagagggtgaccggccacattgggactgagacacggcccagactcctacgggaggcagcagtggggaatattgcacaatggaggaaactctgatgcagcgacgccgcgtgagcgaagaagtatttcggtatgtaaagctctatcagcagggaagataatgacggtacctgactaagaagctccggctaaatacgtgccagcagccgcggtaatacgtatggagcaagcgttatccggatttactgggtgtaaagggagtgtaggtggcaaagcaagtcagtagtgaaaatccggggctcaacctcggaactgctattgaaactgtttagctagagtgcaggagaggtaagtggaattcctagtgtagcggtgaaatgcgtagatattaggaggaacaccagtggcgaaggcggcttactggactgtaactgacactgaggctcgaaagcgtggggagcaaacaggattagataccctggtagtccacgccgtaaacgatgaatactaggtgttgggtctcataagagattcggtgccgcagctaacgcaataagtattccacctggggagtacgttcgcaagaatgaaactcaaaggaattgacggggacccgcacaagcggtggagcatgtggtttaattcgaagcaacgcgaagaaccttacctagtcttgacatcccgatgaccragtatgtaatgtactctttcttcggaacatcggtgacaggtggtgcatggttgtcgtcagctcgtgtcgtgagatgttgggttaagtcccgcaacgagcgcaacccctatttctagtagccagcagttcggctgggcactctagagagactgccagggataacctggaggaaggtggggatgacgtcaaatcatcatgccccttatgactagggctacacacgtgctacaatggcgtaaacaaagtgaagcgagagtgtgagcttaagcaaatcacaaaaataacgtctcagttcggattgtagtctgcaactcgactacatgaagctggaatcgctagtaatcgcagatcagaatgctgcggtgaatacgttcccgggtcttgtacacaccgcccgtcacaccatgggagtcgaaaatgcccgaagtcggtgacctaacgtaagaaggagccgccgaaggcaggtttgataactggggtgaagtcgtaacaaggtagccgtatcggaaggtgcggctggatcacctcct

SEQ ID NO: 1047 - DNA, 1383 bp, Lachnospira pectinoschiza
  modified_base (11)..(12): a, c, t, g, unknown or other
  modified_base (14)..(14): a, c, t, g, unknown or other
  modified_base (22)..(23): a, c, t, g, unknown or other
  modified_base (30)..(31): a, c, t, g, unknown or other
  modified_base (37)..(40): a, c, t, g, unknown or other
cgaagcatttnncnacggattnnttcgganntgaagnnnnttatgactgagtggcggacgggtgagtaacgcgtgggtaacctgcctcacacagggggatagcagttggaaacggctgataataccgcataagcgcacagtaccgcatggtacagtgtgaaaaactccggtggtgtgagatggacccgcgtctgattagcttgttggcagggtaacggcctaccaaggcaacgatcagtagccgacctgagagggtgaccggccacattgggactgagacacggcccagactcctacgggaggcagcagtggggaatattgcacaatggaggaaactctgatgcagcgacgccgcgtgagtgaagaagtaattcgttatgtaaagctctatcagcagggaagatagtgacggtacctgactaagaagctccggctaaatacgtgccagcagccgcggtaatacgtatggagcaagcgttatccggatttactgggtgtaaagggagtgtaggtggcatcacaagtcagaagtgaaagcccggggctcaaccccgggactgcttttgaaactgtggagctggagtgcaggagaggcaagtggaattcctagtgtagcggtgaaatgcgtagatattaggaggaacaccagtggcgaaggcggcttgctggactgtaactgacactgaggctcgaaagcgtggggagcaaacaggattagataccctggtagtccacgccgtaaacgatgaatactaggtgtcggggctcataagagcttcggtgccgcagcaaacgcaataagtattccacctggggagtacgttcgcaagaatgaaactcaaaggaattgacggggaccgcacaagcggtggagcatgtggtttaattcgaagcaacgcgaagaaccttaccaagtcttgacatcctcttgcccggtcagtaatgtgaccttttcttcggaacaagagtgacaggtggtgcatggttgtcgtcagctcgtgtcgtgagatgttgggttaagtcccgcaacgagcgcaacccctattcttagtagccagcatataaggtgggcactctaggaagactgccagggataacctggaggaaggtggggatgacgtcaaatcatcatgccccttatgacttgggctacacacgtgctacaatggcgtaaacaaagtgaagcgagagtgtgagcttaagcaaatcacaaaaataacgtctcagttcggattgtagtctgcaactcgactacatgaagctggaatcgctagtaatcgcgaatcagaatgtcgcggtgaatacgttcccgggtcttgtacacaccgcccgtcacaccatgggagtcggaaatgcccgaagtcggtgacctaacgaaagaag

SEQ ID NO: 1048 - DNA, 1519 bp, Lachnospiraceae bacterium 1_1_57FAA
agagtttgatcctggctcaggatgaacgctggcggcgtgcctaacacatgcaagtcgagcgaagcactttgcttagattcttcggatgaagaggattgtgactgagcggcggacgggtgagtaacgcgtgggtaacctgcctcatacagggggataacagttagaaatgactgctaataccgcataagaccacagcaccgcatggtgcgggggtaaaaactccggtggtatgagatggacccgcgtctgattagctagttggtaaggtaacggcttaccaaggcgacgatcagtagccgacctgagagggtgaccggccacattgggactgagacacggcccaaactcctacgggaggcagcagtggggaatattgcacaatgggggaaaccctgatgcagcgacgccgcgtgagcgaagaagtatttcggtatgtaaagctctatcagcagggaagaaaatgacggtacctgactaagaagcaccggctaaatacgtgccagcagccgcggtaatacgtatggtgcaagcgttatccggatttactgggtgtaaagggagcgtagacggatgggcaagtctgatgtgaaaacccggggctcaaccccgggactgcattggaaactgttcatctagagtgctggagaggtaagtggaattcctagtgtagcggtgaaatgcgtagatattaggaggaacaccagtggcgaaggcggcttactggacagtaactgacgttgaggctcgaaagcgtggggagcaaacaggattagataccctggtagtccacgccgtaaacgatgactactaggtgtcgggtggcaaagccattcggtgccgcagcaaacgcaataagtagtccacctggggagtacgttcgcaagaatgaaactcaaaggaattgacggggacccgcacaagcggtggagcatgtggtttaattcgaagcaacgcgaagaaccttacctgctcttgacatcccgctgaccggacggtaatgcgtccttcccttcggggcagcggagacaggtggtgcatggttgtcgtcagctcgtgtcgtgagatgttgggttaagtcccgcaacgagcgcaacccctatctttagtagccagcggccaggccgggcactctagagagactgccggggataacccggaggaaggtggggatgacgtcaaatcatcatgccccttatgagcagggctacacacgtgctacaatggcgtaaacaaagggaagcgagaccgcgaggtggagcaaatcccaaaaataacgtctcagttcggattgtagtctgcaactcgactacatgaagctggaatcgctagtaatcgcgaatcagaatgtcgcggtgaatacgttcccgggtcttgtacacaccgcccgtcacaccatgggagtcagtaacgcccgaagtcagtgacccaaccgtaaggagggagctgccgaaggcgggaccgataactggggtgaagtcgtaacaaggtagccgtatcggaaggtgcggctggatcacct

SEQ ID NO: 1049 - DNA, 1384 bp, Lachnospiraceae bacterium 1_4_56FAA
  modified_base (33)..(33): a, c, t, g, unknown or other
  modified_base (229)..(229): a, c, t, g, unknown or other
tcgaacgaagcactttaccggatttcttcggantgaaagttttgtgactgagtggcggacgggtgagtaacgcgtgggtaacctgcctcatacagggggataacagttagaaatgactgctaataccgcataagaccacaggattgcatggtccggtggtaaaaactccggtggtatgagatggacccgcgtctgattagctagttggtggggtaacggcttaccaagncgacgatcagtagccgacctgagagggtgaccggccacattgggactgagacacggcccaaactcctacgggaggcagcagtggggaatattgcacaatgggggaaaccctgatgcagcgacgccgcgtgagcgatgaagtatttcggtatgtaaagctctatcagcagggaagaaaagacggtacctgctaagaagcaccggctaaatacgtgccagcagccgcggtaatacgtatggtgcaagcgttatccggatttactgggtgtaaagggagcgtagacggagaggcaagtctgatgtgaaaacccggggctcaaccccgggactgcattggaaactgtttttctagagtgtcggagaggtaagtggaattcctagtgtagcggtgaaatgcgtagatattaggaggaacaccagtggcgaaggcggcttactggacgatgactgacgttgaggctcgaaagcgtggggagcaaacaggattagataccctggtagtccacgccgtaaacgatgactgctaggtgtcgggaggcaaagcctttcggtgccgcagcaaacgcaataagcagtccacctggggagtacgttcgcaagaatgaaactcaaaggaattgacggggacccgcacaagcggtggagcatgtggtttaattcgaagcaacgcgaagaaccttacctgcccttgacatccggctgactggcgagtaatgtcgcctttccttcgggacagccgagacaggtggtgcatggttgtcgtcagctcgtgtcgtgagatgttgggttaagtcccgcaacgagcgcaacccttatctttagtagccagcatttcggatgggcactctagagagactgccagggataacctggaggaaggtggggatgacgtcaaatcatcatgccccttatgggcagggctacacacgtgctacaatggcgtaaacaaagggaggcaagcctgcgagggtgagcaaatcccaaaaataacgtctcagttcggattgtagtctgcaactcgactacatgaagctggaatcgctagtaatcgcgaatcagaatgtcgcggtgaatacgttcccgggtcttgtacacaccgcccgtcacaccatgggagttggtaacgcccgaagtcagtgacccaaccgtaaggagg

SEQ ID NO: 1050 - DNA, 1528 bp, Lachnospiraceae bacterium 2_1_46FAA
gagagtttgatcctggctcaggatgaacgctggcggcgtgcttaacacatgcaagtcgaacgaagcgctttcgattgaatcttcggaggaaagaggaagtgactgagtggcggacgggtgagtaacgcgtgggtaacctgcctcatacagggggataacagttagaaatggctgctaataccgcataagcatacagcaccgcatggtgcagtgtgaaaaactccggtggtatgagatggacccgcgtctgattaggtagttggtggggtaacggcctaccaagccgacgatcagtagccgacctgagagggtgaccggccacattgggactgagacacggcccaaactcctacgggaggcagcagtggggaatattgcacaatgggggaaaccctgatgcagcgacgccgcgtgaaggaagaagtatttcggtatgtaaacttctatcagcagggaagaaaatgacggtacctgactaagaagccccggctaactacgtgccagcagccgcggtaatacgtagggggcaagcgttatccggatttactgggtgtaaagggagcgtagacggaagtgcaagtctgaagtgaaagcccggggctcaaccccgtgactgctttggaaactgtgcttctagagtgtcggagaggtaagcggaattcctagtgtagcggtgaaatgcgtagatattaggaggaacatcagtggcgaaggcggcttactggacgataactgacgttgaggctcgaaagcgtggggagcaaacaggattagataccctggtagtccacgccgtaaacgatgactactaggtgtcggggtacaaagtacttcggtgccgcagccaacgcaataagtagtccacctggggagtacgttcgcaagaatgaaactcaaaggaattgacggggacccgcacaagcggtggagcatgtggtttaattcgaagcaacgcgaagaaccttacctggtcttgacatctccctgactggacagtaatgtgtcctttctttcgggacagggaagacaggtggtgcatggttgtcgtcagctcgtgtcgtgagatgttgggttaagtcccgcaacgagcgcaacccctatcttcagtagccagcaagtaaagttgggcactctggagagactgccagggataacctggaggaaggtggggacgacgtcaaatcatcatgccccttatgaccagggctacacacgtgctacaatggcgtaaacaaagggaagcaagcatgtgagtgtgagcaaatctcaaaaataacgtctcagttcggattgtagtctgcaactcgactacatgaagctggaatcgctagtaatcgcgaatcagaatgtcgcggtgaatacgttcccgggtcttgtacacaccgcccgtcacaccatgggagttggtaacgcccgaagtcagtgacctaaccgaaaggaaggagctgccgaaggtgggactgataactggggtgaagtcgtaacaaggtagccgtatcggaaggtgcggctggatcacctcctttct

SEQ ID NO: 1051 - DNA, 1361 bp, Lachnospiraceae bacterium 2_1_58FAA
cgaagcacttttgcggatttcttcggattgaagcaattgtgactgagcggcggacgggtgagtaacgcgtgggtaacctgcctcatacagggggataacagttggaaacggctgctaataccgcataagcgcacagtaccgcatggtaccgtgtgaaaaactccggtggtatgagatggacccgcgtctgattagctagttggtggggtaacggcctaccaaggcgacgatcagtagccgacctgagagggtgaccggccacattgggactgagacacggcccaaactcctacgggaggcagcagtggggaatattgcacaatgggggaaaccctgatgcagcgacgccgcgtgagcgataagtatttcggtatgtaaagctctatcagcagggaagaaaatgacggtacctgctaagaagccgctaactacgtgccagcagccgcggtaatacgtagggggcaagcgttatccggatttactgggtgtaaagggagcgtagacggcatggcaagccagatgtgaaagcccggggctcaaccccgggactgcatttggaactgtcaggctagagtgtcggagaggaaagcggaattcctagtgtagcggtgaaatgcgtagatattaggaggaacaccagtggcgaaggcggctttctggacgatgactgacgttgaggctcgaaagcgtggggagcaaacaggattagataccctggtagtccacgccgtaaacgatgaatactaggtgtcgggtggcaaagccattcggtgccgcagcaaacgcaataagtattccacctggggagtacgttcgcaagaatgaaactcaaaggaattgatggggacccgcacaagcggtggagcatgtggtttaattcgaagcaacgcgaagaaccttacctggtcttgacatccctctgaccgctctttaatcggagctttccttcgggacagaggagacaggtggtgcatggttgtcgtcagctcgtgtcgtgagatgttgggttaagtcccgcaacgagcgcaacccctatctttagtagccagcatttaagatgggcactctagagagactgccagggataacctggaggaaggtggggatgacgtcaaatcatcatgccccttatgaccagggctacacacgtgctacaatggcgtaaacaaagggaagcgagcccgcgagggggagcaaatcccaaaaataacgtctcagttcggattgtagtctgcaactcgactacatgaagctggaatcgctagtaatcgcgaatcagaatgtcgcggtgaatacgttcccgggtcttgtacacaccgcccgtcacaccatgggagtcagtaacgcccgaagtcagtgac

SEQ ID NO: 1052 - DNA, 1373 bp, Lachnospiraceae bacterium 3_1_57FAA_CT1
aggaagttttcggatggaatcggcgtaacttagtggcggacgggtgagtaacgcgtgggaaacctgccctgtaccgggggataacacttagaaataggtgctaataccgcataagcgcacagcttcacatgaggcagtgtgaaaaactccggtggtacaggatggtcccgcgtctgattagccagttggcagggtaacggcctaccaaagcgacgatcagtagccggcctgagagggtgaacggccacattgggactgagacacggcccaaactcctacgggaggcagcagtggggaatattgcacaatgggggaaaccctgatgcagcgacgccgcgtgagtgaagaagtatttcggtatgtaaagctctatcagcagggaagaaaatgacggtacctgactaagaagccccggcaactacgtgccagcagccgcggtaatacgtagggggcaagcgttatccggatttactgggtgtaaagggagcgtagacggcatgacaagccagatgtgaaaacccagggctcaaccctgggactgcatttggaactgccaggctggagtgcaggagaggtaagcggaattcctagtgtagcggtgaaatgcgtagatattaggaggaacaccagtggcgaaggcggcttactggactgtaactgacgttgaggctcgaaagcgtggggagcaaacaggattagataccctggtagtccacgcggtaaacgatgattgctaggtgtaggtgggtatggacccatcggtgccgcagctaacgcaataagcaatccacctggggagtacgttcgcaagaatgaaactcaaaggaattgacggggacccgcacaagcggtggagcatgtggtttaattcgaagcaacgcgaagaaccttaccaagtcttgacatcccaatgacgtgtccgtaacggggcattctcttcggagcattggagacagggggagcatggcggtcgtcagctcgtgtcgtgagatgttgggttaagtcccgcaacgagcgcaacccttatccttagtagccagcaggtaaagctgggcactctagggagactgccggggataacccggaggaaggcggggatgacgtcaaatcatcatgccccttatgatttgggctacacacgtgctacaatggcgtaaacaaagggaagcgagacagtgatgttgagcaaatcccagaaataacgtctcagttcggattgtagtctgcaactcgactacatgaagctggaatcgctagtaatcgcgaatcagcatgtcgcggtgaatacgttcccgggtcttgtacacaccgcccgtcacaccatgggagttggaaatgcccgaagcctgtgacctaaccgcaagggaggagca

SEQ ID NO: 1053 - DNA, 1370 bp, Lachnospiraceae bacterium 4_1_37FAA
attcttcggaaggaagctcaagtgactgagtggcggacgggtgagtaacgcgtgggtaacctgcctcatacagggggataacagttagaaatgactgctaataccgcataagcacacgtgatcgcatgatcgagtgtgaaaaactccggtggtatgagatggacccgcgtctgattagcttgttggtggggtaacggcccaccaaggcgacgatcagtagccggcctgagagggtgaacggccacattgggactgagacacggcccaaactcctacgggaggcagcagtggggaatattgcacaatgggggaaaccctgatgcagcgacgccgcgtgaaggatgaagtatttcggtatgtaaacttctatcagcagggaagaaaatgacggtacctgactaagaagccccggctaactacgtgccagcagccgcggtaatacgtagggggcaagcgttatccggatttactgggtgtaaagggagcgtagacggcagtgcaagtctgaagtgaaagcccggggctcaaccccgggactgctttggaaactgtgcagctggagtgtcggagaggcaagcggaattcctagtgtagcggtgaaatgcgtagatattaggaggaacaccagtggcgaaggcggcttgctggacgataactgacgttgaggctcgaaagcgtggggagcaaacaggattagataccctggtagtccacgccgtaaacgatgactactaggtgtcggggagcaaagctcttcggtgccgcagccaacgcaataagtagtccacctggggagtacgttcgcaagaatgaaactcaaaggaattgacggggacccgcacaagcggtggagcatgtggtttaattcgaagcaacgcgaagaaccttacctgctcttgacatccctctgaacgctcattaatcgggctcttccccggggctgcttgggaaacggtgcagctggagtgtcggagctcgtgtcgtgagatgttgggttaagtcccgcaacgagcgcaacccctatcttcagtagccagcattaaggatgggcactctggagagactgccagggataacctggaggaaggtggggatgacgtcaaatcatcatgccccttatgagcagggctacacacgtgctacaatggcgtaaacaaagggaagcagagtcgtgaggccgagcaaatcccaaaaataacgtctcagttcggattgtagtctgcaactcgactacatgaagctggaatcgctagtaatcgcgaatcagaatgtcgcggtgaatacgttcccgggtcttgtacacaccgcccgtcacaccatgggagtcagtaacgcccgaagtcagtgacccaaccgtaaggagggagctg

SEQ ID NO: 1054 - DNA, 1357 bp, Lachnospiraceae bacterium 5_1_57FAA
cgaagcgcctggccccgacttcttcggaatgaggagccttgcgactgagtggcggacgggtgagtaacgcgtgggcaacctgccttgcactgggggataacagccagaaatggctgctaataccgcataagaccgaagcgccgcatggggcagcggccaaagccccggcggtgcaagatgggcccgcgtctgattaggtagttggcggggtaacggcccaccaagccgacaatcagtagccgacctgagagggtgaccggccacattgggactgagacacggcccacactcctacgggaggcagcagtggggaatattgcacaatgggggaaaccctgatgcagcgacgccgcgtgaaggatgaagtatttcggtatgtaaacttctatcaccagggaagaaaatgacggtacctgactaagaagccccggctaactacgtgccacagccgcggtaatacgtagggggcaagcgttatccggatttactgggtgtaaagggagcgtaacggcgatgcaagccaatgtgaaagcccggggctcaaccccgggactgcatttggaactgcgtggctggagtgtcgagaggcaggcggaattctagtgtacggtgaaatgcgtaatattagaggaacaccagtggcgaagcggcctgctggacatgactgacgttgaggctcgaaagcgtggggagcacaggattaataccctggtagtccacgccgtaacgatgactactagtgtcgggtggaaggccattcgtgccgcagcaacgcaataagtagtccacctggggagtacgttcgcaagaatgaaactcaaggaattgacgggaccccacaagcggtggagcatgtggtttaattcgaagcaacgcgaagaaccttacctgatcttgacatcccgatgccaaagcgcgtaacgcgctctttcttcggaacatcggtgacaggtggtgcatggttgtcgtcagctcgtgtcgtgagatgttgggttaagtcccgcaacgagcgcaacccctatcttcagtagccagcattccggatgggcactctggagagactgccagggacaacctggaggaaggtggggatgacgtcaaatcatcatgccccttatgaccagggctacacacgtgctacaatggcgtaaacaaagggaggcgaacccgcgagggtgggcaaatcccaaaaataacgtctcagttcggattgtagtctgcaactcgactacatgaagctggaatcgctagtaatcgcgaatcagaatgtcgcggtgaatacgttcccgggtcttgtacacaccgcccgtcacaccatgggagtcagtaacgcccgaagccggtgacccaacccgca

SEQ ID NO: 1055 - DNA, 1537 bp, Lachnospiraceae bacterium 5_1_63FAA
ttgaacatgagagtttgatcctggctcaggatgaacgctggcggcgtgcttaacacatgcaagtcgaacgaaacaccttatttgattttcttcggaactgaagatttggtgattgagtggcggacgggtgagtaacgcgtgggtaacctgccctgtacagggggataacagtcagaaatgactgctaataccgcataagaccacagcaccgcatggtgcaggggtaaaaactccggtggtacaggatggacccgcgtctgattagctggttggtgaggtaacggctcaccaaggcgacgatcagtagccggcttgagagagtgaacggccacattgggactgagacacggcccaaactcctacgggaggcagcagtggggaatattgcacaatgggggaaaccctgatgcagcgacgccgcgtgagtgaagaagtatctcggtatgtaaagctctatcagcagggaagaaaatgacggtacctgactaagaagccccggctaactacgtgccagcagccgcggtaatacgtagggggcaagcgttatccggaattactgggtgtaaagggtgcgtaggtggtatggcaagtcagaagtgaaaacccagggcttaactctgggactgcttttgaaactgtcagactggagtgcaggagaggtaagcggaattcctagtgtagcggtgaaatgcgtagatattaggaggaacatcagtggcgaaggcggcttactggactgaaactgacactgaggcacgaaagcgtggggagcaaacaggattagataccctggtagtccacgccgtaaacgatgaatactaggtgtcggggccgtagaggcttcggtgccgcagccaacgcagtaagtattccacctggggagtacgttcgcaagaatgaaactcaaaggaattgacggggacccgcacaagcggtggagcatgtggtttaattcgaagcaacgcgaagaaccttacctggtcttgacatccttctgaccggtccttaaccggacctttccttcgggacaggagagacaggtggtgcatggttgtcgtcagctcgtgtcgtgagatgttgggttaagtcccgcaacgagcgcaacccctatctttagtagccagcatataaggtgggcactctagagagactgccagggataacctggaggaaggtggggacgacgtcaaatcatcatgccccttatgaccagggctacacacgtgctacaatggcgtaaacagagggaagcagcctcgtgagagtgagcaaatcccaaaaataacgtctcagttcggattgtagtctgcaactcgactacatgaagctggaatcgctagtaatcgcgaatcagaatgtcgcggtgaatacgttcccgggtcttgtacacaccgcccgtcacaccatgggagtcagtaacgcccgaagtcagtgacccaaccgtaaggagggagctgccgaaggcgggaccgataactggggtgaagtcgtaacaaggtagccgtatcggaaggtgcggctggatcacctcctttct

SEQ ID NO: 1056 - DNA, 1370 bp, Lachnospiraceae bacterium 6_1_63FAA
cgaagcacttatcattgactcttcggaagatttgatatttgactgagcggcggacgggtgagtaacgcgtgggtaacctgcctcatacaggggaataacagttagaaatggctgctaatgccgcataagcgcacaggaccgcatggtctggtgtgaaaaactgaggtggtatgagatggacccgcgtctgattaggtagttggtggggtaacggcctaccaagccgacgatcagtagccggcctgagagggtgaacggccacattgggactgagacacggcccagactcctacgggaggcagcagtggggaatattgcacaatgggggaaaccctgatgcagcgacgccgcgtgaaggaagaagtatctcggtatgtaaacttctatcagcagggaagaaaatgacggtacctgactaagaagccccggctaactacgtgccagcagccgcggtaatacgtagggggcaagcgttatccggatttactgggtgtaaagggagcgtagacggaagagcaagtctgatgtgaaaggctggggcttaaccccaggactgcattggaaactgtttttctagagtgccggagaggtaagcggaattcctagtgtagcggtgaaatgcgtagatattaggaggaacaccagtggcgaaggcggcttactggacggtaactgacgttgaggctcgaaagcgtggggagcaaacaggattagataccctggtagtccacgccgtaaacgatgaatactaggtgtcggggtgcaaagcagttcggtgccgcagcaaacgcaataagtattccacctggggagtacgttcgcaagaatgaaactcaaaggaattgacggggacccgcacaagcggtggagcatgtggtttaattcgaagcaacgcgaagaagctttactaggtgtaaagggagcctagacggtacatcaactgtgatgtgaaaggcgacaggcaagacaggtggtgcatggttgtcgtcagctcgtgtcgtgagatgttgggttaagtcccgcaacgagcgcaacccctatccttagtagccagcagtccggctgggcactctagggagactgccggggataacccggaggaaggcggggacgacgtcaaatcatcatgccccttatgatttgggctacacacgtgctacaatggcgtaaacaaagggaagcgaagcggtgacgcttagcaaatctcaaaaataacgtcccagttcggactgcagtctgcaactcgactgcacgaagctggaatcgctagtaatcgcgaatcagaatgtcgcggtgaatacgttcccgggtcttgtacacaccgcccgtcacaccatgggagtcagtaacgcccgaagtcagtgacccaa

SEQ ID NO: 1057 - DNA, 1527 bp, Lachnospiraceae bacterium 8_1_57FAA
gagagtttgatcctggctcaggatgaacgctggcggcgtgcctaacacatgcaagtcgagcgaagcactttgcttagattcttcggatgaagaggattgtgactgagcggcggacgggtgagtaacgcgtgggtaacctgcctcatacagggggataacagttagaaatgactgctaataccgcataagaccacagcaccgcatggtgcgggggtaaaaactccggtggtatgagatggacccgcgtctgattagctagttggtaaggtaacggcttaccaaggcgacgatcagtagccgacctgagagggtgaccggccacattgggactgagacacggcccaaactcctacgggaggcagcagtggggaatattgcacaatgggggaaaccctgatgcagcgacgccgcgtgagcgaagaagtatttcggtatgtaaagctctatcagcagggaagaaaatgacggtacctgactaagaagcaccggctaaatacgtgccagcagccgcggtaatacgtatggtgcaagcgttatccggatttactgggtgtaaagggagcgtagacggatgggcaagtctgatgtgaaaacccggggctcaaccccgggactgcattggaaactgttcatctagagtgctggagaggtaagtggaattcctagtgtagcggtgaaatgcgtagatattaggaggaacaccagtggcgaaggcggcttactggacagtaactgacgttgaggctcgaaagcgtggggagcaaacaggattagataccctggtagtccacgccgtaaacgatgactactaggtgtcgggtggcaaagccattcggtgccgcagcaaacgcaataagtagtccacctggggagtacgttcgcaagaatgaaactcaaaggaattgacggggacccgcacaagcggtggagcatgtggtttaattcgaagcaacgcgaagaaccttacctgctcttgacatcccgctgaccggacggtaatgcgtccttcccttcggggcagcggagacaggtggtgcatggttgtcgtcagctcgtgtcgtgagatgttgggttaagtcccgcaacgagcgcaacccctatctttagtagccagcggccaggccgggcactctagagagactgccggggataacccggaggaaggtggggatgacgtcaaatcatcatgccccttatgagcagggctacacacgtgctacaatggcgtaaacaaagggaagcgagaccgcgaggtggagcaaatcccaaaaataacgtctcagttcggattgtagtctgcaactcgactacatgaagctggaatcgctagtaatcgcgaatcagaatgtcgcggtgaatacgttcccgggtcttgtacacaccgcccgtcacaccatgggagtcagtaacgcccgaagtcagtgacccaaccgtaaggagggagctgccgaaggcgggaccgataactggggtgaagtcgtaacaaggtagccgtatcggaaggtgcggctggatcacctcctttct

SEQ ID NO: 1058 - DNA, 1387 bp, Lachnospiraceae bacterium 9_1_43BFAA
  modified_base (13)..(13): a, c, t, g, unknown or other
tcgaacgaagcancttgaatggaattcttcggaaggaagctcaagtgactgagtggcggacgggtgagtaacgcgtgggtaacctgcctcatacagggggataacagttagaaatgactgctaataccgcataagcacacgtgatcgcatgatcgagtgtgaaaaactccggtggtatgagatggacccgcgtctgattagcttgttggtggggtaacggcccaccaaggcgacgatcagtagccggcctgagagggtgaacggccacattgggactgagacacggcccaaactcctacgggaggcagcagtggggaatattgcacaatgggggaaaccctgatgcagcgacgccgcgtgaaggatgaagtatttcggtatgtaaacttctatcagcagggaagaaaatgacggtacctgactaagaagccccggctaactacgtgccagcagccgcggtaatacgtagggggcaagcgttatccggatttactgggtgtaaagggagcgtagacggcagtgcaagtctgaagtgaaagcccggggctcaaccccgggactgctttggaaactgtgcagctggagtgtcggagaggcaagcggaattcctagtgtagcggtgaaatgcgtagatattaggaggaacaccagtggcgaaggcggcttgctggacgataactgacgttgaggctcgaaagcgtggggagcaaacaggattagataccctggtagtccacgccgtaaacgatgactactaggtgtcggggagcaaagctcttcggtgccgcagccaacgcaataagtagtccacctggggagtacgttcgcaagaatgaaactcaaaggaattgacggggacccgcacaagcggtggagcatgtggtttaattcgaagcaacgcgaagaaccttacctgctattgacatccctctgaccgctctttaatccgggggttccacccggggactggtttggaaaggggcatggtggtcgtcagctcgtgtcgtgagatgttgggttaagtcccgcaacgagcgcaacccctatcttcagtagccagcattaaggatgggcactctggagagactgccagggataacctggaggaaggtggggatgacgtcaaatcatcatgccccttatgagcagggctacacacgtgctacaatggcgtaaacaaagggaagcagagtcgtgaggccgagcaaatcccaaaaataacgtctcagttcggattgtagtctgcaactcgactacatgaagctggaatcgctagtaatcgcgaatcagaatgtcgcggtgaatacgttcccgggtcttgtacacaccgcccgtcacaccatgggagtcagtaacgcccgaagtcagtgacccaaccgtaaggagg

SEQ ID NO: 1059 - DNA, 1483 bp, Lachnospiraceae bacterium A4
agagtttgatcatggctcaggatgaacgctggcggcgtgcttaacacatgcaagtcgaacggactcatattgaaacctagtgatgtatgagttagtggcggacgggtgagtaacgcgtggagaacctgccgtatactgggggataacacttagaaataggtgctaataccgcataagcgcacagcttcgcatgaagcagtgtgaaaaactccggtggtatacgatggatccgcgtctgattagcttgttggcggggtaaaggcccaccaaggcgacgatcagtagccggcctgagagggtgaacggccacattgggactgagacacggcccaaactcctacgggaggcagcagtggggaatattgcacaatgggggaaaccctgatgcagcgacgccgcgtgagtgaagaagtatttcggtacgtaaagctctatcagcagggaagaaaatgacggtacctgactaagaagccccggctaactacgtgccagcagccgcggtaatacgtagggggcaagcgttatccggatttactgggtgtaaagggagcgtagacggcagcgcaagtctggagtgaaatcccatggcttaaccatggaactgctttggaaactgtgcagctggagtgcaggagaggtaagcggaattcctagtgtagcggtgaaatgcgtagatattaggaggaacaccagtggcgaaggcggcttactggactgtaactgacgttgaggctcgaaagcgtggggagcaaacaggattagataccctggtagtccacgctgtaaacgatgattactaggtgttgggggaccaaggtccttcggtgccgtcgcaaacgcattaagtaatccacctggggagtacgttcgcaagaatgaaactcaaaggaattgacggggacccgcacaagcggtggagcatgtggtttaattcgaagcaacgcgaagaaccttacctggtcttgacatcccagtgacgcatgagtaaagtcatgtttccttcgggacactggagacaggtggtgcatggttgtcgtcagctcgtgtcgtgagatgttgggttaagtcccgcaacgagcgcaacccctatttccagtagccagcatgtaaagatgggcactctggagagactgcctaggataactaggaggaaggcggggatgacgtcaaatcatcatgccccttatgatcagggctacacacgtgctacaatggcgtaaacaaagggaagcaaagcggtgacgccaagcaaatcccaaaaataacgtctcagttcggattgtagtctgcaactcgactacatgaagctggaatcgctagtaatcgcgaatcagaatgtcgcggtgaatacgttcccgggtcttgtacacaccgcccgtcacaccatgggagtcggaaatgcccgaagtcagtgacctaaccgaaagggaggagctgccgaaggtggagccggtaactggggtgaagtcgtaacaaggtaacc

SEQ ID NO: 1060 - DNA, 1485 bp, Lachnospiraceae bacterium DJF VP30
  modified_base (485)..(485): a, c, t, g, unknown or other
agagtttgatcatggctcaggatgaacgctggcggcgtgcttaacacatgcaagtcgaacggagtcatcctctgtcaaagcttcggcagagacttggttaacttagtggcggacgggtgagtaacgcgtgggtaacctgccatgtacagggggataacacttagaaataggtgctaaaaccgcataagcgcacggtaccgcatggtacagtgtgaaaaactccggtggtacatgatggacccgcgtctgattagccagttggcagggtaacggcctaccaaagcgacgatcagtagccggcctgagagggtgaacggccacattgggactgagacacggcccaaactcctacgggaggcagcagtggggaatattgcacaatgggggaaaccctgatgcagcgacgccgcgtgagtgaagaagtatttcggtatgtaaagctctatcagcaggaagaaatcaatgcggtacctgactaagaagcnccggctaactacgtgccagcagccgcggtaatacgtagggggcaagcgttatccggatttactgggtgtaaagggagcgtagacggcatggcaagtctgaagtgaaaggccagggctcaaccctgggactgctttggaaactgtcaggctggagtgcaggagaggtaagtggaattcctagtgtagcggtgaaatgcgtagatattaggaggaacaccagtggcgaaggcggcttactggactgtaactgacgttgaggctcgaaagcgtggggagcaaacaggattagataccctggtagtccacgccgtaaacgatgaatactaggtgtcggggagtatagacttttcggtgccgcagccaacgcaataagtattccacctggggagtacgttcgcaagaatgaaactcaaaggaattgacggggacccgcacaagcggtggagcatgtggtttaattcgaagcaacgcgaagaaccttacctggtcttgacatcccgatgaccggacagtaatgtgtccttttcttcggaacattggagacaggtggtgcatggttgtcgtcagctcgtgtcgtgagatgttgggttaagtcccgcaacgagcgcaacccctatcttcagtagccagcaagtaaagttgggcactctggagagactgccggggataacccggaggaaggcggggatgacgtcaaatcatcatgccccttatgaccagggctacacacgtgctacaatggcgtaaacagagggaagcgagagcgtgagctggagcaaatcccaaaaataacgtcccagttcggattgtagtctgcaactcgactacatgaagctggaatcgctagtaatcgcgaatcagcatgtcgcggtgaatacgttcccgggtcttgtacacaccgccgtcacaccatgggagtcggaaatgcccgaagtcggtgacctaaccgtaaggaaggagccgccgaagcaggtctgataactggggtgaagtcgtaaca

SEQ ID NO: 1061 - DNA, 1255 bp, Lachnospiraceae bacterium ICM62
acgctggcggcgtgcttaacacatgcaagtcgaacgagtggcggacgggtgagtaacgcgtggataacctgccttatacagggggataacggagagaaatttccgctaacaccgcataagaaaattaggtataagatggatccgcgtccgattagctagttggtgaggtaaaggcccaccaaggcgacgatcggtagccggcctgagagggtgaacggccacattgggactgagacacggcccaaactcctacgggaggcagcagtggggaatattggacaatgggggaaaccctgatccagcgacgccgcgtgagtgaagaagtatttcggtatgtaaagctctatcagcagggaagatgacggtacctgactaagaagccccggctaactacgtgccagcagccgcggtaatacgtagggggcaagcgttatccggatttactgggtgtaaagggagcgcagacggcaatgcaagtctgaagtgaaaggcgtgggctcaacccatgaactgctttggaaactgtatagcttgagtgtcggaggggtaagcggaattcctagtgtagcggtgaaatgcgtagatattaggaggaacaccggaggcgaaggcggcttactggacgaactgacgttgaggctcgaaggcgtggggagcaaacaggattagataccctggtagtccacgcagtaaacgatgaatacttggtgtcggggcttcggtgccgcagctaacgcattaagtattccacctggggagtacgttcgcaagaatgaaactcaaaggaattgacggggacccgcacaagcggtggagcatgtggtttaattcgaagcaacgcgaagaaccttaccaaatcttgacatatacaggtggtgcatggttgtcgtcagctcgtgtcgtgagatgttgggttaagtcccgcaacgagcgcaacccttgtcgtcagtagccagcatgggcactctgacgagacagccggagataatccggaggaaggtggggatgacgtcaaatcatcatgccccttatgatttgggctacacacgtgctacaatggcgtacaaagtgaagcaaagccgcgaggccaagcaaatcacaaaacgtctcagttcggatgtagtctgcaactcgactatagaagctggaatcgctagtaatcgcagatcagaatgctgcggtgaatacgttcccgggtcttgtacacaccgcccgtcacaccatgggagtcatcaatgcccgaagtcagtaccta

SEQ ID NO: 1062 - DNA, 1406 bp, Lachnospiraceae bacterium MSX33
ggcgtgcttaacacatgcaagtcgaacgaagctgcccaaaggaagttttcggatggaatttaggtagacttagtggcggacgggtgagtaacgcgtggataacctgccttatacagggggataacggagagaaatttccgctaacaccgcataagaccacagcaccgcatggtgcaggggtaaaatatttataggtataagatggatccgcgtccgattagctagttggtgaggtaaaggcccaccaaggcgacgatcggtagccggcctgagagggtgaacggccacattgggactgagacacggcccaaactcctacgggaggcagcagtggggaatattggacaatgggggaaaccctgatccagcgacgccgcgtgagtgaagaagtatttcggtatgtaaagctctatcagcagggaagaaaatgacggtacctgactaagaagccccggctaactacgtgccagcagccgcggtaatacgtagggggcaagcgttatccggatttactgggtgtaaagggagcgcagacggcaatgcaagtctgaagtgaaaggcgtgggctcaacccatgaactgctttggaaactgtatagcttgagtgtcggaggggtaagcggaattcctagtgtagcggtgaaatgcgtagatattaggaggaacaccggaggcgaaggcggcttactggacgacaactgacgttgaggctcgaaggcgtggggagcaaacaggattagataccctggtagtccacgcagtaaacgatgaatacttggtgtcggggaggtaaactcttcggtgccgcaagctaacgcattaagtattccacctggggagtacgttcgcaagaatgaaactcaaaggaattgacggggacccgcacaagcggtggagcatgtggtttaattcgaagcaacgcgaagaaccttaccaaatcttgacatactcttgaatagctttgtaatgaagctagtccttcgggacaagggatacaggtggtgcatggttgtcgtcagctcgtgtcgtgagatgttgggttaagtcccgcaacgagcgcaacccttgtcgtcagtagccagcagtaagatgggcactctgacgagacagccggagataatccggaggaaggtggggatgacgtcaaatcatcatgccccttatgatttgggctacacacgtgctacaatggcgtaaacaaagtgaagcaaagccgcgaggtcaagcaaatcacaaaaataacgtctcagttcggattgtagtctgcaactcgactatatgaagctggaatcgctagtaatcgcagatcagaatgctgcggtgaatacgttcccgggtcttgtacacaccgcccgtcacaccatgggagtcatcaatgcccgaagtcagtgacctaaccgtaagga

SEQ ID NO: 1063 - DNA, 1536 bp, Lachnospiraceae bacterium oral taxon 107
ttttatatgagagtttgatcctggctcaggatgaacgctggcggcgtgcttaacacatgcaagtcgaacgaagctgcttaaaggaagttttcggatggaatttaggtagacttagtggcggacgggtgagtaacgcgtggataacctgccttatacagggggataacggagagaaatttccgctaacaccgcataagaccacagcaccgcatggtgcaggggtaaaatatttataggtataagatggatccgcgtccgattagctagttggtgaggtagaggctcaccaaggcgacgatcggtagccggcctgagagggtgaacggccacattgggactgagacacggcccaaactcctacgggaggcagcagtggggaatattggacaatgggggaaaccctgatccagcgacgccgcgtgagtgaagaagtatttcggtatgtaaagctctatcagcagggaagaaaatgacggtacctgactaagaagccccggctaactacgtgccagcagccgcggtaatacgtagggggcaagcgttatccggatttactgggtgtaaagggagcgcagacggcaatgcaagtctgaagtgaaaggcgtgggctcaacccatgaactgctttggaaactgtatagcttgagtgtcggaggggtaagcggaattcctagtgtagcggtgaaatgcgtagatattaggaggaacaccggaggcgaaggcggcttactggacgacaactgacgttgaggctcgaaggcgtggggagcaaacaggattagataccctggtagtccacgcagtaaacgatgaatacttggtgtcggagaggtaaactcttcggtgccgcaagctaacgcattaagtattccacctggggagtacgttcgcaagaatgaaactcaaaggaattgacggggacccgcacaagcggtggagcatgtggtttaattcgaagcaacgcgaagaaccttaccaaatcttgacatactcttgaatagtcttgtaatgagactagtccttcgggacaagggatacaggtggtgcatggttgtcgtcagctcgtgtcgtgagatgttgggttaagtcccgcaacgagcgcaacccttgtcgtcagtagccagcagtaagatggggactctgacgagacagccggagataatccggaggaaggtggggatgacgtcaaatcatcatgccccttatgatttgggctacacacgtgctacaatggcgtaaacaaagtgaagcaaagctgcgaagccaagcaaatcacaaaaataacgtctcagttcggattgtagtctgcaactcgactatatgaagctggaatcgctagtaatcgcagatcagaatgctgcggtgaatacgttcccgggtcttgtacacaccgcccgtcacaccatgggagtcatcaatgcccgaagtcagtgacctaaccgtaaggaaggagctgccgaaggcagggaggataactggggtgaagtcgtaacaaggtagccgtatcggaaggtgcggctggatcacctcctttct

SEQ ID NO: 1064 - DNA, 1487 bp, Lachnospiraceae bacterium oral taxon F15
agagtttgatcctggctcaggatgaacgctggcggcgtgcttaacacatgcaagtcgaacgaagcatttagaagttttcggacggaagaatgacttagtggcggacgggtgagtaacgcgtgggtaacctgccttatacagggggataacagttggaaacgactgctaataccgcataacccgatagagtcgcatgacttagtcggaaaagatttatcggtataagatggacccgcgtctgattagctagttggtgaggtaatggcccaccaaggcgacgatcagtagccggcttgagagagtgaacggccacattgggactgagacacggcccaaactcctacgggaggcagcagtggggaatattgcacaatgggggaaaccctgatgcagcaacgccgcgtgaaggatgaagtatttcggtatgtaaacttctatcagcagggaagaaattgacggtacctgactaagaagccccggctaactacgtgccagcagccgcggtaatacgtagggggcaagcgttatccggatttactgggtgtaaagggagcgtaggcggcaatgcaagtccgatgtgaaagcccggggctcaaccccgggactgcattagaaactgtgttgctagagtgcaggagaggtaagtggaattcctagtgtagcggtgaaatgcgtagatattaggaggaacaccagtggcgaaggcgacttactggactgaaactgacgctgaggctcgaaagcgtggggagcaaacaggattagataccctggtagtccacgccgtaaacgatgaatactaggtgtcggggcccatccgggcttcggtgccgcggctaacgcaataagtattccacctggggagtacgttcgcaagaatgaaactcaaaggaattgacggggacccgcacaagcggtggagcatgtggtttaattcgaagcaacgcgaagaaccttaccaagtcttgacatcccattgaccgtcccgtaacggggacttctcttcggagcaatggagacaggtggtgcatggttgtcgtcagctcgtgtcgtgagatgttgggttaagtcccgcaacgagcgcagcccttatctttagtagccagcatttaaggtgggcactctagagagactgccggggataacccggaggaaggcggggatgacgtcaaatcatcatgccccttatgatttgggctacacacgtgctacaatggcgtaaacaaagggaagcaacagggtgacctcaagcaaatcccaaaaataacgtcccagttcggattgtagtctgcaactcgactacatgaagctggaatcgctagtaatcgcggatcagaatgccgcggtgaatacgttcccgggtcttgtacacaccgcccgtcacaccatgggagtcggaaatgcccgaagtcagtgacccaaccgcaaggagggagctgccgaaggtggagccgataactggggtgaagtcgtaacaaggtagccgt

SEQ ID NO: 1065 - DNA, 1330 bp, Lachnospiraceae sp.
  C1
gatgaacgctggcggcgtgcttaacacatgcaagtcgaacgaatggcggacgggtgagtaacgcgtgggtaacctgcctcatacagggggataacagttggaaacgactgttaataccgcataagaaaaagtggtatgagatggacccgcgttcgattagccagttggcggggtaacggcccaccaaagcgacgatcgatagccgatctgagaggatgaccggccacattgggactgagacacggcccaaactcctacgggaggcagcagtggggaatattgcacaatgggggaaaccctgatgcagcgacgccgcgtgagtgaagaagtatttcggtatgtaaagctctatcagcagggaagatgacggtacctgagtaagaagccccggctaactacgtgccagcagccgcggtaatacgtagggggcaagcgttatccggatttactgggtgtaaagggagcgcagacggctctgcaagtctgaagtgaaagcccgcggcttaaccgcgggactgctttggaaactgcaaggcttgagtatcggaggggcaggcggaattcctagtgtagcggtgaaatgcgtagatattaggaagaacaccggtggcgaaggcggcctgctggacgaactgacgttgaggctcgaaggcgtggggagcaaacaggattagataccctggtagtccacgcggtaaacgatgaatactaggtgttggtgcatcggtgccgtcgcaaacgcaataagtattccacctggggagtacgttcgcaagaatgaaactcaaaggaattgacggggacccgcacaagcagtggagcatgtggtttaattcgaagcaacgcgaagaaccttaccaaatcttgacatcgacaggtggtgcatggttgtcgtcagctcgtgtcgtgagatgttgggttaagtcccgcaacgagcgcaacccctattgccggtagccagcagctgggcactccggcgagactgcccgggataaccgggaggaaggcggggatgacgtcaaatcatcatgccccttatgatttgggcaacacacgtgctacaatggcgttcaaagagaagcgagaacgcgagtttaagcaaagctcaaaacgtctcagttcggatgcagtctgcaactcgactgcagaagctggaattgctagtaatcgcgaatcagcatgtcgcggtgaatacgttcccgggtcttgtacacaccgcccgtcacaccatgggagtcagcaacgcccgaagtcggtacccagggagctgccgaaggcggggcggataactggggtgaagtcgtaacaaggtagccgtatcggaaggtgc

SEQ ID NO: 1066 - DNA, 1406 bp, Lactobacillus acidipiscis
  modified_base (69)..(69): a, c, t, g, unknown or other
  modified_base (461)..(461): a, c, t, g, unknown or other
  modified_base (651)..(651): a, c, t, g, unknown or other
  modified_base (678)..(678): a, c, t, g, unknown or other
  modified_base (828)..(828): a, c, t, g, unknown or other
  modified_base (1221)..(1221): a, c, t, g, unknown or other
  modified_base (1223)..(1223): a, c, t, g, unknown or other
  modified_base (1242)..(1242): a, c, t, g, unknown or other
  modified_base (1247)..(1247): a, c, t, g, unknown or other
  modified_base (1268)..(1268): a, c, t, g, unknown or other
  modified_base (1282)..(1282): a, c, t, g, unknown or other
  modified_base (1287)..(1287): a, c, t, g, unknown or other
  modified_base (1321)..(1321): a, c, t, g, unknown or other
  modified_base (1386)..(1386): a, c, t, g, unknown or other
acgctggcggcgtgcctaatacatgcaagtcgaacgcaatctttgaccaatgagtgcttgcactcagcngtcaaagtgcgagtggcgaacgggtgagtaacacgtgggcaatctgcccaaaagtgggggataacacttggaaacaggtgctaataccgcatcaaccggctgaccgcatggtcggccgggcaaagacggcgtcagctgtcgcttttggatgagcccgcggcgtattaactagttggtaaggtaacggcttaccaaggtgatgatacgtagccgaactgagaggttgatcggccacattgggactgagacacggcccaaactcctacgggaggcagcagtagggaatcttccacaatggacgcaagtctgatggagcaacgccgcgtgtatgaagaaggtcttcggatcgtaaaatactgttgtcagagaagaacacgtgatagagtaactgntatggcgctgacggtatctgaccagcaagtcacggctaactacgtgccagcagccgcggtaatacgtaggtggcaagcgttgtccggatttattgggcgtaaagggaacgcaggcggtcttttaagtctgatgtgaaagccttcggcttaaccggagaagtgcattggaaactggaagacttgagtgcanaagaggagagtggaactccatgtgtancggtgaaatgcgtaaatatatggaagaacaccagtggcgaaagcggctctctggtctgtaactgacgctgaggttcgaaagcgtggggagcgaacaggattagataccctggtagtccacgctgtaaacgatgaatgctaggtgttgganggtttccgcccttcggtgccgcagctaacgcactaagcattccgcctggggagtacgatcgcaagattgaaactcaaaggaattgacgggggcccgcacaagcggtggagcatgtggtttaattcgaagcaacgcgaagaaccttaccaggtcttgacatcttttgaccatctgagagatcagaatttcccttcggggacaaaatgacaggtggtgcatggctgtcgtccagctcgtgttcgtgagatgttgggttaagtcccgcaacgagcgcaacccttattgtcagttgccagcattcagttgggcactctggcgagactgccggtgacaaaccggaggaaggtggggatgacgtcaagtcatcatgccccttatgacctgggctacacncntgctacaatggacgatacnacgantcgcgagaccgcgaggtttanctaatctctgaaantcgtnctcagttcggatcgtaggctgcaactcgcctacntgaagtcggaatcgctagtaatcgcggatcagcatgccgcggtgaatacgttcccgggccttgtncacaccgcccgtcacaccat

SEQ ID NO: 1067 - DNA, 1421 bp, Lactobacillus acidophilus
agcgagctgaaccaacagattcacttcggtgatgacgttgggaacgcgagcggcggatgggtgagtaacacgtggggaacctgccccatagtctgggataccacttggaaacaggtgctaataccggataagaaagcagatcgcatgatcagcttataaaaggcggcgtaagctgtcgctatgggatggccccgcggtgcattagctagttggtagggtaacggcctaccaaggcaatgatgcatagccgagttgagagactgatcggccacattgggactgagacacggcccaaactcctacgggaggcagcagtagggaatcttccacaatggacgaaagtctgatggagcaacgccgcgtgagtgaagaaggttttcggatcgtaaagctctgttgttggtgaagaaggatagaggtagtaactggcctttatttgacggtaatcaaccagaaagtcacggctaactacgtgccagcagccgcggtaatacgtaggtggcaagcgttgtccggatttattgggcgtaaagcgagcgcaggcggaagaataagtctgatgtgaaagccctcggcttaaccgaggaactgcatcggaaactgtttttcttgagtgcagaagaggagagtggaactccatgtgtagcggtggaatgcgtagatatatggaagaacaccagtggcgaaggcggctctctggtctgcaactgacgctgaggctcgaaagcatgggtagcgaacaggattagataccctggtagtccatgccgtaaacgatgagtgctaagtgttgggaggtttccgcctctcagtgctgcagctaacgcattaagcactccgcctggggagtacgaccgcaaggttgaaactcaaaggaattgacgggggcccgcacaagcggtggagcatgtggtttaattcgaagcaacgcgaagaaccttaccaggtcttgacatctaatgcaatccgtagagatacgtatttcccttcggggacactaagacaggtggtgcatggctgtcgtcagctcgtgtcgtgagatgttgggttaagtcccgcaacgagcgcaacccttgtcattagttgccagcattaagttgggcactctaatgagactgccggtgacaaaccggaggaaggtggggatgacgtcaagtcatcatgccccttatgacctgggctacacacgtgctacaatggacagtacaacgaggagcaagcctgcgaaggcaagcgaatctcttaaagctgttctcagttcggactgcagtctgcaactcgactgcacgaagctggaatcgctagtaatcgcggatcagcacgccgcggtgaatacgttcccgggccttgtacacaccgcccgtcacaccatgggagtctgcaatgcccaaagccggtggcctaaccttcgggaaggagcc

SEQ ID NO: 1068 - DNA, 1515 bp, Lactobacillus alimentarius
  modified_base (1)..(1): a, c, t, g, unknown or other
  modified_base (82)..(82): a, c, t, g, unknown or other
  modified_base (214)..(214): a, c, t, g, unknown or other
  modified_base (217)..(217): a, c, t, g, unknown or other
  modified_base (260)..(260): a, c, t, g, unknown or other
  modified_base (359)..(360): a, c, t, g, unknown or other
  modified_base (765)..(765): a, c, t, g, unknown or other
  modified_base (767)..(767): a, c, t, g, unknown or other
  modified_base (957)..(957): a, c, t, g, unknown or other
  modified_base (992)..(992): a, c, t, g, unknown or other
ntaatatgagagtttgatcctggctcaggacgaacgctggcggcatgcctaatacatgcaagtcgaacgaactttcctattnattgatgcttgcatcatgatttagatctaagtgagtggcggacgggtgagtaacacgtgggtaacctgcccagaagtgggggataacatttggaaacaagtgctaataccgcataacaacattaaacacatnttntttgtttaaaagatggttttgctatctcttctggatggacccncggcgtattagctagttggtgaggtaatagctcaccaaggcgatgatacgtagccgacctgagagggtaatcggccacattgggactgagacacggccnnaactcctacgggaggcagcagtagggaatcttccacaatggacgaaagtctgatggagcaatgccgcgtgagtgaagaaggttttcggatcgtaaaactctgttgttgaagaagaacatatgtgagagtaactgttcacgtactgacggtattcaaccagaaagccacggctaactacgtgccagcagccgcggtaatacgtaggtggcaagcgttgtccggatttattgggcgtaaagagaatgtaggcggttcattaagtttgaagtgaaagccctcggctcaaccgaggaagtgcttcgaaaactggtgaacttgagtgcagaagaggaaagtggaactccatgtgtagcggtggaatgcgtagatatatggaagaacaccagtggcgaaggcggctttctngnctgtaactgacgctgagattcgaaagcatgggtagcaaacaggattagataccctggtagtccatgccgtaaacgatgagtgctaagtgttggagggtttccgcccttcagtgctgcagctaacgcattaagcactccgcctggggagtacgatcgcaagattgaaactcaaaggaattgacgggggccngcacaagcggtggagcatgtggtttaattcgaagnaacgcgaagaaccttaccaggtcttgacataccatgaaaagctaagagattagtctttcccttcggggacatggatacaggtggtgcatggttgtcgtcagctcgtgtcgtgagatgttgggttaagtcccgcaacgagcgcaacccttattatcagttgccagcattcagttgggcactctggtgagactgccggtgataaaccggaggaaggtggggacgacgtcaaatcatcatgccccttatgacctgggctacacacgtgctacaatggtcggtacaacgtgttgcgaactcgcgagggcaagcaaatcacttaaaaccgatctcagttcggattgcaggctgcaactcgcctgcatgaagctggaatcgctagtaatcgcggatcagcatgccgcggtgaatacgttcccgggccttgtacacaccgcccgtcacaccatgagagtttgtaacacccaaagtcggtggggtaacccttcggggaactagccgcctaaggtgggacaaatgattaggg

SEQ ID NO: 1069 - DNA, 1561 bp, Lactobacillus amylolyticus
tgagagtttgatcctggctcaggacgaacgctggcggcgtgcctaatacatgcaagtcgagcgagcagaactaacagatctacttcggtagtgacgtttcggaagcgagcggcggatgggtgagtaacacgtgggtaacctgcccttaagtctgggataccacttggaaacaggtgctaataccggataacaacaagtgctgcatggcacttgcttgaaaggcggcgcaagctgtcgctaaaggatggacccgcggtgcattagctagttggtaaggtaacggcttaccaaggcaacgatgcatagccgagttgagagactgatcggccacattgggactgagacacggcccaaactcctacgggaggcagcagtagggaatcttccacaatgggcgaaagcctgatggagcaacgccgcgtgagtgaagaaggttttcggatcgtaaagctctgttgttggtgaagaaggatagaggtagtaactggcctttatttgacggtaatcaaccagaaagtcacggctaactacgtgccagcagccgcggtaatacgtaggtggcaagcgttgtccggatttattgggcgtaaagcgagcgcaggcggagaaataagtctgatgtgaaagccctcggcttaaccggggaattgcatcggaaactgtttttcttgagtgcagaagaggagagtggaactccatgtgtagcggtggaatgcgtagatatatggaggaacaccagtggcgaaggcggctctctggtctgtaactgacgctgaggctcgaaagcatgggtagcgaacaggattagataccctggtagtccatgccgtaaacgatgagtgctaagtgttgggaggcttccgcctctcagtgctgcagctaacgcattaagcactccgcctggggagtacgaccgcaaggttgaaactcaaaggaattgacgggggcccgcacaagcggtggagcatgtggtttaattcgaagcaacgcgaagaaccttaccaggtcttgacatctagcgcaatccgtagagatacggagttcccttcggggacgctaagacaggtggtgcatggctgtcgtcagctcgtgtcgtgagatgttgggttaagtcccgcaacgagcgcaacccttgtcattagttgccagcattaagttgggcactctaatgagactgccggtgacaaaccggaggaaggtggggacgacgtcaagtcatcatgccccttatgacctgggctacacacgtgctacaatgggcagtacaacgagaagcaagcctgcgaaggcaagcgaatctctgaaagctgttctcagttcggactgcagtctgcaactcgactgcacgaagctggaatcgctagtaatcgcggatcagcacgccgcggtgaatacgttcccgggtcttgtacacaccgcccgtcacaccatgggagtctgcaatgcccgaagccggtggcctaaccttcgggaaggagccgtctaaggcagggcagatgactggggtgaagtcgtaacaaggtagccgtaggagaacctgcggctggatcacctcctttct

SEQ ID NO: 1070 - DNA, 1575 bp, Lactobacillus amylovorus
tttaaaatgagagtttgatcctggctcaggacgaacgctggcggcgtgcctaatacatgcaagtcgagcgagcggaaccaacagatttacttcggtaatgacgttgggaaagcgagcggcggatgggtgagtaacacgtggggaacctgcccctaagtctgggataccatttggaaacaggtgctaataccggataataaagcagatcgcatgatcagcttttgaaaggcggcgtaagctgtcgctaagggatggccccgcggtgcattagctagttggtaaggtaacggcttaccaaggcgacgatgcatagccgagttgagagactgatcggccacattgggactgagacacggcccaaactcctacgggaggcagcagtagggaatcttccacaatggacgcaagtctgatggagcaacgccgcgtgagtgaagaaggttttcggatcgtaaagctctgttgttggtgaagaaggatagaggtagtaactggcctttatttgacggtaatcaaccagaaagtcacggctaactacgtgccagcagccgcggtaatacgtaggtggcaagcgttgtccggatttattgggcgtaaagcgagcgcaggcggaaaaataagtctaatgtgaaagccctcggcttaaccgaggaactgcatcggaaactgtttttcttgagtgcagaagaggagagtggaactccatgtgtagcggtggaatgcgtagatatatggaagaacaccagtggcgaaggcggctctctggtctgcaactgacgctgaggctcgaaagcatgggtagcgaacaggattagataccctggtagtccatgccgtaaacgatgagtgctaagtgttgggaggtttccgcctctcagtgctgcagctaacgcattaagcactccgcctggggagtacgaccgcaaggttgaaactcaaaggaattgacgggggcccgcacaagcggtggagcatgtggtttaattcgaagcaacgcgaagaaccttaccaggtcttgacatctagtgcaatctgtagagatacggagttcccttcggggacgctaagacaggtggtgcatggctgtcgtcagctcgtgtcgtgagatgttgggttaagtcccgcaacgagcgcaacccttgttattagttgccagcattaagttgggcactctaatgagactgccggtgacaaaccggaggaaggtggggatgacgtcaagtcatcatgccccttatgacctgggctacacacgtgctacaatgggcagtacaacgagaagcaagcctgcgaaggcaagcgaatctctgaaagctgttctcagttcggactgcagtctgcaactcgactgcacgaagctggaatcgctagtaatcgcggatcagcacgccgcggtgaatacgttcccgggccttgtacacaccgcccgtcacaccatgggagtctgcaatgcccaaagccggtggcctaaccttcgggaaggagccgtctaaggcagggcagatgactggggtgaagtcgtaacaaggtagccgtaggagaacctgcggctggatcacctcctttctaaggaag

SEQ ID NO: 1071 - DNA, 938 bp, Lactobacillus antri
  modified_base (16)..(16): a, c, t, g, unknown or other
  modified_base (18)..(18): a, c, t, g, unknown or other
  modified_base (20)..(21): a, c, t, g, unknown or other
  modified_base (603)..(603): a, c, t, g, unknown or other
  modified_base (642)..(642): a, c, t, g, unknown or other
  modified_base (661)..(661): a, c, t, g, unknown or other
  modified_base (699)..(699): a, c, t, g, unknown or other
  modified_base (768)..(768): a, c, t, g, unknown or other
  modified_base (777)..(777): a, c, t, g, unknown or other
  modified_base (798)..(798): a, c, t, g, unknown or other
  modified_base (836)..(836): a, c, t, g, unknown or other
  modified_base (844)..(844): a, c, t, g, unknown or other
  modified_base (855)..(855): a, c, t, g, unknown or other
  modified_base (913)..(913): a, c, t, g, unknown or other
  modified_base (916)..(916): a, c, t, g, unknown or other
  modified_base (918)..(919): a, c, t, g, unknown or other
  modified_base (931)..(931): a, c, t, g, unknown or other
tgcactgaattgacgntngnntcccagtgagcggcggacgggtgagtaacacgtgggcaacctgccctgaagcgggggataacatctggaaacaggtgctaataccgcataacaacgaaaaccacatggttttcgtttcaaagatggtttcggctatcacttcaggatgggcccgcggtgcattagctagttggtaaggtaacggcttaccaaggcgatgatgcatagccgagttgagagactgatcggccacaatggaactgagacacggtccatactcctacgggaggcagcagtagggaatcttccacaatgggcgcaagcctgatggagcaacaccgcgtgagtgaagaagggtttcggctcgtaaagctctgttgttggagaagaacgtgcgtgagagtaactgttcacgcagtgacggtatccaaccagaaagtcacggctaactacgtgccagcagccgcggtaatacgtaggtggcaagcgttatccggatttattgggcgtaaagcgagcgcaggcggttgcttaggtctgatgtgaaagccttcggcttaaccgaagaagtgcatcggaaaccgggcgacttgagtgcagaanaggacagtggaactccatgtgtagcggtggaatgcgtanatatatggaagaacaccantggcgaaggcggctgtctggtctgcaactgacgctgangctcgaaagcatgggtagcgaacaggattagataccctggtagtccatgccgtaaacgatgagtgctangtgttgganggtttccgcccttcagtgccngagctaacgcattaagcactccgcctggggagtacgancgcaaggntgaaactcaanggaattgacgggggcccgcacaagcggtggagcatgtggtttaattcgaagctacgcnaanannttaccaggtctngacatct

SEQ ID NO: 1072 - DNA, 1430 bp, Lactobacillus brevis
gaacgagcttccgttgaatgacgtgcttgcactgatttcaacaatgaagcgagtggcgaactggtgagtaacacgtgggaaatctgcccagaagcaggggataacacttggaaacaggtgctaataccgtataacaacaaaatccgcatggattttgtttgaaaggtggcttcggctatcacttctggatgatcccgcggcgtattagttagttggtgaggtaaaggcccaccaagacgatgatacgtagccgacctgagagggtaatcggccacattgggactgagacacggcccaaactcctacgggaggcagcagtagggaatcttccacaatggacgaaagtctgatggagcaatgccgcgtgagtgaagaagggtttcggctcgtaaaactctgttgttaaagaagaacacctttgagagtaactgttcaagggttgacggtatttaaccagaaagccacggctaactacgtgccagcagccgcggtaatacgtaggtggcaagcgttgtccggatttattgggcgtaaagcgagcgcaggcggttttttaagtctgatgtgaaagccttcggcttaaccggagaagtgcatcggaaactgggagacttgagtgcagaagaggacagtggaactccatgtgtagcggtggaatgcgtagatatatggaagaacaccagtggcgaaggcggctgtctagtctgtaactgacgctgaggctcgaaagcatgggtagcgaacaggattagataccctggtagtccatgccgtaaacgatgagtgctaagtgttggagggtttccgcccttcagtgctgcagctaacgcattaagcactccgcctggggagtacgaccgcaaggttgaaactcaaaggaattgacgggggcccgcacaagcggtggagcatgtggtttaattcgaagctacgcgaagaaccttaccaggtcttgacatcttctgccaatcttagagataagacgttcccttcggggacagaatgacaggtggtgcatggttgtcgtcagctcgtgtcgtgagatgttgggttaagtcccgcaacgagcgcaacccttattatcagttgccagcattcagttgggcactctggtgagactgccggtgacaaaccggaggaaggtggggatgacgtcaaatcatcatgccccttatgacctgggctacacacgtgctacaatggacggtacaacgagtcgcgaagtcgtgaggctaagctaatctcttaaagccgttctcagttcggattgtaggctgcaactcgcctacatgaagttggaatcgctagtaatcgcggatcagcatgccgcggtgaatacgttcccgggccttgtacacaccgcccgtcacaccatgagagtttgtaacacccaaagccggtgagataaccttcgggagtcagccgtctaa

SEQ ID NO: 1073 - DNA, 1578 bp, Lactobacillus buchneri
tttaagatgagagtttgatcctggctcaggacgaacgctggcggcgtgcctaatacatgcaagtcgaacgcgtcttggtcaatgaagttgagtgcttgcatttaactgatttgacattaagacgagtggcgaactggtgagtaacacgtgggtaacttgccccgaagcgggggataacatttggaaacaggtgctaataccgcataacaacaaaaaccacatggtttttgtttaaaagatggtttcggctatcactttgggatggacccgcggcgtattagctagttggtgaggtaatggctcaccaaggcaatgatacgtagccgacctgagagggtaatcggccacattgggactgagacacggcccaaactcctacgggaggcagcagtagggaatcttccacaatggacgaaagtctgatggagcaacgccgcgtgagtgatgaagggtttcggctcgtaaaactctgttgttggagaagaacgggtgtcagagtaactgttgacatcgtgacggtatccaaccagaaagccacggctaactacgtgccagcagccgcggtaatacgtaggtggcaagcgttgtccggatttattgggcgtaaagcgagcgcaggcggttttttaggtctgatgtgaaagccttcggcttaaccggagaagtgcatcggaaaccgggagacttgagtgcagaagaggacagtggaactccatgtgtagcggtgaaatgcgtagatatatggaagaacaccagtggcgaaggcggctgtctggtctgcaactgacgctgaggctcgaaagcatgggtagcgaacaggattagataccctggtagtccatgccgtaaacgatgagtgctaagtgttggagggtttccgcccttcagtgctgcagctaacgcattaagcactccgcctggggagtacgaccgcaaggttgaaactcaaaggaattgacgggggcccgcacaagcggtggagcatgtggtttaattcgatgctacgcgaagaaccttaccaggtcttgacatcttctgctaacctaagagattaggcgttcccttcggggacggaatgacaggtggtgcatggttgtcgtcagctcgtgtcgtgagatgttgggttaagtcccgcaacgagcgcaacccttattgtcagttgccagcatttagttgggcactctggcgagactgccggtgacaaaccggaggaaggtggggatgacgtcaaatcatcatgccccttatgacctgggctacacacgtgctacaatggacggtacaacgagtcgcgaaaccgcgaggtcaagctaatctcttaaagccgttctcagttcggattgtaggctgcaactcgcctacatgaagttggaatcgctagtaatcgtggatcagcatgccacggtgaatacgttcccgggccttgtacacaccgcccgtcacaccatgagagtttgtaacacccaaagccggtgaggtaaccttcgggggccagccgtctaaggtgggacagatgattagggtgaagtcgtaacaaggtagccgtaggagaacctgcggctggatcacctcctttct

SEQ ID NO: 1074 - DNA, 1573 bp, Lactobacillus casei
tttatatgagagtttgatcctggctcaggatgaacgctggcggcgtgcctaatacatgcaagtcgaacgagttctcgttgatgatcggtgcttgcaccgagattcaacatggaacgagtggcggacgggtgagtaacacgtgggtaacctgcccttaagtgggggataacatttggaaacagatgctaataccgcatagatccaagaaccgcatggttcttggctgaaagatggcgtaagctatcgcttttggatggacccgcggcgtattagctagttggtgaggtaacggctcaccaaggcgatgatacgtagccgaactgagaggttgatcggccacattgggactgagacacggcccaaactcctacgggaggcagcagtagggaatcttccacaatggacgcaagtctgatggagcaacgccgcgtgagtgaagaaggctttcgggtcgtaaaactctgttgttggagaagaatggtcggcagagtaactgttgtcggcgtgacggtatccaaccagaaagccacggctaactacgtgccagcagccgcggtaatacgtaggtggcaagcgttatccggatttattgggcgtaaagcgagcgcaggcggttttttaagtctgatgtgaaagccctcggcttaaccgaggaagcgcatcggaaactgggaaacttgagtgcagaagaggacagtggaactccatgtgtagcggtgaaatgcgtagatatatggaagaacaccagtggcgaaggcggctgtctggtctgtaactgacgctgaggctcgaaagcatgggtagcgaacaggattagataccctggtagtccatgccgtaaacgatgaatgctaggtgttggagggtttccgcccttcagtgccgcagctaacgcattaagcattccgcctggggagtacgaccgcaaggttgaaactcaaaggaattgacgggggcccgcacaagcggtggagcatgtggtttaattcgaagcaacgcgaagaaccttaccaggtcttgacatcttttgatcacctgagagatcaggtttccccttcgggggcaaaatgacaggtggtgcatggttgtcgtcagctcgtgtcgtgagatgttgggttaagtcccgcaacgagcgcaacccttatgactagttgccagcatttagttgggcactctagtaagactgccggtgacaaaccggaggaaggtggggatgacgtcaaatcatcatgccccttatgacctgggctacacacgtgctacaatggatggtacaacgagttgcgagaccgcgaggtcaagctaatctcttaaagccattctcagttcggactgtaggctgcaactcgcctacacgaagtcggaatcgctagtaatcgcggatcagcacgccgcggtgaatacgttcccgggccttgtacacaccgcccgtcacaccatgagagtttgtaacacccgaagccggtggcgtaacccttttagggagcgagccgtctaaggtgggacaaatgattagggtgaagtcgtaacaaggtagccgtaggagaacctgcggctggatcacctcctttct

SEQ ID NO: 1075 - DNA, 1544 bp, Lactobacillus catenaformis
  modified_base (67)..(67): a, c, t, g, unknown or other
  modified_base (319)..(319): a, c, t, g, unknown or other
  modified_base (327)..(328): a, c, t, g, unknown or other
  modified_base (373)..(373): a, c, t, g, unknown or other
  modified_base (581)..(581): a, c, t, g, unknown or other
  modified_base (602)..(605): a, c, t, g, unknown or other
  modified_base (639)..(639): a, c, t, g, unknown or other
  modified_base (753)..(756): a, c, t, g, unknown or other
  modified_base (920)..(921): a, c, t, g, unknown or other
  modified_base (1432)..(1432): a, c, t, g, unknown or other
  modified_base (1473)..(1473): a, c, t, g, unknown or other
  modified_base (1479)..(1479): a, c, t, g, unknown or other
  modified_base (1488)..(1496): a, c, t, g, unknown or other
  modified_base (1505)..(1529): a, c, t, g, unknown or other
tggagagtttgatcctggctcaggatgaacgctggcggcgtgcctaatacatgcaagtcgaacgggntgccattaggcactagtggcgaacgggtgaggagcacatggggaacctgcccgtcagagggggacaacagctggaaacggctgctaagaccgcataggctcaaggagggcatcctcgttgagttaaagtgtcctttcggggacagctgacggatggacctgtggcgcattagctagttggcggggtaaaggcccaccaaggcgacgatgcgtagccggcctgagagggcggacggccacactgggactgagncacggccnngactcctgcgggaggcagcagtagggaattttcggcaatgggggnaaccctgaccgagcaacgccgcgtgagtgaggaaggccttcgggctgtaaagctctgttgcagaggaagaacgggagagcgaggaaatgcgcttttcgtgacggtactctgcgagaaagccacggctaactacgtgccagcagccgcggtaatacgtaggtggcgagcgttatccggaatcattgggcgtaaagagggagcaggcggnacgcgaaggtccgtagtaaannnngaagctaaacttcgggcggctatggaaaccgcgncgcctggagtgcggaagaggaactcggaattccatgtgtagcggtgaaatgcgtagatatatggaggaacaccggtggcgaaggcggcggtctggtccggcactgacgctcagnnnngaaagcgtggggagcaaataggattagataccctagtagtccacgctgtaaacgatcgataccaggtgtcgggagtcacatcccggtgccgaagccaacgcattaagtatcgcgcctgagtagtacgtccgcaaggatgaaactcaaaggaattgacgggggcnngcacaagcggtggagcatgtggtttaattcgaagcaacgcgaagaaccttaccaggccttgacatcgatccgatcgcgcggagacgcgcgagaccttgccgaaagggaaggaggagaagacaggtggtgcatggttgtcgtcagctcgtgtcgtgagatgttgggttaagtcccgcaacgagcgcaacccctgccgccagttgccagcattcaggatggggactctggcgggactgcccctgtaagggggaggaaggcggggatgacgtcaaatcatcatgccccttatggcctgggctacacacgtgctacaatggacggagcagagggaggcgaagccgcgaggcggagcggagcccagaaacccgttcacagttcggactgcagcctgcaactcggctgcacgaagctggaatcgctagtaatcgcagatcagcatgctgcggtgaatacgttcccgggccttgtacacaccgcccgtcacaccatgagagtcggcaacgcccgaagncggcggcccaaccccgtaaggggagggagcagtcaaaggcngggcanatgattggnnnnnnnnngtaacaagnnnnnnnnnnnnnnnnnnnnnnnnngatcacctcctttct

SEQ ID NO: 1076 - DNA, 1573 bp, Lactobacillus coleohominis
tgagagtttgatcctggctcaggatgaacgccggcggtgtgcctaatacatgcaagtcgaacgcgttggcccgactgattgatgatgcttgcatcagattgacgacggtttaccaacgagtggcggacgggtgagtaacacgtaggcaacctgcccagaagcgggggacaacatttggaaacaagtgctaataccgcataacaacgaaaactgcctggttttcgtttaaaagatggtttcggctatcacttctggatgggcctgcggcgcattagctagttggtaaggcaacggcttaccaaggcagtgatgcgtagccgagttgagagactgatcggccacaatggaactgagacacggtccatactcctacgggaggcagcagtagggaatcttccacaatgggcgcaagcctgatggagcaacaccgcgtgagtgaagaagggtttcggctcgtaaaactctgttgttgaagaagaacgtgcgtgagagtaactgttcacgcagtgacggtattcaaccagaaagtcacggctaactacgtgccagcagccgcggtaatacgtaggtggcaagcgttatccggatttattgggcgtaaagcgagcgcaggcggttttctaagtctgatgtgaaagccttcggcttaaccggagaagggcatcggaaactggataacttgagtgcaagagaggacagtggaactccatgtgtagcggtggaatgcgtagatatatggaagaacaccagtggcgaaggcggctgtctagcttgcaactgacgctgaggctcgaaagcatgggtagcgaacaggattagataccctggtagtccatgccgtaaacgatgagtgctaggtgttggagggtttccgcccttcagtgccggagctaacgcattaagcactccgcctggggagtacgaccgcaaggttgaaactcaaaggaattgacgggggcccgcacaagcggtggagcatgtggtttaattcgaagctacgcgaagaaccttaccaggtcttgacatcttgcgccaacctcagagatgaggcgttcccttcggggacgcaatgacaggtggtgcatggtcgtcgtcagctcgtgtcgtgagatgttgggttaagtcccgcaacgagcgcaacccttgttactagttgccagcattcagttgggcactctagtgagactgccggtgacaaaccggaggaaggtggggacgacgtcagatcatcatgccccttatgacctgggctacacacgtgctacaatggacggtacaacgagcagcgaactcgcaagggccagctaatctcttaaaaccgttctcagttcggactgcagtctgcaactcgactgcacgaagtcggaatcgctagtaatcgcggatcagcatgccgcggtgaatacgttcccgggccttgtacacaccgcccgtcacaccatgggagtttgcaatgcccaaagccggtggcctaaccttcgggaaggagccgtctaaggcagggcagatgactggggtgaagtcgtaacaaggtagccgtaggagaacctgcggctggatcacctcctttcta

SEQ ID NO: 1077 - DNA, 1518 bp, Lactobacillus coryniformis
  modified_base (1)..(2): a, c, t, g, unknown or other
  modified_base (116)..(116): a, c, t, g, unknown or other
  modified_base (150)..(151): a, c, t, g, unknown or other
  modified_base (220)..(220): a, c, t, g, unknown or other
  modified_base (247)..(247): a, c, t, g, unknown or other
  modified_base (263)..(263): a, c, t, g, unknown or other
  modified_base (362)..(363): a, c, t, g, unknown or other
  modified_base (464)..(464): a, c, t, g, unknown or other
  modified_base (573)..(573): a, c, t, g, unknown or other
  modified_base (639)..(639): a, c, t, g, unknown or other
  modified_base (763)..(763): a, c, t, g, unknown or other
  modified_base (790)..(790): a, c, t, g, unknown or other
  modified_base (792)..(793): a, c, t, g, unknown or other
  modified_base (960)..(960): a, c, t, g, unknown or other
  modified_base (995)..(995): a, c, t, g, unknown or other
  modified_base (1080)..(1080): a, c, t, g, unknown or other
  modified_base (1181)..(1181): a, c, t, g, unknown or other
  modified_base (1391)..(1391): a, c, t, g, unknown or other
  modified_base (1416)..(1416): a, c, t, g, unknown or other
  modified_base (1430)..(1430): a, c, t, g, unknown or other
  modified_base (1436)..(1436): a, c, t, g, unknown or other
  modified_base (1497)..(1497): a, c, t, g, unknown or other
  modified_base (1511)..(1511): a, c, t, g, unknown or other
  modified_base (1514)..(1515): a, c, t, g, unknown or other
nnttatatgagagtttgatcctggctcaggacgaacgctggcggcgtgcctaatacatgcaagtcgaacgcactgacgtcgaccgaagctgcttgcagtggacgttgattgacgtnagtggcggacgggtgagtaacacgtgggtaaccnncccttaagtgggggataacatttggaaacagatgctaataccgcataaccattcagaccacatggtctnaatgtaaaagacggcctttggctgtcncttttggacggacccncggcgtattagttagttggtaaggtaacggcttaccaagacaatgatacgtagccgacctgagagggtaatcggccacattgggactgagacacggccnnaactcctacgggaggcagcagtagggaatcttccacaatggacgaaagtctgatggagcaacgccgcgtgagtgaagaaggttttaggatcgtaaaactcngttgttggagaagaacagggactagagtaactgttagtcctttgacggtatccaaccagaaagccacggctaactacgtgccagcagccgcggtaatacgtaggtggcnagcgttgtccggatttattgggcgtaaagcgagcgcaggcggttttttaagtctgatgtgaaagcnttcggcttaaccgaagaagtgcattagaaactggraaacttgagtgcagaagaggacagtggaactccatgtgtagcggtgaaatgcgtagatatatggaagaacaccagtggcgaaggcggcngtctggtctgtaactgacgctgaggcncnnaagtatggggagcgaacaggattagataccctggtagtccataccgtaaacgatgaatgctaagtgttggagggtttccgcccttcagtgctgcagctaacgcattaagcattccgcctggggagtacgaccgcaaggttgaaactcaaaggaattgacgggggccngcacaagcggtggagcatgtggtttaattcgaagnaacgcgaagaaccttaccaggtcttgacatcctttgaccactgtagagatacagctttcccttcggggacaaagtgacaggtggngcatggttgtcgtcagctcgtgtcgtgagatgttgggttaagtcccgcaacgagcgcaacccttatgactagttgccagcatttagttgggcactctagtnagactgccggtgacaaaccggaggaaggtggggatgacgtcaaatcagcatgccccttatgacctgggctacacacgtgctacaatggtcggtacaacgagttgcgaacccgcgagggtaagctaatctcttaaagccgatctcagttcggattgtaggctgcaactcgcctacatgaagccggaatcgctagtaatcgcggatcagcangccgcggtgaatacgttcccgggcnttgtacacaccgcncgtcanaccatgagagtttgtaacacccgaagtcggtggggtaacccttttagggaactagccgccnaaggtgggacagangannggg

SEQ ID NO: 1078 - DNA, 1562 bp, Lactobacillus crispatus
tgagagtttgatcctggctcaggacgaacgctggcggcgtgcctaatacatgcaagtcgagcgagcggaactaacagatttacttcggtaatgacgttaggaaagcgagcggcggatgggtgagtaacacgtggggaacctgccccatagtctgggataccacttggaaacaggtgctaataccggataagaaagcagatcgcatgatcagcttttaaaaggcggcgtaagctgtcgctatgggatggccccgcggtgcattagctagttggtaaggtaaaggcttaccaaggcgatgatgcatagccgagttgagagactgatcggccacattgggactgagacacggcccaaactcctacgggaggcagcagtagggaatcttccacaatggacgcaagtctgatggagcaacgccgcgtgagtgaagaaggttttcggatcgtaaagctctgttgttggtgaagaaggatagaggtagtaactggcctttatttgacggtaatcaaccagaaagtcacggctaactacgtgccagcagccgcggtaatacgtaggtggcaagcgttgtccggatttattgggcgtaaagcgagcgcaggcggaagaataagtctgatgtgaaagccctcggcttaaccgaggaactgcatcggaaactgtttttcttgagtgcagaagaggagagtggaactccatgtgtagcggtggaatgcgtagatatatggaagaacaccagtggcgaaggcggctctctggtctgcaactgacgctgaggctcgaaagcatgggtagtgaacaggattagataccctggtagtccatgccgtaaacgatgagtgctaagtgttgggaggtttccgcctctcagtgctgcagctaacgcattaagcactccgcctggggagtacgaccgcaaggttgaaactcaaaggaattgacgggggcccgcacaagcggtggagcatgtggtttaattcgaagcaacgcgaagaaccttaccaggtcttgacatctagtgccatttgtagagatacaaagttcccttcggggacgctaagacaggtggtgcatggctgtcgtcagctcgtgtcgtgagatgttgggttaagtcccgcaacgagcgcaacccttgttattagttgccagcattaagttgggcactctaatgagactgccggtgacaaaccggaggaaggtggggatgacgtcaagtcatcatgccccttatgacctgggctacacacgtgctacaatgggcagtacaacgagaagcgagcctgcgaaggcaagcgaatctctgaaagctgttctcagttcggactgcagtctgcaactcgactgcacgaagctggaatcgctagtaatcgcggatcagcacgccgcggtgaatacgttcccgggccttgtacacaccgcccgtcacaccatgggagtctgcaatgcccaaagccggtggcctaaccttcgggaaggagccgtctaaggcagggcagatgactggggtgaagtcgtaacaaggtagccgtaggagaacctgcggctggatcacctcctttcta

SEQ ID NO: 1079 - DNA, 1559 bp, Lactobacillus curvatus
aagtttgattatagctcaggacgaacgctggcggcgtgcctaatacatgcaagtcgaacgcactctcgttagattgaagaagcttgcttctgattgataacatttgagtgagtggcggacgggtgagtaacacgtgggtaacctgccctaaagtgggggataacatttcggaaacagatgctaataccgcataaaacctaacaccgcatggtgcaaggttgaaagatggtttcggctatcactttaggatggacccgcggtgcattagttagttggtgaggtaaaggctcaccaagaccgtgatgcatagccgacctgagagggtaatcggccacactgggactgagacacggcccagactcctacgggaggcagcagtagggaatcttccacaatggacgaaagtctgatggagcaacgccgcgtgagtgaagaaggttttcggatcgtaaaactctgttgttggagaagaacgtatttgatagtaactgatcaggtagtgacggtatccaaccagaaagccacggctaactacgtgccagcagccgcggtaatacgtaggtggcaagcgttgtccggatttattgggcgtaaagcgagcgcaggcggtttcttaagtctgatgtgaaagccttcggctcaaccgaagaagtgcatcggaaactgggaaacttgagtgcagaagaggacagtggaactccatgtgtagcggtgaaatgcgtagatatatggaagaacaccagtggcgaaggcggatgtctggtctgtaactgacgctgaggctcgaaagcatgggtagcaaacaggattagataccctggtagtccatgccgtaaacgatgagtgctaggtgttggagggtttccgcccttcagtgccgcagctaacgcattaagcactccgcctggggagtacgaccgcaaggttgaaactcaaaggaattgacgggggcccgcacaagcggtggagcatgtggtttaattcgaagcaacgcgaagaaccttaccaggtcttgacatcctttgaccactctagagatagagctttcccttcggggacaaagtgacaggtggtgcatggttgtcgtcagctcgtgtcgtgagatgttgggttaagtcccgcaacgagcgcaacccttattactagttgccagcatttagttgggcactctagtgagactgccggtgacaaaccggaggaaggtggggacgacgtcaaatcatcatgccccttatgacctgggctacacacgtgctacaatggatggtacaacgagtcgcgagaccgcgaggtttagctaatctcttaaaaccattctcagttcggattgtaggctgcaactcgcctacatgaagccggaatcgctagtaatcgcggatcagcatgccgcggtgaatacgttcccgggccttgtacacaccgcccgtcacaccatgagagtttgtaacacccaaagccggtgaggtaaccttcgggagccagccgtctaaggtgggacagatgattagggtgaagtcgtaacaaggtagccgtagagaacctgcggctggatcacctct

SEQ ID NO: 1080 - DNA, 1568 bp, Lactobacillus delbrueckii
ttcaaattgagagtttgatcctggctcaggacgaacgctggcggcgtgcctaatacatgcaagtcgagcgagctgaattcaaagatcccttcggggtgatttgttggacgctagcggcggatgggtgagtaacacgtgggcaatctgccctaaagactgggataccacttggaaacaggtgctaataccggataacaacatgaatcgcatgattcaagtttgaaaggcggcgcaagctgtcactttaggatgagcccgcggcgcattagctagttggtggggtaaaggcctaccaaggcaatgatgcgtagccgagttgagagactgatcggccacattgggactgagacacggcccaaactcctacgggaggcagcagtagggaatcttccacaatggacgcaagtctgatggagcaacgccgcgtgagtgaagaaggtcttcggatcgtaaagctctgttgttggtgaagaaggatagaggcagtaactggtctttatttgacggtaatcaaccagaaagtcacggctaactacgtgccagcagccgcggtaatacgtaggtggcaagcgttgtccggatttattgggcgtaaagcgagcgcaggcggaatgataagtctgatgtgaaagcccacggcttaaccgtggaactgcatcggaaactgtcattcttgagtgcagaagaggagagtggaactccatgtgtagcggtggaatgcgtagatatatggaagaacaccagtggcgaaggcggctctctggtctgcaactgacgctgaggctcgaaagcatgggtagcgaacaggattagataccctggtagtccatgccgtaaacgatgagcgctaggtgttggggactttccggttctcagtgccgcagcaaacgcgttaagcgctccgcctggggagtacgaccgcaaggttgaaactcaaaggaattgacgggggcccgcacaagcggtggagcatgtggtttaattcgaagcaacgcgaagaaccttaccaggtcttgacatcctgcgctacacctagagataggtggttcccttcggggacgcagagacaggtggtgcatggctgtcgtcagctcgtgtcgtgagatgttgggttaagtcccgcaacgagcgcaacccttgtctttagttgccatcattaagttgggcactctaaagagactgccggtgacaaaccggaggaaggtggggatgacgtcaagtcatcatgccccttatgacctgggctacacacgtgctacaatgggcagtacaacgagaagcgaacccgcgagggtaagcggatctcttaaagctgctctcagttcggactgcaggctgcaactcgcctgcacgaagctggaatcgctagtaatcgcggatcagcacgccgcggtgaatacgttcccgggccttgtacacaccgcccgtcacaccatggaagtctgcaatgcccaaagtcggtgagataacctttataggagtcagccgcctaaggcagggcagatgactggggtgaagtcgtaacaaggtagccgtaggagaacctgcggctggatcacctcctttct

SEQ ID NO: 1081 - DNA, 1464 bp, Lactobacillus dextrinicus
  modified_base (394)..(394): a, c, t, g, unknown or other
  modified_base (397)..(397): a, c, t, g, unknown or other
  modified_base (781)..(781): a, c, t, g, unknown or other
ctggcggcgtgcctaatacatgcaagtcgaacgagtttgcttttaatgaaggcggtgcttgcaccaactgatttaaaaataaacgagtggcggacgggtgagtaacacgtgggtaacctaccctaaagtgggggataacatttggaaacagatgctaataccgcataatatcaaaaaccacatggtttttaattgaaagacggcgtaagctgtcacttttggatggacccgcggcgtattagctagttggtgaggtaacggctcaccaaggcgatgatacgtagccgacctgagagggtgatcggccacattgggactgagacacggcccaaactcctacgggaggcagcagtagggaatcttccacaatggacgaaagtctgatggagcaacnccncgtgagtgaagaaggttttcggatcgtaaaactctgttattggagaagaacgtatttggtagtaactggccagatagtgacggtatccaatcagaaagccacggctaactacgtgccagcagccgcggtaatacgtaggtggcaagcgttgtccggatttattgggcgtaaagcgagtgcaggcggttttttaagtctgatgtgaaagccttcggcttaaccgaagaaatgcattggaaactgggaaacttgagtgcagaagaggagagtggaactccatgtgtagcggtgaaatgcgtagatatatggaagaacaccagtggcgaaggcggctctctggtctgtaactgacgctgaggctcgaaagcgtgggtagcaaacagnattagataccctggtagtccacgccgtaaacgatgagtgctaagtgttggagggtttccgcccttcagtgctgcagctaacgcattaagcactccgcctggggagtacgaccgcaaggttgaaactcaaaggaattgacgggggcccgcacaagcggtggagcatgtggtttaattcgaagcaacgcgaagaaccttaccaggtcttgacatctagcgccaatcctagagataggacgttcccttcggggacgctaagacaggtggtgcatggttgtcgtcagctcgtgtcgtgagatgttgggttaagtcccgcaacgagcgcaacccttattatcagttgccagcatttagttgggcactctggtgagactgccggtgacaaaccggaggaaggtggggatgacgtcaaatcatcatgccccttatgacctgggctacacacgtgctacaatggctagtacaacgagttgcgagaccgcgaggtcaagctaatctctaaaagctagtctcagttcggattgtaggctgcaactcgcctacatgaagttggaatcgctagtaatcgcggatcagcacgccgcggtgaatacgttcccgggccttgtacacaccgcccgtcacaccatgagagtttgtaacacccgaagccggtggagtaacccgtaagggagctagccgtct

SEQ ID NO: 1082 - DNA, 1517 bp, Lactobacillus farciminis
  modified_base (1)..(2): a, c, t, g, unknown or other
  modified_base (154)..(154): a, c, t, g, unknown or other
  modified_base (297)..(297): a, c, t, g, unknown or other
  modified_base (360)..(361): a, c, t, g, unknown or other
  modified_base (551)..(552): a, c, t, g, unknown or other
  modified_base (571)..(571): a, c, t, g, unknown or other
  modified_base (761)..(761): a, c, t, g, unknown or other
  modified_base (956)..(958): a, c, t, g, unknown or other
  modified_base (993)..(993): a, c, t, g, unknown or other
  modified_base (1136)..(1136): a, c, t, g, unknown or other
  modified_base (1410)..(1410): a, c, t, g, unknown or other
  modified_base (1414)..(1414): a, c, t, g, unknown or other
  modified_base (1428)..(1430): a, c, t, g, unknown or other
nntaatatgagagtttgatcctggctcaggacgaacgctggcggcatgcctaatacatgcaagtcgaacgaaccatcctgaagattgaagcttgcttcatgattcagaccttggtgagtggcggacgggtgagtaacacgtgggtaacctgccnaaaagtgggggataacatttggaaacaagtgctaataccgcataacaactactttcacatgatcgtagcttgaaagatggctctgctatcgcttttggatggacccgcggcgtattagctagttggtgaggtaatagctcacnaaggcaatgatacgtagccgacctgagagggtaatcggccacattgggactgagacacggccnnaactcctacgggaggcagcagtagggaatcttccacaatgggcgaaagcctgatggagcaatgccgcgtgagtgaagaaggttttcggatcgtaaaactctgttgttgaagaagaacatgcgtgagagtaactgttcacgtactgacggtattcaaccagaaagctacggctaactacgtgccagcagcnncggtaatacgtaggtggcnagcgttgtccggatttattgggcgtaaagagaatgtaggcggtttattaagtttgaagtgaaagccctcggctcaaccgaggaagtgcttcgaaaactggtaaacttgagtgcagaagaggaaagtggaactccatgtgtagcggtggaatgcgtagatatatggaagaacaccagtggcgaaggcggcnttctggtctgtaactgacgctgagattcgaaagcatgggtagcaaacaggattagataccctggtagtccatgccgtaaacgatgagtgctaagtgttggagggtttccgcccttcagtgctgcagctaacgcattaagcactccgcctggggagtacgatcgcaagattgaaactcaaaggaattgacgggggnnngcacaagcggtggagcatgtggtttaattcgaagnaacgcgaagaaccttaccaggtcttgacataccatgacaaactaagagattagtctttcccttcggggacatggatacaggtggtgcatggttgtcgtcagctcgtgtcgtgagatgttgggttaagtcccgcaacgagcgcnacccttattatcagttgccagcattcagttgggcactctggtgagactgccggtgacaaaccggaggaaggtggggacgacgtcaaatcatcatgccccttatgacctgggctacacacgtgctacaatggtcggtacaacgtgttgcgaactcgcgagggcaagcaaatcacttaaaaccgatctcagttcggattgcaggctgcaactcgcctgcatgaagctggaatcgctagtaatcgcggatcagcatgccgcggtgaatacgttcccnggcnttgtacacaccgcnnntcacaccatgagagtttgtaacacccaaagtcggtggggtaacccttcggggaactagccgcctaaggtgggacaaatgattagggt

SEQ ID NO: 1083 - DNA, 1419 bp, Lactobacillus fermentum
  modified_base (1405)..(1405): a, c, t, g, unknown or other
tggcccaattgattgatggtgcttgcacctgattgattttggtcgccaacgagtggcggacgggtgagtaacacgtaggtaacctgcccagaagcgggggacaacatttggaaacagatgctaataccgcataacagcgttgttcgcatgaacaacgcttaaaagatggcttctcgctatcacttctggatggacctgcggtgcattagcttgttggtggggtaatggcctaccaaggcgatgatgcatagccgagttgagagactgatcggccacaatgggactgagacacggcccatactcctacgggaggcagcagtagggaatcttccacaatgggcgcaagcctgatggagcaacaccgcgtgagtgaagaagggtttcggctcgtaaagctctgttgttaaagaagaacacgtatgagagtaactgttcatacgttgacggtatttaaccagaaagtcacggctaactacgtgccagcagccgcggtaatacgtaggtggcaagcgttatccggatttattgggcgtaaagagagtgcaggcggttttctaagtctgatgtgaacttcggcttaaccggagaagtgcatcggaaactggataacttgagtgcagaagagggtagtggaactccatgtgtagcggtggaatgcgtagatatatggaagaacaccagtggcgaaggcggctacctggtctgcaactgacgctgagactcgaaagcatgggtagcgaacaggattagataccctggtagtccatgccgtaaacgatgagtgctagtgttggagggtttccgcccttcagtgccggagctaacgcattaagcactccgcctggggagtacgaccgcaaggttgaaactcaaaggaattgacgggggcccgcacaagcggtggagcatgtggtttaattcgaagctacgcatccaaccttaccaggtcttgacatcttgcgcccaccctagagatagggcgtttccttcgggaacgcaatgacaggtggtgcatggtcgtcgtcagctcgtgtcgtgagatgttgggttaagtcccgcaacgagcgcaacccttgttactagttgccagcattaagttgggcactctagtgagactgccggtgacaaaccggaggaaggtggggacgacgtcagatcatcatgccccttatgacctgggctacacacgtgctacaatggacggtacaacgagtcgcgaactcgcgagggcaagcaaatctcttaaaaccgttctcagttcggactgcaggctgcaactcgcctgcacgaagtcggaatcgctagtaatcgcggatcagcatgccgcggtgaatacgttcccgggccttgtacacaccgcccgtcacaccatgagagtttgtaacacccaaagtcggtggggtanccttttaggagcca

SEQ ID NO: 1084 - DNA, 995 bp, Lactobacillus gasseri
  modified_base (43)..(43): a, c, t, g, unknown or other
  modified_base (50)..(50): a, c, t, g, unknown or other
  modified_base (918)..(918): a, c, t, g, unknown or other
  modified_base (976)..(976): a, c, t, g, unknown or other
  modified_base (984)..(984): a, c, t, g, unknown or other
gagcttgcctagatgaatttggtgcttgcaccaaatgaaactngatacangcgagcggcggacgggtgagtaacacgtgggtaacctgcccaagagactgggataacacctggaaacagatgctaataccggataacaacactagacgcatgtctagagtttaaaagatggttctgctatcactcttggatggacctgcggtgcattagctagttggtaaggtaacggcttaccaaggcaatgatgcatagccgagttgagagactgatcggccacattgggactgagacacggcccaaactcctacgggaggcagcagtagggaatcttccacaatggacgcaagtctgatggagcaacgccgcgtgagtgaagaagggtttcggctcgtaaagctctgttggtagtgaagaaagatagaggtagtaactggcctttatttgacggtaattacttagaaagtcacggctaactacgtgccagcagccgcggtaatacgtaggtggcaagcgttgtccggatttattgggcgtaaagcgagtgcaggcggttcaataagtctgatgtgaaagccttcggctcaaccggagaattgcatcagaaactgttgaacttgagtgcagaagaggagagtggaactccatgtgtagcggtggaatgcgtagatatatggaagaacaccagtggcgaaggcggctctctggtctgcaactgacgctgaggctcgaaagcatgggtagcgaacaggattagataccctggtagtccatgccgtaaacgatgagtgctaagtgttgggaggtttccgcctctcagtgctgcagctaacgcattaagcactccgcctggggagtacgaccgcaaggttgaaactcaaaggaattgacgggggcccgcacaagcggtggagcatgtggnttaattcgaagcaacgcgaagaaccttaccaggtcttgacatccagtgcaaacctaanagattagnagttcccttcg

SEQ ID NO: 1085 - DNA, 1373 bp, Lactobacillus gastricus
tatatggagtttgatcctggctcaggatgaacgccggcggtgtgcctaatacatgcaagtcgaacgagtggcggacgggtgagtaacacgtaggtaacctgcccagaagcgggggataacatctggaaacaggtgctaataccgcataacaaaagtcacttctggatggacctgcggcgcattagcttgttggtagggtaatggcctaccaaggcagtgatgcgtagccgagttgagagactgatcggccacaatgggactgagacacggcccatactcctacgggaggcagcagtagggaatcttccacaatgggcgcaagcctgatggagcaacaccgcgtgagtgaagaagggtttcggctcgtaaagctctgttgttgaagaagatgacggtattcaaccagaaagtcacggctaactacgtgccagcagccgcggtaatacgtaggtggcaagcgttatccggatttattgggcgtaaagagagtgcaggcggtttcttaagtctgatgtgaaagccttcggctcaaccgaagaagtgcatcggaaactgggagacttgagtacagaagagggcagtggaactccatgtgtagcggtggaatgcgtagatatatggaagaacaccagtggcgaaggcggctgcctggtctgactgacgctgagactcgaaagcatgggtagcgaacaggattagataccctggtagtccatgccgtaaacgatgagtgctaggtgttggagcttcagtgccggagctaacgcattaagcactccgcctggggagtacgaccgcaaggttgaaactcaaaggaattgacgggggcccgcacaagcggtggagcatgtggtttaattcgaagctacgcgaagaaccttaccaggtcttgacatcgacaggtggtgcatggtcgtcgtcagctcgtgtcgtgagatgttgggttaagtcccgcaacgagcgcaacccttgttactagttgccagcatgggcactctagtgagactgccggtgacaaaccggaggaaggtggggacgacgtcagatcatcatgccccttatgacctgggctacacacgtgctacaatggacggcaacgagtcgcgaactcgcgagggcaagcaaatctcttccgttctcagttcggatgcaggctgcaactcgcctgcagaagtcggaatcgctagtaatcgcggatcagcatgccgcggtgaatacgttcccgggccttgtacacaccgcccgtcacaccatgagagtttgtaacacccaaagtcggtgggtagccagccgcctaaggtgggacagatgattagggtgaagtcgtaacaaggtagccgtaggagaacctgcggctggatcacctcctttct

SEQ ID NO: 1086 - DNA, 1287 bp, Lactobacillus sp.
  C1
agtggcgaactggtgagtaacacgtgggtaacctgccctgaagtgggggataacacttggaaacaggtgctaataccgcataacgaaagtcacttttggatggacccgcggcgtattagcttgttggtgaggtaacggctcaccaaggccatgatacgtagccgacctgagagggtaatcggccacattgggactgagacacggcccaaactcctacgggaggcagcagtagggaatcttccacaatggacgaaagtctgatggagcaacgccgcgtgagtgatgaagggtttcggctcgtaaaactctgttgttggagaagatgacggtatccaaccagaaagccacggctaactacgtgccagcagccgcggtaatacgtaggtggcaagcgttgtccggatttattgggcgtaaagcgagcgcaggcggttttttaggtctgatgtgaaagccttcggcttaaccggagaagggcatcggaaaccgggagacttgagtgcagaagaggacagtggaactccatgtgtagcggtgaaatgcgtagatatatggaagaacaccagtggcgaaggcggctgtctggtctgactgacgctgaggctcgaaagcatgggtagcgaacaggattagataccctggtagtccatgccgtaaacgatgagtgctaagtgttggagcttcagtgctgcagctaacgcattaagcactccgcctggggagtacgaccgcaaggttgaaactcaaaggaattgacgggggcccgcacaagcggtggagcatgtggtttaattcgatgctacgcgaagaaccttaccaggtcttgacatcgacaggtggtgcatggttgtcgtcagctcgtgtcgtgagatgttgggttaagtcccgcaacgagcgcaacccttattgtcagttgccagcatgggcactctggcgagactgccggtgacaaaccggaggaaggtggggatgacgtcaaatcatcatgccccttatgacctgggctacacacgtgctacaatggacggcaacgagtcgcgaaaccgcgaggtcaagctaatctcttccgttctcagttcggatgccggctgcaactcgcctgcagaagttggaatcgctagtaatcgtggatcagcatgccacggtgaatacgttcccgggccttgtacacaccgcccgtcacaccatgagagtttgtaacacccaaagccggtaggtaaccagccgtctaaggtgggacagatgattagggtgaagtcgtaacaaggtagccgtaggagaacctgc

SEQ ID NO: 1087 - DNA, 1254 bp, Lactobacillus sp.
  C2
agtggcgaactggtgagtaacacgtgggtaacctgccctgaagtaggggataacacttggaaacaggtgctaataccgtataacaaaagtcactttaggatggacccgcggcgtattagcttgttggtgaggtaacggctcaccaaggcaatgatacgtagccgacctgagagggtaatcggccacattgggactgagacacggcccaaactcctacgggaggcagcagtagggaatcttccacaatggacgaaagtctgatggagcaacgccgcgtgagtgatgaagggtttcggctcgtaaaactctgttgttggagaagatgacggtatccaaccagaaagccacggctaactacgtgccagcagccgcggtaatacgtaggtggcaagcgttgtccggatttattgggcgtaaagcgagcgcaggcggttttttaggtctgatgtgaaagccttcggcttaaccggagaagtgcatcggaaaccgggagacttgagtgcagaagaggacagtggaactccatgtgtagcggtgaaatgcgtagatatatggaagaacaccagtggcgaaggcggctgtctggtctgactgacgctgaggctcgaaagcatgggtagcgaacaggattagataccctggtagtccatgccgtaaacgatgagtgctaagtgttggagcttcagtgctgcagctaacgcattaagcactccgcctggggagtacgaccgcaaggttgaaactcaaaggaattgacgggggcccgcacaagcggtggagcatgtggtttaattcgatgctacgcgaagaaccttaccaggtcttgacatcgacaggtggtgcatggttgtcgtcagctcgtgtcgtgagatgttgggttaagtcccgcaacgagcgcaacccttattgttagttgccagcatgggcactctagcaagactgccggtgacaaaccggaggaaggtggggatgacgtcaaatcatcatgccccttatgacctgggctacacacgtgctacaatggacggcaacgagtcgcgaaaccgcgaggtcaagctaatctcttccgttctcagttcggatgtaggctgcaactcgcctacagaagttggaatcgctagtaatcgtggatcagcatgccacggtgaatacgttcccgggccttgtacacaccgcccgtcacaccatgagagtttgtaacacccaaagccggtaggtaaccagccgtctaaggtgggacagatgattagggtg

SEQ ID NO: 1088 - DNA, 1016 bp, Lactobacillus helveticus
  modified_base (797)..(799): a, c, t, g, unknown or other
  modified_base (979)..(979): a, c, t, g, unknown or other
  modified_base (983)..(986): a, c, t, g, unknown or other
  modified_base (1000)..(1000): a, c, t, g, unknown or other
gtcgagcgagcagaaccagcagatttacttcggtaatgacgctggggacgcgagcggcggatgggtgagtaacacgtggggaacctgccccatagcctgggataccacttggaaacaggtgctaataccggataagaaagcagatcgcatgatcagcttataaaaggcggcgtaagctgtcgctatgggatggccccgcggtgcattagctagttggtaaggtaacggcttaccaaggcaatgatgcatagccgagttgagagactgatcggccacattgggactgagacacggcccaaactcctacgggaggcagcagtagggaatcttccacaatggacgcaagtctgatggagcaacgccgcgtgagtgaagaaggttttcggatcgtaaagctctgttgttggtgaagaaggatagaggtagtaactggcctttatttgacggtaatcaaccagaaagtcacggctaactacgtgccagcagccgcggtaatacgtaggtggcaagcgttgtccggatttattgggcgtaaagcgagcgcaggcggaagaataagtctgatgtgaaagccctcggcttaaccgaggaactgcatcggaaactgtttttcttgagtgcagaagaggagagtggaattccatgtgtagcggtggaatgcgtagatatatggaagaacaccagtggcgaaggcgactctctggtctgcaactgacgctgaggctcgaaagcatgggtagcgaacaggattagataccctggtagtccatgccgtaaacgatgagtgctaagtgttnnnggtttccgcctctcagtgctgcagctaacgcatttaagcactccgcctggggagtacgaccgcaaggttgaaactcaaaggaattgacgggggcccgcacaagcggtggagcatgtggtttaattcgaagcaacgcgaagaacccttaccaggtcttgacatctagtgccatcctaaganattnnnnttcccttcggggangctaagacaggtggtg

SEQ ID NO: 1089 - DNA, 1572 bp, Lactobacillus hilgardii
tgagagtttgatcctggctcaggacgaacgctggcggcgtgcctaatacatgcaagtcgaacgcgtcttggtcaatgaagttgagtgcttgcatttaactgatttgacattaagacgagtggcgaactggtgagtaacacgtgggtaacttgccccgaagcgggggataacatttggaaacaggtgctaataccgcataacaacaaaaaccacatggtttttgtttaaaagatggtttcggctatcactttgggatggacccgcggcgtattagctagttggtgaggtaatggctcaccaaggcaatgatacgtagccgacctgagagggtaatcggccacattgggactgagacacggcccaaactcctacgggaggcagcagtagggaatcttccacaatggacgaaagtctgatggagcaacgccgcgtgagtgatgaagggtttcggctcgtaaaactctgttgttggagaagaacgggtgtcagagtaactgttgacatcgtgacggtatccaaccagaaagccacggctaactacgtgccagcagccgcggtaatacgtaggtggcaagcgttgtccggatttattgggcgtaaagcgagcgcaggcggttttttaggtctgatgtgaaagccttcggcttaaccggagaagtgcatcggaaaccgggagacttgagtgcagaagaggacagtggaactccatgtgtagcggtgaaatgcgtagatatatggaagaacaccagtggcgaaggcggctgtctggtctgcaactgacgctgaggctcgaaagcatgggtagcgaacaggattagataccctggtagtccatgccgtaaacgatgagtgctaagtgttggagggtttccgcccttcagtgctgcagctaacgcattaagcactccgcctggggagtacgaccgcaaggttgaaactcaaaggaattgacgggggcccgcacaagcggtggagcatgtggtttaattcgatgctacgcgaagaaccttaccaggtcttgacatcttctgctaacctaagagattaggcgttcccttcggggacggaatgacaggtggtgcatggttgtcgtcagctcgtgtcgtgagatgttgggttaagtcccgcaacgagcgcaacccttattgtcagttgccagcatttagttgggcactctggcgagactgccggtgacaaaccggaggaaggtggggatgacgtcaaatcatcatgccccttatgacctgggctacacacgtgctacaatggacggtacaacgagtcgcgaaaccgcgaggtcaagctaatctcttaaagccgttctcagttcggattgtaggctgcaactcgcctacatgaagttggaatcgctagtaatcgtggatcagcatgccacggtgaatacgttcccgggccttgtacacaccgcccgtcacaccatgagagtttgtaacacccaaagccggtgaggtaaccttcgggggccagccgtctaaggtgggacagatgattagggtgaagtcgtaacaaggtagccgtaggagaacctgcggctggatcacctcctttcta

SEQ ID NO: 1090 - DNA, 1718 bp, Lactobacillus hominis
tacacatggagttccactctcctcttctgcactcaagttcaacagtttctgatgcaattctccggttgagccgaaggctttcacatcagacttattgaaccgcctgcactcgctttacgcccaataaatccggacaacgcttgccacctacgtagagtttgatcatggctcaggacgaacgctggcggcgtgcctaatacatgcaagtcgagcgagcttgcctagatgatttcggtgcttgcaccgaatgaaactagatacaagcgagcggcggacgggtgagtaacacgtgggtaacctgcccaagagactgggataacacctggaaacagatgctaataccggataacaacatctagcgcatgctagaagtttgaaagatgggtttctatcactcttggatggacctgcggtgcattagctagttggtaaggtaacggcttaccaaggcaatgatgcatagccgagttgagagactgatcggccacattgggactgagacacggcccaaactcctacgggaggcagcagtagggaatcttccacaatggacgcaagtctgatggagcaacgccgcgtgagtgaagaagggtttcggctcgtaaagctctgttggtggtgaagaaagatagaggtagtaactggcctttatttgacggtaatcacctagaaagtcacggctaactacgtgccagcagccgcggtaatacgtaggtggcaagcgttgtccggatttattgggcgtaaagcgagtgcaggcggttcaataagtctgatgtgaaagccttcggctcaaccggagaattgcatcagaaactgttgaacttgagtgcagaagaggagagtggaactccatgtgtagcggtggaatgcgtagatatatggaagaacaccagtggcgaaggcggctctctggtctgcaactgacgctgaggctcgaaagcatgggtagcgaacaggattagataccctggtagtccatgccgtaaacgatgagtgctaagtgttgggaggtttccgcctctcagtgctgcagctaacgcattaagcactccgcctggggagtacgaccgcaaggttgaaactcaaaggaattgacgggggcccgcacaagcggtggagcatgtggtttaattcgaagcaacgcgaagaaccttaccaggtcttgacatccagtgcaaacctaagagattaggtgttcccttcggggacgctgagacaggtggtgcatggctgtcgtcagctcgtgtcgtgagatgttgggttaagtcccgcaacgagcgcaacccttgtcattagttgccatcattaagttgggcactctaatgagactgccggtgacaaaccggaggaaggtggggatgacgtcaagtcatcatgccccttatgacctgggctacacacgtgctacaatggacggtacaacgagaagcgaacctgcgaaggcaagcggatctctgaaagccgttctcagttcggactgtaggctgcaactcgcctacacgaagctggaatcgctagtaatcgcggatcagcacgccgcggtgaatacgttcccgggccttgtacacaccgcccgtcacaccatgagagtctgtaacacccaaagccggtgagataaccattaaaggagtcagccgtctaaggtaggacagatgattagggtgaagtcgtaacaaggtagccgtaggagaacctgcggttggatcacctcctta

SEQ ID NO: 1091 - DNA, 1572 bp, Lactobacillus iners
aaattgagagtttgatcctggctcaggacgaacgctggcggcgtgcctaatacatgcaagtcgagcgagtctgccttgaagatcggagtgcttgcactctgtgaaacaagatacaggctagcggcggacgggtgagtaacacgtgggtaacctgcccaagagatcgggataacacctggaaacagatgctaataccggataataacagatgatgcctatcaactgtttaaaagatggttctgctatcactcttggatggacctgcggtgcattagctagttggtagggtaacggcctaccaaggcgatgatgcatagccgagttgagagactgatcggccacattgggactgagacacggcccaaactcctacgggaggcagcagtagggaatcttccacaatggacgcaagtctgatggagcaacgccgcgtgagtgaagaagggtttcggctcgtaaagctctgttgttggtgaagaaggacaggggtagtaactgacctttgtttgacggtaatcaattagaaagtcacggctaactacgtgccagcagccgcggtaatacgtaggtggcaagcgttgtccggatttattgggcgtaaagcgagtgcaggcggctcgataagtctgatgtgaaagccttcggctcaaccggagaattgcatcagaaactgtcgagcttgagtacagaagaggagagtggaactccatgtgtagcggtgaaatgcgtagatatatggaagaacaccggtggcgaaggcggctctctggtctgttactgacgctgaggctcgaaagcatgggtagcgaacaggattagataccctggtagtccatgccgtaaacgatgagtgctaagtgttgggaggtttccgcctctcagtgctgcagctaacgcattaagcactccgcctggggagtacgaccgcaaggttgaaactcaaaggaattgacgggggcccgcacaagcggtggagcatgtggtttaattcgaagcaacgcgaagaaccttaccaggtcttgacatccatagccagtctaagagattagatgttcccttcggggactatgagacaggtggtgcatggctgtcgtcagctcgtgtcgtgagatgttgggttaagtcccgcaacgagcgcaacccttgtcattagttgccagcattaagttgggcactctaatgagactgccggtgacaaaccggaggaaggtggggatgacgtcaagtcatcatgccccttatgacctgggctacacacgtgctacaatggacggtacaacgagaagcgaccctgtgaaggcaagcggatctctgaaagccgttctcagttcggattgcaggctgcaactcgcctgcatgaagctggaatcgctagtaatcgcaaatcagcacgttgcggtgaatacgttcccgggccttgtacacaccgcccgtcacaccatgagagtctgtaacgcccgaagccggcgggataaccgaaaggagtcagccgtctaaggcgggacagatgattagggtgaagtcgtaacaaggtagccgtaggagaacctgcggctggatcacctcctttct

SEQ ID NO: 1092 - DNA, 1567 bp, Lactobacillus jensenii
ttcaaaatgagagtttgatcctggctcaggacgaacgctggcggcgtgcctaatacatgcaagtcgagcgagcttgcctatagaaattcttcggaatggacatagatacaagctagcggcggatgggtgagtaacgcgtgggtaacctgcccttaagtctgggataccatttggaaacagatgctaataccggataaaagctactttcgcatgaaagaagtttaaaaggcggcgtaagctgtcgctaaaggatggacctgcgatgcattagctagttggtaaggtaacggcttaccaaggcgatgatgcatagccgagttgagagactgatcggccacattgggactgagacacggcccaaactcctacgggaggcagcagtagggaatcttccacaatggacgaaagtctgatggagcaacgccgcgtgagtgaagaaggttttcggatcgtaaagctctgttgttggtgaagaaggatagaggtagtaactggcctttatttgacggtaatcaaccagaaagtcacggctaactacgtgccagcagccgcggtaatacgtaggtggcaagcgttgtccggatttattgggcgtaaagcgagcgcaggcggattgataagtctgatgtgaaagccttcggctcaaccgaagaactgcatcagaaactgtcaatcttgagtgcagaagaggagagtggaactccatgtgtagcggtggaatgcgtagatatatggaagaacaccagtggcgaaggcggctctctggtctgtaactgacgctgaggctcgaaagcatgggtagcgaacaggattagataccctggtagtccatgccgtaaacgatgagtgctaagtgttgggaggtttccgcctctcagtgctgcagctaacgcattaagcactccgcctggggagtacgaccgcaaggttgaaactcaaaggaattgacgggggcccgcacaagcggtggagcatgtggtttaattcgaagcaacgcgaagaaccttaccaggtcttgacatcctttgaccacctaagagattaggttttcccttcggggacaaagagacaggtggtgcatggctgtcgtcagctcgtgtcgtgagatgttgggttaagtcccgcaacgagcgcaacccttgttaatagttgccagcattaagttgggcactctattgagactgccggtgacaaaccggaggaaggtggggatgacgtcaagtcatcatgccccttatgacctgggctacacacgtgctacaatgggcagtacaacgagaagcgaacctgtgaaggcaagcggatctcttaaagctgttctcagttcggactgtaggctgcaactcgcctacacgaagctggaatcgctagtaatcgcggatcagcacgccgcggtgaatacgttcccgggccttgtacacaccgcccgtcacaccatgagagtttgtaacacccaaagtcggtgaggtaacctttggagccagccgcctaaggtgggacagatgattagggtgaagtcgtaacaaggtagccgtaggagaacctgcggctggatcacctcctttct

SEQ ID NO: 1093 - DNA, 1651 bp, Lactobacillus johnsonii
agctaaacgataaaaagctcattttcaaaaggaaaatgagagtttgatcctggctcaggacgaacgctggcggcgtgcctaatacatgcaagtcgagcgagcttgcctagatgattttagtgcttgcactaaatgaaactagatacaagcgagcggcggacgggtgagtaacacgtgggtaacctgcccaagagactgggataacacctggaaacagatgctaataccggataacaacactagacgcatgtctagagtttgaaagatggttctgctatcactcttggatggacctgcggtgcattagctagttggtaaggtaacggcttaccaaggcaatgatgcatagccgagttgagagactgatcggccacattgggactgagacacggcccaaactcctacgggaggcagcagtagggaatcttccacaatggacgaaagtctgatggagcaacgccgcgtgagtgaagaagggtttcggctcgtaaagctctgttggtagtgaagaaagatagaggtagtaactggcctttatttgacggtaattacttagaaagtcacggctaactacgtgccagcagccgcggtaatacgtaggtggcaagcgttgtccggatttattgggcgtaaagcgagtgcaggcggttcaataagtctgatgtgaaagccttcggctcaaccggagaattgcatcagaaactgttgaacttgagtgcagaagaggagagtggaactccatgtgtagcggtggaatgcgtagatatatggaagaacaccagtggcgaaggcggctctctggtctgcaactgacgctgaggctcgaaagcatgggtagcgaacaggattagataccctggtagtccatgccgtaaacgatgagtgctaagtgttgggaggtttccgcctctcagtgctgcagctaacgcattaagcactccgcctggggagtacgaccgcaaggttgaaactcaaaggaattgacgggggcccgcacaagcggtggagcatgtggtttaattcgaagcaacgcgaagaaccttaccaggtcttgacatccagtgcaaacctaagagattaggtgttcccttcggggacgctgagacaggtggtgcatggctgtcgtcagctcgtgtcgtgagatgttgggttaagtcccgcaacgagcgcaacccttgtcattagttgccatcattaagttgggcactctaatgagactgccggtgacaaaccggaggaaggtggggatgacgtcaagtcatcatgccccttatgacctgggctacacacgtgctacaatggacggtacaacgagaagcgaacctgcgaaggcaagcggatctcttaaagccgttctcagttcggactgtaggctgcaactcgcctacacgaagctggaatcgctagtaatcgcggatcagcacgccgcggtgaatacgttcccgggccttgtacacaccgcccgtcacaccatgagagtctgtaacacccaaagccggtgggataacctttataggagtcagccgtctaaggtaggacagatgattagggtgaagtcgtaacaaggtagccgtaggagaacctgcggctggatcacctcctttctaaggaaggcgaaagatgatggagagtgcgagagcactaagagaag

SEQ ID NO: 1094 - DNA, 1555 bp, Lactobacillus kalixensis
ttgatcctggctcaggacgaacgctggcggcgtgcctaatacatgcaagtcgagcgaacagaagcagcagaattacttcggtaaggacgctgtggaagttagcggcggatgggtgagtaacacgtgggtaacctacccttaagactgggataccacttggaaacaggtgctaataccggataggagtatgagctgcatggcttatactttaaaggcggcgaaagctgtcactaaaggatggacccgcggtgcattagctagttggtaaggtaacggcttaccaaggcgacgatgcatagccgagttgagagactgatcggccacattgggactgagacacggcccaaactcctacgggaggcagcagtagggaatcttccacaatggacgcaagtctgatggagcaacgccgcgtgagtgaagaaggttttcggatcgtaaagctctgttgttggtgaagaaggatataggtagtaactggcctatatttgacggtaatcaaccagaaagtcacggctaactacgtgccagcagccgcggtaatacgtaggtggcaagcgttgtccggatttattgggcgtaaagcgagcgcaggcggagaaataagtctgatgtgaaagcccacggctcaaccgtggaactgcatcggaaactgtttttcttgagtgcagaagaggagagtggaactccatgtgtagcggtggaatgcgtagatatatggaagaacaccagtggcgaaggcggctctctggtctgcaactgacgctgaggctcgaaagcatgggtagcgaacaggattagataccctggtagtccatgccgtaaacgatgagtgctaagtgttgggaggtttccgcctctcagtgctgcagctaacgcattaagcactccgcctggggagtacgaccgcaaggttgaaactcaaaggaattgacgggggcccgcacaagcggtggagcatgtggtttaattcgaagcaacgcgaagaaccttaccaggtcttgacatctagtgccattctaagagattagaagttcccttcggggacgctaagacaggtggtgcatggctgtcgtcagctcgtgtcgtgagatgttgggttaagtcccgcaacgagcgcaacccttgtcattagttgccagcattaagttgggcactctaatgagactgccggtgacaaaccggaggaaggtggggatgacgtcaagtcatcatgccccttatgacctgggctacacacgtgctacaatgggcagtacaacgagaagcaagccggtgacggcaagcgaatctcttaaagctgttctcagttcggactgcagtctgcaactcgactgcacgaagctggaatcgctagtaatcgcggatcagcacgccgcggtgaatacgttcccgggccttgtacacaccgcccgtcacaccatgggagtctgcaatgcccaaagccggtggcctaaccgtaaggaaggagccgtctaaggcagggcagatgactggggtgaagtcgtaacaaggtagccgtaggagaacctgcggctggatcacctccttttct

SEQ ID NO: 1095 - DNA, 1552 bp, Lactobacillus kefiranofaciens
agtttgattcttgctcaggacgaacgctggcggcgtgcctaatacatgcaagtcgagcgagcggaaccagcagaatcacttcggtgaggacgctgggaaagcgagcggcggatgggtgagtaacacgtggggaacctgcccttaagtctgggataccacttggaaacaggtgctaataccggataagaaagcagttcgcatgaacagcttttaaaaggcggcgcaagctgtcgctaaaggatggacccgcggtgcattagctagttggtaaggtaacggcctaccaaggcagtgatgcatagccgagttgagagactgatcggccacattgggactgagacacggcccaaactcctacgggaggcagcagtagggaatcttccacaatggacgcaagtctgatggagcaacgccgcgtgagtgaagaaggttttcggaccgtaaagctctgttgttggtgaagaaggatagaggtagtaactggcctttatttgacggtaatcaaccagaaagtcacggctaactacgtgccagcagccgcggtaatacgtaggtggcaagcgttgtccggatttattgggcgtaaagcgagcgcaggcggaagaataagtctgatgtgaaagccctcggcttaaccgaggaattgcatcggaaactgtttttcttgagtgcagaagaggagagtagaactccatgtgtagcggtggaatgcgtagatatatggaagaataccagtggcgaaggcggctctctggtctgcaactgacgctgaggctcgaaagcatgggtagcgaacaggattagataccctggtagtccatgccgtaaacgatgagtgctaagtgttgggaggcttccgcctctcagtgctgcagctaacgcattaagcactccgcctggggagtacgaccgcaaggttgaaactcaaaggaattgacgggggcccgcacaagcggtggagcatgtggtttaattcgaagcaacgcgaagaaccttaccaggtcttgacatctagtgccatttgtagagatacaaagttcccttcggggacgctaagacaggtggtgcatggctgtcgtcagctcgtgtcgtgagatgttgggttaagtcccgcaacgagcgcaacccttgttattagttgccagcattaagttgggcactctaatgagactgccggtgacaaaccggaggaaggtggggatgacgtcaagtcatcatgccccttatgacctgggctacacacgtgctacaatgggcagcacaacgagcagcgagcctgcaaaggcaagcaaatctctgaaagctgttctcagttcggactgcagtctgcaactcgactgcacgaagctggaatcgctagtaatcgcggatcagcacgccgcggtgaatacgttcccgggccttgtacacaccgcccgtcacaccatgggagtctgcaatgcccaaagccggtggcctaaccgcaaggaaggagccgtctaaggcagggcagatgactggggtgaagtcgtaacaaggtagccgtaggagaacctgcggctggatcacctct

SEQ ID NO: 1096 - DNA, 1456 bp, Lactobacillus kefiri
gtcgaacgcgtttccgttattgattttaggtgcttgcatttagaatgatttaacacggaaacgagtggcgaactggtgagtaacacgtgggtaacctgcccttgaagtaggggataacacttggaaacaggtgctaataccgtataacaaccaaaaccacatggttttggtttaaaagatggcttcggctatcactttaggatggacccgcggcgtattagcttgttggtaaggtaatggcctaccaaggcaatgatacgtagccgacctgagagggtaatcggccacattgggactgagacacggcccaaactcctacgggaggcagcagtatggaatcttccacaatggacgaaagtctgatggagcaacgccgcgtgagtgatgaagggtttcggctcgtaaaactctgttgttggagaagaacaggtgtcagagtaactgttgacatcttgacggtatccaaccagaaagccacggctaactacgtgccagcagccgcggtaatacgtaggtggcaagcgttgtccggatttattgggcgtaaagcgagcgcaggcggtttcttaggtctgatgtgaaagccttcggcttaaccggagaagtgcatcggaaaccaggagacttgagtgcagaagaggacagtggaactccatgtgtagcggtgaaatgcgtagatatatggaagaacaccagtggcgaaggcggctgtctggtctgtaactgacgctgaggctcgaaagcatgggtagcgaacaggattagataccctggtagtccatgccgtaaacgatgagtgctaagtgttggagggtttccgcccttcagtgctgcagctaacgcattaagcactccgcctggggagtacgaccgcaaggttgaaactcaaaggaattgacgggggcccgcacaagcggtggagcatgtggtttaattcgatgctacgcgaagaaccttaccaggtcttgacatcttctgccaacctaagagattaggcgttcccttcggggacagaatgacaggtggtgcatggttgtcgtcagctcgtgtcgtgagatgttgggttaagtcccgcaacgagcgcaacccttattgttagttgccagcattcagttgggcactctagcaagactgccggtgacaaaccggaggaaggtggggatgacgtcaaatcatcatgccccttatgacctgggctacacacgtgctacaatggacggtacaacgagtcgcgaaaccgcgaggtcaagctaatctcttaaagccgttctcagttcggattgcaggctgcaactcgcctgcatgaagttggaatcgctagtaatcgtggatcagcatgccacggtgaatacgttcccgggccttgtacacaccgcccgtcacaccatgagagtttgtaacacccaaagccggtgaggtaaccttcggggaccagccgtctaaggtggacagatga

SEQ ID NO: 1097 - DNA, 1522 bp, Lactobacillus kimchii
gacgaacgctggcggcatgcctaatacatgcaagtcgaacgaaccatcctgaagattgaagcttgcttcatgattcagaccttggtgagtggcggacgggtgagtaacacgtgggtaacctgcccagaagtgggggataacatttggaaacaagtgctaataccgcataacaacttagatcacatgatctttgtttaaaagatggttttgctatctcttctggatggacccgcggcgtattagctagttggtgaggtaatagctcaccaaggcgatgatacgtagccgacctgagagggtaatcggccacattgggactgagacacggcccaaactcctacgggaggcagcagtagggaatcttccacaatggacgaaagtctgatggagcaatgccgcgtgagtgaagaaggttttcggatcgtaaaactctgttgttgaagaagaacatatgtgagagtaactgttcacgtactgacggtattcaaccagaaagccacggctaactacgtgccagcagccgcggtaatacgtaggtggcaagcgttgtccggatttattgggcgtaaagagaatgtaggcggtttattaagtttgaagtgaaagccctcggctcaaccgaggaagtgcttcgaaaactggtaaacttgagtgcagaagaggaaagtggaactccatgtgtagcggtggaatgcgtagatatatggaagaacaccagtggcgaaggcggctttctggtctgtaactgacgctgagattcgaaagcatgggtagcaaacaggattagataccctggtagtccatgccgtaaacgatgagtgctaagtgttggagggtttccgcccttcagtgctgcagctaacgcattaagcactccgcctggggagtacgatcgcaagattgaaactcaaaggaattgacgggggcccgcacaagcggtggagcatgtggtttaattcgaagcaacgcgaagaaccttaccaggtcttgacataccatgaaaagcttagagataagtctttcccttcggggacatggatacaggtggtgcatggttgtcgtcagctcgtgtcgtgagatgttgggttaagtcccgcaacgagcgcaacccttattatcagttgccagcattcagttgggcactctggtgagactgccggtgataaaccggaggaaggtggggacgacgtcaaatcatcatgccccttatgacctgggctacacacgtgctacaatggtcggtacaacgtgctgcgaactcgcgagggcaagcaaatcacttaaaaccgatctcagttcggattgtaggctgcaactcgcctacatgaagctggaatcgctagtaatcgcggatcagcatgccgcggtgaatacgttcccgggccttgtacacaccgcccgtcacaccatgagagtttgtaacacccaaagtcggtggggtaacccttcggggaactagccgcctaaggtgggacaaatgattagggtgaagtcgtaacaaggtagccgtaggagaacctgc

SEQ ID NO: 1098 - DNA, 1479 bp, Lactobacillus leichmannii
gacgaacgctggcggcgtgcctaatacatgcaagtcgagcgagctgaattcaaagatcccttcggggtgatttgttggaygctagcggcggatgggtgagtaacacgtgggcaatctgccctaaagactgggataccacttggaaacaggtgctaataccggataacaacatgaatcgcatgattcaagtttgaaaggcggcgcaagctgtcactttaggatgagcccgcggcgcattagctagttggtggggtaaaggcctaccaaggcaatgatgcgtagccgagttgagagactgatcggccacattgggactgagacacggcccaaactcctacgggaggcagcagtagggaatcttccacaatggacgcaagtctgatggagcaacgccgcgtgagtgaagaaggtyttcggatcgtaaagctctgttgttggtgaagaaggatagaggcagtaactggtctttatttgacggtaatcaaccagaaagtcacggctaactacgtgccagcagccgcggtaatacgtaggtggcaagcgttgtccggatttattgggcgtaaagcgagcgcaggcggaatgataagtctgatgtgaaagcccacggctcaaccgtggaactgcatcggaaactgtcattcttgagtgcagaagaggagagtggaactccatgtgtagcggtggaatgcgtagatatatggaagaacaccagtggcgaaggcggctctctggtctgcaactgacgctgaggctcgaaagcatgggtagcgaacaggattagataccctggtagtccatgccgtaaacgatgagcgctaggtgttggggactttccggtcctcagtgccgcagcaaacgcattaagcgctccgcctggggagtacgaccgcaaggttgaaactcaaaggaattgacgggggcccgcacaagcggtggagcatgtggtttaattcgaagcaacgcgaagaaccttaccaggtcttgacatcctgcgctacacytagagatargtggttcccttcggggacgcagagacaggtggtgcatggctgtcgtcagctcgtgtcgtgagatgttgggttaagtcccgcaacgagcgcaacccttgtctttagttgccatcattaagttgggcactctaaagagactgccggtgacaaaccggaggaaggtggggatgacgtcaagtcatcatgccccttatgacctgggctacacacgtgctacaatgggcagtacaacgagaagcraacccgcgagggtaagcggatctcttaaagctgytctcagttcggactgcaggctgcaactcgcctgcacgaagctggaatcgctagtaatcgcggatcagcacgccgcggtgaatacgttcccgggccttgtacacaccgcccgtcacaccatggaagtctgcaatgcccaaagtcggtgsgataacctttataggagtcagccgcctaaggcagggcagatgac

SEQ ID NO: 1099 - DNA, 1308 bp, Lactobacillus mucosae
agcgagtggcggacgggtgagtaacacgtaggtaacctgccccaaagcgggggataacatttggaaacagatgctaataccgcataacaatttgaatcgcatgattcaaatttaaaagatggcttcggctatcactttgggatggacctgcggcgcattagcttgttggtagggtaacggcctaccaaggctgtgatgcgtagccgagttgagagactgatcggccacaatggaactgagacacggtccatactcctacgggaggcagcagtagggaatcttccacaatgggcgcaagcctgatggagcaacaccgcgtgagtgaagaagggtttcggctcgtaaagctctgttgttagagaagaacgtgcgtgagagcaactgttcacgcagtgacggtatctaaccagaaagtcacggctaactacgtgccagcagccgcggtaatacgtaggtggcaagcgttatccggatttattgggcgtaaagcgagcgcaggcggtttgataagtctgatgtgaaagcctttggcttaaccaaagaagtgcatcggaaactgtcagacttgagtgcagaagaggacagtggaactccatgtgtagcggtggaatgcgtagatatatggaagaacaccagtggcgaaggcggctgtctggtctgcaactgacgctgaggctcgaaagcatgggtagcgaacaggattagataccctggtagtccatgccgtaaacgatgagtgctaggtgttggagggtttccgcccttcagtgccgcagctaacgcattaagcactccgcctggggagtacgaccgcaaggttgaaactcaaaggaattgacgggggcccgcacaagcggtggagcatgtggtttaattcgaagctacgcggaagaaccttaccaggtcttgacatcttgcgccaaccctagagatagggcgtttccttcgggaacgcaatgacaggtggtgcatggtcgtcgtcagctcgtgtcgtgagatgttgggttaagtcccgcaacgagcgcaacccttgttactagttgccagcattcagttgggcactctagtgagactgccggtgacaaaccggaggaaggtggggacgacgtcagatcatcatgccccttatgacctgggctacacacgtgctacaatggacggtacaacgagtcgcgaactcgcgagggcaagctaatctcttaaaaccgttctcagttcggactgcaggctgcaactcgcctgcacgaagtcggaatcgctagtaatcgcggatcagcatgccgcggtgaatacgttcccgggccttgt

SEQ ID NO: 1100 - DNA, 1022 bp, Lactobacillus murinus
  modified_base (989)..(989): a, c, t, g, unknown or other
  modified_base (998)..(1001): a, c, t, g, unknown or other
  modified_base (1003)..(1004): a, c, t, g, unknown or other
  modified_base (1011)..(1012): a, c, t, g, unknown or other
cttctttatcaccgagtgcttgcactcaccgataaagagttgagtggcgaacgggtgagtaacacgtgggcaacctgcccaaaagagggggataacacttggaaacaggtgctaataccgcataaccatagttaccgcatggtaactatgtaaaaggtggctatgctaccgcttttggatgggcccgcggcgcattagctagttggtgaggtaaaggcttaccaaggcaatgatgcgtagccgaactgagaggttgatcggccacattgggactgagacacggcccaaactcctacgggaggcagcagtagggaatcttccacaatgggcgaaagcctgatggagcaacgccgcgtgggtgaagaaggtcttcggatcgtaaaaccctgttgttagagaagaaagtgcgtgagagtaactgttcacgtttcgacggtatctaaccagaaagccacggctaactacgtgccagcagccgcggtaatacgtaggtggcaagcgttatccggatttattgggcgtaaagggaacgcaggcggtcttttaagtctgatgtgaaagccttcggcttaaccggagtagtgcattggaaactgggagacttgagtgcagaagaggagagtggaactccatgtgtagcggtgaaatgcgtagatatatggaagaacaccagtggcgaaagcggctctctggtctgtaactgacgctgaggttcgaaagcgtgggtagcaaacaggattagataccctggtagtccacgccgtaaacgatgaatgctaagtgttggagggtttccgcccttcagtgctgcagctaacgcaataagcattccgcctggggagtacgaccgcaaggttgaaactcaaaggaattgacgggggcccgcacaagcggtggagcatgtggtttaattcgaagcaacgcgaagaaccttaccaggtcttgacatcttctgacaatcctagagataggactttcccttcgggganagaatgacnnnngnncatggtnntcgtcagctc

SEQ ID NO: 1101 - DNA, 1556 bp, Lactobacillus nodensis
cctggctcaggacgaacgctggcggcgtgcctaatacatgcaagtcgagcgaactctggtttttgaacgatggtgcttgcaccggagtgattaaacatttgagtgagcggcggatgggtgagtaacacgtgggtaacctgccctaaagtgggggataacatttggaaacaagtgctaataccgcataacaacatttaccacatggtttatgtttgaaagatggttctgctatcgctttaggatggacccgcggtgcattagttagttggtgaggtaacggctcaccaagaccgtgatgcatagccgacctgagagggtaatcggccacattgggactgagacacggcccaaactcctacgggaggcagcagtagggaatcttccacaatggacgaaagtctgatggagcaacgccgcgtgagtgaagaaggttttcggatcgtaaaactctgttgttgaagaagaacatgcgtgagagtaactgttcatgtattgacggtattcaaccagaaagccacggctaactacgtgccagcagccgcggtaatacgtaggtggcaagcgttgtccggatttattgggcgtaaagcgagcgtaggcggtttattaagtctgatgtgaaagccctcggctcaaccgaggaagtgcatcggaaactggtaaacttgagtgcagaagaggagagtggaactccatgtgtagcggtggaatgcgtagatatatggaagaacatcagtggcgaaggcggctctctggtctgtaactgacgctgaggttcgaaagcgtgggtagcaaacaggattagataccctggtagtccacgccgtaaacgatgagtgctaagtgttggagggtttccgcccttcagtgctgcagctaacgcattaagcactccgcctggggagtacgaccgcaaggttgaaactcaaaggaattgacgggggcccgcacaagcggtggagcatgtggtttaattcgaagcaacgcgaagaaccttaccaggtcttgacatatcttgaaacactaagagattagtttttcccttcggggacaagaatacaggtggtgcatggttgtcgtcagctcgtgtcgtgagatgttgggttaagtcccgcaacgagcgcaacccttattactagttgccagcatttagttgggcactctagtgagactgccggtgacaaaccggaggaaggtggggacgacgtcaaatcatcatgccccttatgacctgggctacacacgtgctacaatggtcggtacaacgtgctgcgaactcgcgagggtaagcaaatcacttaaaaccgatctcagttcggattgtaggctgcaactcgcctacatgaagctggaatcgctagtaatcgcggatcagcatgccgcggtgaatacgttcccgggccttgtacacaccgcccgtcacaccatgagagtttgtaacacccaaagccggtggggtaccttttaggagctagccgtctaaggtgggacaaatgattagggtgaagtcgtaacaaggtagccgtaggagaacctgcggctggatcacctcctac

SEQ ID NO: 1102 - DNA, 1556 bp, Lactobacillus oeni
tagattttgatcctggctcaggacgaacgctggcggcgtgcctaatacatgcaagtcgaacgcagaatttccaccgagtgcttgcactcaccggaaattctgagtggcgaacgggtgagtaacacgtgggtaacctgcccaaaagagggggataacacttggaaacaggtgctaataccgcataacaacaaaaaccgcctggtttttgtttcaaagatggtttcggctgtcacttttggatggacccgcggcgtattagctagttggtaaggtaacggcttaccaaggcagtgatacgtagccgaactgagaggttgatcggccacattgggactgagacacggcccaaactcctacgggaggcagcagtagggaatcttccacaatggacgaaagtctgatggagcaacgccgcgtgagtgaagaaggttttcggatcgtaaaactctgttgttagagaagaacgtgtgtgagagtaactgttcatgcagtgacggtatctaaccagaaagccacggctaactacgtgccagcagccgcggtaatacgtaggtggcaagcgttgtccggatttattgggcgtaaagggaacgcaggcggtcttttaagtctgatgtgaaagccttcggcttaaccgaagtcgtgcattggaaactgagagacttgagtgcagaagaggagagtggaactccatgtgtagcggtgaaatgcgtagatatatggaagaacaccagtggcgaaagcggctctctggtctgtaactgacgctgaggttcgaaagcatgggtagcaaacaggattagataccctggtagtccatgccgtaaacgatgaatgctaagtgttggagggtttccgcccttcagtgctgcagctaacgcattaagcattccgcctggggagtacgaccgcaaggttgaaactcaaaggaattgacgggggcccgcacaagcggtggagcatgtggtttaattcgaagcaacgcgaagaaccttaccaggtcttgacatcttttgctaacctgagagatcaggcgttcccttcggggacaaaatgacaggtggtgcatggttgtcgtcagctcgtgtcgtgagatgttgggttaagtcccgcaacgagcgcaacccttattactagttgccagcattcagttgggcactctagtgagactgccggtgacaaaccggaggaaggtggggatgacgtcaaatcatcatgccccttatgacctgggctacacacgtgctacaatggacggtacaacgagtcgcgaaaccgcgaggtttagctaatctcttaaaaccgttctcagttcggattgcaggctgcaactcgcctgcatgaagtcggaatcgctagtaatcgcggatcagcatgccgcggtgaatacgttcccgggccttgtacacaccgcccgtcacaccatgagagtttgtaacacccaaagccggtgcggtaaccttttaggaaccagccgtctaaggtgggacagatgattggggtgaagtcgtaacaaggtagccgtaggagaacctgcggctggaccacctacttaa

SEQ ID NO: 1103 - DNA, 1579 bp, Lactobacillus oris
ttttatatgagagtttgatcctggctcaggatgaacgccggcggtgtgcctaatacatgcaagtcgagcgcactggcccaacagaaatgacgtgcttacactgatttgacgttggattcccagtgagcggcggacgggtgagtaacacgtgggcaacctgccccaaagcgggggataacatttggaaacaggtgctaataccgcataacttggaaaaccacatggttttccaataaaagatggtttcggctatcactttgggatgggcccgcggtgcattagctagttggtaaggtaacggcttaccaaggcgatgatgcatagccgagttgagagactgatcggccacaatggaactgagacacggtccatactcctacgggaggcagcagtagggaatcttccacaatgggcgcaagcctgatggagcaacaccgcgtgagtgaagaagggtttcggctcgtaaaactctgttgttggagaagaacgtgcgtaagagtaactgtttacgcagtgacggtatccaaccagaaagtcacggctaactacgtgccagcagccgcggtaatacgtaggtggcaagcgttatccggatttattgggcgtaaagcgagcgcaggcggttgcttaggtctgatgtgaaagccttcggcttaaccgaagaagtgcatcggaaaccgggcgacttgagtgcagaagaggacagtggaactccatgtgtagcggtggaatgcgtagatatatggaagaacaccagtggcgaaggcggctgtctggtctgcaactgacgctgaggctcgaaagcatgggtagcgaacaggattagataccctggtagtccatgccgtaaacgatgagtgctaggtgttggagggtttccgcccttcagtgccgaagctaacgcattaagcactccgcctggggagtacgaccgcaaggttgaaactcaaaggaattgacgggggcccgcacaagcggtggagcatgtggtttaattcgaagctacgcgaagaaccttaccaggtcttgacatcttgcgccaacctcagagatgaggcgttcccttcggggacgcaaagacaggtggtgcatggtcgtcgtcagctcgtgtcgtgagatgttgggttaagtcccgcaacgagcgcaacccttgttactagttgccagcattcagttgggcactctagtgagactgccggtgacaaaccggaggaaggtggggacgacgtcagatcatcatgccccttatgacctgggctacacacgtgctacaatggccggtacaacgagcagctaacccgcgagggtgtgcaaatctcttaaagccggtctcagttcggactgcagtctgcaactcgactgcacgaagtcggaatcgctagtaatcgcggatcagcatgccgcggtgaatacgttcccgggccttgtacacaccgcccgtcacaccatggaagtttgtaacgcccaaagtcggtggcctaaccatttggagggagccgcctaaggcgggacagatgactggggtgaagtcgtaacaaggtagccgtaggagaacctgcggctggatcacctcctttct

SEQ ID NO: 1104 - DNA, 1518 bp, Lactobacillus parabrevis
gacgaacgctggcggcatgcctaatacatgcaagtcgaacgagcttccgttgaatgacgtgcttgcactgatttyaacaatgaagcgagtggcgaactggtgagtaacacgtgggtaacttgcccagaagcaggggataacacttggaaacaggtgctaataccgtataacaacagaaaccgcatggtttctgtttgaaaggtggtttcggctatcacttctggatggacccgcggcgtattagttagttggtgaggtaaaggcccaccaagacaatgatacgtagccgacctgagagggtaatcggccacattgggactgagacacggcccaaactcctacgggaggcagcagtagggaatcttccacaatggacgaaagtctgatggagcaatgccgcgtgagtgaagaagggtttcggctcgtaaaactctgttgttaaagaagaacactcttgagagtaactgttcaggagttgacggtatttaaccagaaagccacggctaactacgtgccagcagccgcggtaatacgtaggtggcaagcgttgtccggatttattgggcgtaaagcgagcgcaggcggtttcttaagtctgatgtgaaagccttcggcttaaccggagaagtgcatcggaaactgggagacttgagtgcagaagaggacagtggaactccatgtgtagcggtggaatgcgtagatatatggaagaacaccagtggcgaaggcggctgtctagtctgtaactgacgctgaggctcgaaagcatgggtagcaaacaggattagataccctggtagtccatgccgtaaacgatgagtgctaggtgttggagggtttccgcccttcagtgccgcagctaacgcattaagcactccgcctggggagtacgaccgcaaggttgaaactcaaaggaattgacgggggcccgcacaagcggtggagcatgtggtttaattcgaagctacgcgaagaaccttaccaggtcttgacatactatgcaaatcctagagataggacgttcccttcggggacatggatacaggtggtgcatggttgtcgtcagctcgtgtcgtgagatgttgggttaagtcccgcaacgagcgcaacccttattatcagttgccagcattaagttgggcactctggtgagactgccggtgacaaaccggaggaaggtggggatgacgtcaaatcatcatgccccttatgacctgggctacacacgtgctacaatggacggtacaacgagtygcgaagtcgtgaggctaagctaatctcttaaagccgttctcagttcggattgtaggctgcaactcgcctacatgaagttggaatcgctagtaatcgcggatcagcatgccgcggtgaatacgttcccgggccttgtacacaccgcccgtcacaccatgagagtttgtaacacccaaagccggtgagataaccttcgggagtcagccgtctaaggtgggacagatgattagggtgaagtcgtaacaaggtagccgtaggagaacc

SEQ ID NO: 1105 - DNA, 1556 bp, Lactobacillus parabuchneri
ttgatcctggctcaggacgaacgctggcggcgtgcctaatacatgcaagtcgaacgcgtcttggttattgatgttaagtgcttgcatttaactgatttaacattgagacgagtggcgaactggtgagtaacacgtgggtaacctgcccttgaagtaggggataacacttggaaacaggtgctaataccgtataacaaccaaaaccacctggttttggtttaaaagatggcttcggctatcactttaggatggacccgcggcgtattagcttgttggtaaggtaacggcctaccaaggcaatgatacgtagccgacctgagagggtaatcggccacattgggactgagacacggcccaaactcctacgggaggcagcagtagggaatcttccacaatggacgaaagtctgatggagcaacgccgcgtgagtgatgaagggtttcggctcgtaaaactctgttgttggagaagaacaggtgtgagagtaactgttcacatcttgacggtatccaaccagaaagccacggctaactacgtgccagcagccgcggtaatacgtaggtggcaagcgttgtccggatttattgggcgtaaagcgagcgcaggcggtttcttaggtctgatgtgaaagccttcggcttaaccggagaagtgcatcggaaaccaggagacttgagtgcagaagaggacagtggaactccatgtgtagcggtgaaatgcgtagatatatggaagaacaccagtggcgaaggcggctgtctggtctgtaactgacgctgaggctcgaaagcatgggtagcgaacaggattagataccctggtagtccatgccgtaaacgatgagtgctaagtgttggagggtttccgcccttcagtgctgcagctaacgcattaagcactccgcctggggagtacgaccgcaaggttgaaactcaaaggaattgacgggggcccgcacaagcggtggagcatgtggtttaattcgatgctacgcgaagaaccttaccaggtcttgacatcttctgccaacctaagagattaggcgttcccttcggggacagaatgacaggtggtgcatggttgtcgtcagctcgtgtcgtgagatgttgggttaagtcccgcaacgagcgcaacccttattgttagttgccagcattcagttgggcactctagcaagactgccggtgacaaaccggaggaaggtggggatgacgtcaaatcatcatgccccttatgacctgggctacacacgtgctacaatggacggtacaacgagtcgcgaaaccgcgaggtcaagctaatctcttaaagccgttctcagttcggattgtaggctgcaactcgcctacatgaagttggaatcgctagtaatcgtggatcagcatgccacggtgaatacgttcccgggccttgtacacaccgcccgtcacaccatgagagtttgtaacacccaaagccggtgaggtaaccttcggggaccagccgtctaaggtgggacagatgattagggtgaagtcgtaacaaggtagccgtaggagaacctgcggctggatcac

SEQ ID NO: 1106 - DNA, 1410 bp, Lactobacillus paracasei
  modified_base (1402)..(1402): a, c, t, g, unknown or other
tcgttgatgatcggtgcttgcaccgagattcaacatggaacgagtggcggacgggtgagtaacacgtgggtaacctgcccttaagtgggggataacatttggaaacagatgctaataccgcatagatccaagaaccgcatggttcttggctgaaagatggcgtaagctatcgcttttggatggacccgcggcgtattagctagttggtgaggtaatggctcaccaaggcgatgatacgtagccgaactgagaggttgatcggccacattgggactgagacacggcccaaactcctacgggaggcagcagtagggaatcttccacaatggacgcaagtctgatggagcaacgccgcgtgagtgaagaaggctttcgggtcgtaaaactctgttgttggagaagaatggtcggcagagtaactgttgtcggcgtgacggtatccaaccagaaagccacggctaactacgtgccagcagccgcggtaatacgtaggtggcaagcgttatccggatttattgggcgtaaagcgagcgcaggcggttttttaagtctgatgtgaaagccctcggcttaaccgaggaagcgcatcggaaactgggaaacttgagtgcagaagaggacagtggaactccatgtgtagcggtgaaatgcgtagatatatggaagaacaccagtggcgaaggcggctgtctggtctgtaactgacgctgaggctcgaaagcatgggtagcgaacaggattagataccctggtagtccatgccgtaaacgatgaatgctaggtgttggagggtttccgcccttcagtgccgcagctaacgcattaagcattccgcctggggagtacgaccgcaaggttgaaactcaaaggaattgacgggggcccgcacaagcggtggacatgtggtttaattcgaagcaacgcgaagaacttaccaggtcttgacatcttttgatcacctgagagatcccgttacccattggggggcaaaatgacaggtggtgcatggttgtcgtcagctcgtgtcgtgagatgttgggttaagtcccgcaacgagcgcaacccttatgactagttgccagcatttagttgggcactctagtaagactgccggtgacaaaccggaggaaggtggggatgacgtcaaatcatcatgccccttatgacctgggctacacacgtgctacaatggatggtacaacgagttgcgagaccgcgaggtcaagctaatctcttaaagccattctcagttcggactgtaggctgcaactcgcctacacgaagtcggaatcgctagtaatcgcggatcagcacgccgcggtgaatacgttcccgggccttgtacacaccgcccgtcacaccatgagagtttgtaacacccgaagccggtggcgtaaccctntagggagc

SEQ ID NO: 1107 - DNA, 1396 bp, Lactobacillus parakefiri
  modified_base (51)..(51): a, c, t, g, unknown or other
gacgaacgctggcggcgtgcctaatacatgcaagtcgaacgcgtcttggcnaatgattttaggtgcttgcacttgaaagatttgacattgagacgagtggcgaactggtgagtaacacgtgggtaacctgcccttgaagtaggggataacacttggaaacaggtgctaataccgtataacaaccaaaaccacctggttttggtttaaaagacggcttcggctgtcactttaggatggacccgcggcgtattagcttgttggtaaggtaacggcctaccaaggcaatgatacgtagccgacctgagagggtaatcggccacattgggactgagacacggcccaaactcctacgggaggcagcagtagggaatcttccacaatggacgaaagtctgatggagcaacgccgcgtgagtgatgaagggtttcggctcgtaaaactctgttgttggagaagaaccgttgtcagagcaactgttgacagcttgacggtatccaaccagaaagccacggctaactacgtgccagcagccgcggtaatacgtaggtggcaagcgttgtccggatttattgggcgtaaagcgagcgcaggcggttttttaggtctgatgtgaaagccttcggcttaaccggagaagtgcatcggaaaccgggagacttgagtgcagaagaggacagtggaactccatgtgtagcggtgaaatgcgtagatatatggaagaacaccagtggcgaaggcggctgtctggtctgtaactgacgctgaggctcgaaagcatgggtagcgaacaggattagataccctggtagtccatgccgtaaacgatgagtgctaagtgttggagggtttccgcccttcagtgctgcagctaacgcattaagcactccgcctggggagtacgaccgcaaggttgaaactcaaaggaattgacgggggcccgcacaagcggtggagcatgtggtttaattcgatgctacgcgaagaaccttaccaggtcttgacatcttctgccaacctaagagattaggcgttcccttcggggacagaatgacaggtggtgcatggttgtcgtcagctcgtgtcgtgagatgttgggttaagtcccgcaacgagcgcaacccttattgttagttgccagcattcagttgggcactctagcaagactgccggtgacaaaccggaggaaggtggggatgacgtcaaatcatcatgccccttatgacctgggctacacacgtgctacaatggacggtacaacgagtcgcgaaaccgcgaggtcaagctaatctcttaaagccgttctcagttcggattgtaggctgcaactcgcctacatgaagttggaatcgctagtaatcgtggatcagcatgccacggtgaatacgttcccggcctt

SEQ ID NO: 1108 - DNA, 1308 bp, Lactobacillus pentosus
gagtttgatcatggctcaggacgaacgctggcggcgtgcctaatacatgcaagtcgaacgagtggcgaactggtgagtaacacgtgggaaacctgcccagaagcgggggataacacctggaaacagatgctaataccgcataacgaaagtcacttttggatggtcccgcggcgtattagctagatggtgaggtaacggctcaccatggcaatgatacgtagccgacctgagagggtaatcggccacattgggactgagacacggcccaaactcctacgggaggcagcagtagggaatcttccacaatggacgaaagtctgatggagcaacgccgcgtgagtgaagaagggtttcggctcgtaaaactctgttgttaaagaagatgacggtatttaaccagaaagccacggctaactacgtgccagcagccgcggtaatacgtaggtggcaagcgttgtccggatttattgggcgtaaagcgagcgcaggcggttttttaagtctgatgtgaaagccttcggctcaaccgaagaagtgcatcggaaactgggaaacttgagtgcagaagaggacagtggaactccatgtgtagcggtgaaatgcgtagatatatggaagaacaccagtggcgaaggcggctgtctggtctgactgacgctgaggctcgaaagtatgggtagcaaacaggattagataccctggtagtccataccgtaaacgatgaatgctaagtgttggagcttcagtgctgcagctaacgcattaagcattccgcctggggagtacggccgcaaggctgaaactcaaaggaattgacgggggcccgcacaagcggtggagcatgtggtttaattcgaagctacgcgaagaaccttaccaggtcttgacatatacaggtggtgcatggttgtcgtcagctcgtgtcgtgagatgttgggttaagtcccgcaacgagcgcaacccttattatcagttgccagcatgggcactctggtgagactgccggtgacaaaccggaggaaggtggggatgacgtcaaatcatcatgccccttatgacctgggctacacacgtgctacaatggatggcaacgagttgcgaactcgcgagagtaagctaatctcttccattctcagttcggatgtaggctgcaactcgcctacagaagtcggaatcgctagtaatcgcggatcagcatgccgcggtgaatacgttcccgggccttgtacacaccgcccgtcacaccatgagagtttgtaacacccaaagtcggtgggtaaccagccgcctaaggtgggacagatgatt

SEQ ID NO: 1109 - DNA, 1554 bp, Lactobacillus perolens
tggctcaggacgaacgctggcggcgtgcctaatacatgcaagtcgaacgaggtttgatcagtttgcggtggtgcttgcatcaccaattaccgattaaaccgagtggcggacgggtgagtaacacgtgggtaacctgcccttcagcaggggataacatttggaaacagatgctaataccgtataaccacggagaccgcatggtctccgggtaaaagatggcgaaagctatcactgagggatggacccgcggcgtattagccagttggtggggtaatggcctaccaaagcgatgatacgtagccgacctgagagggtaatcggccacattgggactgagacacggcccaaactcctacgggaggcagcagtagggaatcttccacaatggacgcaagtctgatggagcaacgccgcgtgagtgaagaaggctttcgggtcgtaaaactctgttattgaagaagaacgtgtgtgagagtaactgctcatgcagtgacggtattcaaccagaaagtcacggctaactacgtgccagcagccgcggtaatacgtaggtggcaagcgttgtccggatttattgggcgtaaagcgagtgcaggcggttttttaagtctgatgtgaaagccttcggcttaaccgaagaagtgcatcggaaagtgggaaacttgagtgcagaagaggagagtggaactccatgtgtagcggtgaaatgcgtagatatatggaagaacaccagtggcgaaggcggctctctggtctgtaactgacgctgaggctcgaaagcgtgggtagcaaacaggattagataccctggtagtccacgccgtaaacgatgaatactaagtgttggggggtttccgcccctcagtgctgcagctaacgcattaagtattccgcctggggagtacgaccgcaaggttgaaactcaaaggaattgacgggggcccgcacaagcggtggagcatgtggtttaattcgaagcaacgcgaagaaccttaccaggtcttgacatcttctgccaagctgagagatcagccgttccttcggggacagaatgacaggtggtgcatggttgtcgtcagctcgtgtcgtgagatgttgggttaagtcccgcaacgagcgcaacccttatgattagttgccagcattcagttgggcactctagtcagactgccggtgacaaaccggaggaaggcggggatgacgtcaaatcatcatgccccttatgacctgggctacacacgtgctacaatgggtggtacaacgagcagcgagaccgcgaggtcaagcgaatctctaaaaaccatcctcagttcggattgtaggctgcaactcgcctacatgaagctggaatcgctagtaatcgcggatcagcacgccgcggtgaatacgttcccgggccttgtacacaccgcccgtcacaccatgagagtttgtaacacccaaagccggtaggacaaccgcaaggagtcagccgtctaaggtgggacaaatgattagggtgaagtcgtaacaaggtagccgtaggagaacctgcggctggatcacctcctttct

SEQ ID NO: 1110 - DNA, 900 bp, Lactobacillus plantarum
  modified_base (19)..(19): a, c, t, g, unknown or other
  modified_base (32)..(32): a, c, t, g, unknown or other
  modified_base (44)..(44): a, c, t, g, unknown or other
  modified_base (74)..(74): a, c, t, g, unknown or other
  modified_base (87)..(87): a, c, t, g, unknown or other
  modified_base (99)..(99): a, c, t, g, unknown or other
  modified_base (123)..(123): a, c, t, g, unknown or other
  modified_base (133)..(134): a, c, t, g, unknown or other
  modified_base (151)..(151): a, c, t, g, unknown or other
  modified_base (153)..(153): a, c, t, g, unknown or other
  modified_base (203)..(203): a, c, t, g, unknown or other
  modified_base (382)..(382): a, c, t, g, unknown or other
  modified_base (882)..(884): a, c, t, g, unknown or other
  modified_base (886)..(888): a, c, t, g, unknown or other
gccgcggtaatacgtaggngcaagcgttgtcnggattattgggngtaaagcgagcgcaggcggttttttaagtntgatgtgaaagcnttcggctcaacngaagaagtgcatcggaaaactggnaaacttgagnncagaagaggacagtggnanctccatgtgtagcggtgaaatgcgtagatatatggaagaacaccagtggngaaggcggctgtctggtctgtaactgacgctgaggctcgaaagtatgggtagcaaacaggattagataccctggtagtccataccgtaaacgatgaatgctaagtgttggagggtttccgcccttcagtgctgcagctaacgcattaagcattccgcctggggagtacggccgcaaggntgaaactcaaaggaattgacgggggcccgcacaagcggtggagcatgtggtttaattcgaagctacgcgaagaaccttaccaggtcttgacatactatgcaaatctaagagattagacgttcccttcggggacatggatacaggtggtgcatggttgtcgtcagctcgtgtcgtgagatgttgggttaagtcccgcaacgagcgcaacccttattatcagttgccagcattaagttgggcactctggtgagactgccggtgacaaaccggaggaaggtggggatgacgtcaaatcatcatgccccttatgacctgggctacacacgtgctacaatggatggtacaacgagttgcgaactcgcgagagtaagctaatctcttaaagccattctcagttcggattgtaggctgcaactcgcctacatgaagtcggaatcgctagtaatcgcggatcagcatgccgcggtgaatacgttcccgggccttgtacacaccgcccnnnannncatgagagtttg

SEQ ID NO: 1111 - DNA, 1395 bp, Lactobacillus pontis
agtgagcggcggacgggtgagtaacacgtgggcaacctgccctggagcgggggataacatttggaaacagatgctaataccgcataataatcaaaaccacatggttttgatttcaaagatggcttcggctatcactccaggatgggcccgcggtgcattagctagttggtaaggtaacggcttaccaaggcgatgatgcatagccgagttgagagactgatcggccacaatggaactgagacacggtccatactcctacgggaggcagcagtagggaatcttccacaatgggcgcaagcctgatggagcaacaccgcgtgagtgaagaagggtttcggctcgtaaaactctgttgttgaagaagaacgtgcgtgagagtaactgttcatgcagtgacggtattcaaccagaaagtcacggctaactacgtgccagcagccgcggtaatacgtaggtggcaagcgttatccggatttattgggcgtaaagcgagcgcaggcggttacttaagtctgatgtgaaagccttcggcttaaccgaagaagtgcatcggaaactgggtgacttgagtgcagaagaggacagtggaactccatgtgtagcggtggaatgcgtagatatatggaagaacaccagtggcgaaggcggctgtctggtctgcaactgacgctgaggctcgaaagcatgggtagcgaacaggattagataccctggtagtccatgccgtaaacgatgagtgctaggtgttggagggtttccgcccttcagtgccggagctaacgcattaagcactccgcctggggagtacgaccgcaaggttgaaactcaaaggaattgacgggggcccgcacaagcggtggagcatgtggtttaattcgaagctacgcgaagaaccttaccaggtcttgacatcttgcgctaacctaagagattaggcgttcccttcggggacgcaatgacaggtggtgcatggtcgtcgtcagctcgtgtcgtgagatgttgggttaagtcccgcaacgagcgcaacccttgttactagttgccagcattcagttgggcactctagtgagactgccggtgacaaaccggaggaaggtggggatgacgtcagatcatcatgccccttatgacctgggctacacacgtgctacaatggtcggtacaacgagtcgctaacccgcgagggcaagctaatctcttaaagccgatctcagttcggactgtaggctgcaactcgcctacacgaagtcggaatcgctagtaatcgcggatcagcatgccgcggtgaatacgttcccgggccttgtacacaccgcccgtcacaccatggaagtttgtaacgcccaaagtcggtggcctaaccatttggagggagccgcctaaggcgggacagat

SEQ ID NO: 1112 - DNA, 1580 bp, Lactobacillus reuteri
ttttatatgagagtttgatcctggctcaggatgaacgccggcggtgtgcctaatacatgcaagtcgtacgcactggcccaactgattgatggtgcttgcacctgattgacgatggattaccagtgagtggcggacgggtgagtaacacgtaggtaacctgccccggagcgggggataacatttggaaacagatgctaataccgcataacaacaaaagccacatggcttttgtttgaaagatggctttggctatcactctgggatggacctgcggtgcattagctagttggtaaggtaacggcttaccaaggcgatgatgcatagccgagttgagagactgatcggccacaatggaactgagacacggtccatactcctacgggaggcagcagtagggaatcttccacaatgggcgcaagcctgatggagcaacaccgcgtgagtgaagaagggtttcggctcgtaaagctctgttgttggagaagaacgtgcgtgagagtaactgttcacgcagtgacggtatccaaccagaaagtcacggctaactacgtgccagcagccgcggtaatacgtaggtggcaagcgttatccggatttattgggcgtaaagcgagcgcaggcggttgcttaggtctgatgtgaaagccttcggcttaaccgaagaagtgcatcggaaaccgggcgacttgagtgcagaagaggacagtggaactccatgtgtagcggtggaatgcgtagatatatggaagaacaccagtggcgaaggcggctgtctggtctgcaactgacgctgaggctcgaaagcatgggtagcgaacaggattagataccctggtagtccatgccgtaaacgatgagtgctaggtgttggagggtttccgcccttcagtgccggagctaacgcattaagcactccgcctggggagtacgaccgcaaggttgaaactcaaaggaattgacgggggcccgcacaagcggtggagcatgtggtttaattcgaagctacgcgaagaaccttaccaggtcttgacatcttgcgctaaccttagagataaggcgttcccttcggggacgcaatgacaggtggtgcatggtcgtcgtcagctcgtgtcgtgagatgttgggttaagtcccgcaacgagcgcaacccttgttactagttgccagcattaagttgggcactctagtgagactgccggtgacaaaccggaggaaggtggggacgacgtcagatcatcatgccccttatgacctgggctacacacgtgctacaatggacggtacaacgagtcgcaagctcgcgagagtaagctaatctcttaaagccgttctcagttcggactgtaggctgcaactcgcctacacgaagtcggaatcgctagtcctcgcggatcagcatgccgcggtgaatacgttcccgggccttgtacacaccgcccgtcacaccatgggagtttgtaacgcccaaagtcggtggcctaacctttatggagggagccgcctaaggcgggacagatgactggggtgaagtcgtaacaaggtagccgtaggagaacctgcggctggatcacctcctttct

SEQ ID NO: 1113 - DNA, 1429 bp, Lactobacillus rhamnosus
gtcgaacgagttctgattattgaaaggtgcttgcatcttgatttaattttgaacgagtggcggacgggtgagtaacacgtgggtaacctgcccttaagtgggggataacatttggaaacagatgctaataccgcataaatccaagaaccgcatggttcttggctgaaagatggcgtaagctatcgcttttggatggacccgcggcgtattagctagttggtgaggtaacggctcaccaaggcaatgatacgtagccgaactgagaggttgatcggccacattgggactgagacacggcccaaactcctacgggaggcagcagtagggaatcttccacaatggacgcaagtctgatggagcaacgccgcgtgagtgaagaaggctttcgggtcgtaaaactctgttgttggagaagaatggtcggcagagtaactgttgtcggcgtgacggtatccaaccagaaagccacggctaactacgtgccagcagccgcggtaatacgtaggtggcaagcgttatccggatttattgggcgtaaagcgagcgcaggcggttttttaagtctgatgtgaaagccctcggcttaaccgaggaagtgcatcggaaactgggaaacttgagtgcagaggacagtggaactccatgtgtagcggtgaaatgcgtagatatatggaagaacaccagtggcgaaggcggctgtctggtctgtaactgacgctgaggctcgaaagcatgggtagcgaacaggattagataccctggtagtccatgccgtaaacgatgaatgctagtgttggagggtttccgcccttcagtgccgcagctaacgcattaagcattccgcctggggagtacgaccgcaaggttgaaactcaaaggaattgacgggggcccgcacaagcggtggagcatgtggtttaattcgaagcaacgcgaagaaccttaccaggtcttgacatcttttgatcacctgagagatcaggttgcccgtgtggggcgaaaatgacaggtggtgcatggttgtcgtcagctcgtgtcgtgagatgttgggttaagtcccgcaacgagcgcaacccttatgactagttgccagcatttagttgggcactctagtaagactgccggtgacaaaccggaggaaggtggggatgacgtcaaatcatcatgccccttatgacctgggctacacacgtgctacaatggatggtacaacgagttgcgagaccgcgaggtcaagctaatctcttaaagccattctcagttcggactgtaggctgcaactcgcctacacgaagtcggaatcgctagtaatcgcggatcagcacgccgcggtgaatacgttcccgggccttgtacacaccgcccgtcacaccatgagagtttgtaacacccgaagccggtggcgtaacccttttagggagcgagccgt

SEQ ID NO: 1114 - DNA, 1452 bp, Lactobacillus rogosae
tcaggatgaacgctggcggcgtgcttaacacatgcagtcgaacgaagcatttaagacagattacttcggtttgaagtcttttatgactgagtggcggacgggtgagtaacgcgtgggtaacctgcctcatacagggggatagcagctggaaacggctggtaataccgcataagcgcacagtaccacatggtacagtgtgaaaaactccggtggtatgagatggacccgcgtctgattagcttgttggcggggtaacggcccaccaaggcgacgatcagtagccgacctgagagggtgaccggccacattgggactgagacacggcccagactcctacgggaggcagcagtggggaatattgcacaatggaggaaactctgatgcagcgacgccgcgtgagtgaagaagtagttcgctatgtaaagctctatcagcagggaagatagtgacggtacctgactaagaagctccggctaaatacgtgccagcagccgcggtaatacgtatggagcaagcgttatccggatttactgggtgtaaagggagtgtaggtggccaggcaagtcagaagtgaaagcccggggctcaaccccgggactgcttttgaaactgcagggctagagtgcaggaggggcaagtggaattcctagtgtagcggtgaaatgcgtagatattaggaggaacaccagtggcgaaggcggcttgctggactgtaactgacactgaggctcgaaagcgtggggagcaaacaggattagataccctggtagtccacgccgtaaacgatgaatactaggtgtcggggcacataagtgctccggtgccgcagcaaacgcaataagtattccacctggggagtacgttcgcaagaatgaaactcaaaggaattgacggggacccgcacaagcggtggagcatgtggtttaattcgaagcaacgcgaagaaccttaccaagtcttgacatcctcttgaccggtcagtaatgtgaccttttcttcggaacaagagtgacaggtggtgcatggttgtcgtcagctcgtgtcgtgagatgttgggttaagtcccgcaacgagcgcaacccttatccttagtagccagcagttcggctgggcactctagggagactgccagggataacctggaggaaggtggggatgacgtcaaatcatcatgccccttatgacttgggctacacacgtgctacaatggcgtaaacaaagtgaagcgagagtgtgagcttaagcaaatcacaaaaataacgtctcagttcggattgtagtctgcaactcgactacatgaagctggaatcgctagtaatcgcagatcagaatgctgcggtgaatacgttcccgggtcttgtacacaccgcccgtcacaccatgggagtcggaaatgcccgaagtcggtgacctaacgtaagaagagccgccgaagcaggtctgataactggg

SEQ ID NO: 1115 - DNA, 1561 bp, Lactobacillus ruminis
ttgagagtttgatcctggctcaggacgaacgctggcggcgtgcctaatacatgcaagtcgaacgaagctttctttcaccgaatgcttgcattcaccgaaagaagcttagtggcgaacgggtgagtaacacgtaggcaacctgcccaaaagagggggataacacttggaaacaggtgctaataccgcataaccatgaacaccgcatgatgttcatgtaaaagacggcttttgctgtcacttttggatgggcctgcggcgtattaacttgttggtggggtaacggcctaccaaggtgatgatacgtagccgaactgagaggttgatcggccacattgggactgagacacggcccaaactcctacgggaggcagcagtagggaatcttccacaatggacgaaagtctgatggagcaacgccgcgtgaatgaagaaggccttcgggtcgtaaaattctgttgtcagagaagaacgtgcgtgagagtaactgttcacgtattgacggtatctgaccagaaagccacggctaactacgtgccagcagccgcggtaatacgtaggtggcgagcgttgtccggatttattgggcgtaaagggaacgcaggcggtcttttaagtctgatgtgaaagccttcggcttaaccgaagtagtgcattggaaactggaagacttgagtgcagaagaggagagtggaactccatgtgtagcggtgaaatgcgtagatatatggaagaacaccagtggcgaaagcggctctctggtctgtaactgacgctgaggttcgaaagcgtgggtagcaaacaggattagataccctggtagtccacgccgtaaacgatgagtgctaagtgttggagggtttccgcccttcagtgctgcagctaacgcattaagcactccgcctggggagtacggtcgcaagactgaaactcaaaggaattgacgggggcccgcacaagcggtggagcatgtggtttaattcgaagcaacgcgaagaaccttaccaggtcttgacatcttctgacaattccagagatggaacgttcccttcggggacagaatgacaggtggtgcatggttgtcgtcagctcgtgtcgtgagatgttgggttaagtcccgcaacgagcgcaacccttattgtcagttgccatcattaagttgggcactctggcgagactgccggtgacaaaccggaggaaggtggggatgacgtcaaatcatcatgccccttatgacctgggctacacacgtgctacaatggacggtacaacgagtcgctaactcgcgagggcaagctaatctcttaaagccgttctcagttcggattgcaggctgcaactcgcctgcatgaagtcggaatcgctagtaatcgcgaatcagcatgtcgcggtgaatacgttcccgggccttgtacacaccgcccgtcacaccatgagagtttgtaacacccaaagtcggtggggtaaccttttggagccagccgcctaaggtgggacagatgattggggtgaagtcgtaacaaggtagccgtaggagaacctgcggctggatcacctcctttct

SEQ ID NO: 1116 - DNA, 1579 bp, Lactobacillus sakei
gggaattcgattgagtttgatcctggctcaggacgaacgctggcggcgtgcctaatacatgcaagtcgaacgcactctcgtttagattgaaggagcttgctcctgattgataaacatttgagtgagtggcggacgggtgagtaacacgtgggtaacctgccctaaagtgggggataacatttggaaacagatgctaataccgcataaaacctaacaccgcatggtgtagggttgaaagatggtttcggctatcactttaggatggacccgcggtgcattagttagttggtgaggtaaaggctcaccaagaccgtgatgcatagccgacctgagagggtaatcggccacactgggactgagacacggcccagactcctacgggaggcagcagtagggaatcttccacaatggacgaaagtctgatggagcaacgccgcgtgagtgaagaaggttttcggatcgtaaaactctgttgttggagaagaatgtatctgatagtaactgaccaggtagtgacggtatccaaccagaaagccacggctaactacgtgccagcagccgcggtaatacgtaggtggcaagcgttgtccggatttattgggcgtaaagcgagcgcaggcggtttcttaagtctgatgtgaaagccttcggctcaaccgaagaagtgcatcggaaactgggaaacttgagtgcagaagaggacagtggaactccatgtgtagcggtgaaatgcgtagatatatggaagaacaccagtggcgaaggcggctgtctggtctgtaactgacgctgaggctcgaaagcatgggtagcaaacaggattagataccctggtagtccatgccgtaaacgatgagtgctaggtgttggagggtttccgcccttcagtgccgcagctaacgcattaagcactccgcctggggagtacgaccgcaaggttgaaactcaaaggaattgacgggggcccgcacaagcggtggagcatgtggtttaattcgaagcaacgcgaagaaccttaccaggtcttgacatcctttgaccactctagagatagagctttcccttcggggacaaagtgacaggtggtgcatggttgtcgtcagctcgtgtcgtgagatgttgggttaagtcccgcaacgagcgcaacccttattactagttgccagcatttagttgggcactctagtgagactgccggtgacaaaccggaggaaggtggggacgacgtcaaatcatcatgccccttatgacctgggctacacacgtgctacaatggatggtacaacgagttgcgagaccgcgaggtttagctaatctcttaaaaccattctcagttcggattgtaggctgcaactcgcctacatgaagccggaatcgctagtaatcgcggatcagcatgccgcggtgaatacgttcccgggccttgtacacaccgcccgtcacaccatgagagtttgtaacacccaaagccggtgaggtaaccttcggggagccagccgtctaaggtgggacagatgattagggtgaagtcgtaacaaggtagccgtaggagaacctgcggctggatcacctcctttct

SEQ ID NO: 1117 - DNA, 1566 bp, Lactobacillus salivarius
tttaaaatgagagtttgatcctggctcaggacgaacgctggcggcgtgcctaatacatgcaagtcgaacgaaactttcttacaccgaatgcttgcattcaccgtaagaagttgagtggcggacgggtgagtaacacgtgggtaacctgcctaaaagaaggggataacacttggaaacaggtgctaataccgtatatctctaaggatcgcatgattcttagatgaaagatggttctgctatcgcttttagatggacccgcggcgtattaactagttggtggggtaacggcctaccaaggtgatgatacgtagccgaactgagaggttgatcggccacattgggactgagacacggcccaaactcctacgggaggcagcagtagggaatcttccacaatggacgcaagtctgatggagcaacgccgcgtgagtgaagaaggtcttcggatcgtaaaactctgttgttagagaagaacacgagtgagagtaactgttcattcgatgacggtatctaaccagcaagtcacggctaactacgtgccagcagccgcggtaatacgtaggtggcaagcgttgtccggatttattgggcgtaaagggaacgcaggcggtcttttaagtctgatgtgaaagccttcggcttaaccggagtagtgcattggaaactggaagacttgagtgcagaagaggagagtggaactccatgtgtagcggtgaaatgcgtagatatatggaagaacaccagtggcgaaagcggctctctggtctgtaactgacgctgaggttcgaaagcgtgggtagcaaacaggattagataccctggtagtccacgccgtaaacgatgaatgctaggtgttggagggtttccgcccttcagtgccgcagctaacgcaataagcattccgcctggggagtacgaccgcaaggttgaaactcaaaggaattgacgggggcccgcacaagcggtggagcatgtggtttaattcgaagcaacgcgaagaaccttaccaggtcttgacatcctttgaccacctaagagattaggctttcccttcggggacaaagtgacaggtggtgcatggctgtcgtcagctcgtgtcgtgagatgttgggttaagtcccgcaacgagcgcaacccttgttgtcagttgccagcattaagttgggcactctggcgagactgccggtgacaaaccggaggaaggtggggacgacgtcaagtcatcatgccccttatgacctgggctacacacgtgctacaatggacggtacaacgagtcgcgagaccgcgaggtttagctaatctcttaaagccgttctcagttcggattgtaggctgcaactcgcctacatgaagtcggaatcgctagtaatcgcgaatcagcatgtcgcggtgaatacgttcccgggccttgtacacaccgcccgtcacaccatgagagtttgtaacacccaaagccggtggggtaaccgcaaggagccagccgtctaaggtgggacagatgattggggtgaagtcgtaacaaggtagccgtaggagaacctgcggctggatcacctcctttct

SEQ ID NO: 1118 - DNA, 1558 bp, Lactobacillus saniviri
gatcatggctcaggatgaacgctggcggcgtgcctaatacatgcaagtcgaacgagttctggttaatgatggcggtgcttgcaccaatagatttaacatttgaacgagtggcggacgggtgagtaacacgtgggtaacctgccctaaagtgggggataacatttggaaacagatgctaataccgcataaatcttggaacctcatggttccaagctgaaagatggcgtaagctatcgcttttggatggacccgcggcgtattagctagttggtgaggtaaaggctcaccaaggcgatgatacgtagccgacctgagagggtgatcggccacattgggactgagacacggcccaaactcctacgggaggcagcagtagggaatcttccacaatggacgaaagtctgatggagcaacgccgcgtgagtgaagaaggttttcggatcgtaaaactctgttgttggagaagaacgtacgtgagagtaactgttcacgtagtgacggtatccaaccagaaagccacggctaactacgtgccagcagccgcggtaatacgtaggtggcaagcgttatccggatttattgggcgtaaagcgagcgcaggcggtttcttaagtctgatgtgaaagccctcggctcaaccgaggaagtgcatcggaaactgggaaacttgagtgcagaagaggacagtggaactccatgtgtagcggtggaatgcgtagatatatggaagaacaccagtggcgaaggcggctgtctggtctgtaactgacgctgaggctcgaaagcatgggtagcgaacaggattagataccctggtagtccatgccgtaaacgatgaatactaagtgttggagggtttccgcccttcagtgctgcagctaacgcattaagtattccgcctggggagtacgaccgcaaggttgaaactcaaaggaattgacgggggcccgcacaagcggtggagcatgtggtttaattcgaagcaacgcgaagaaccttaccaggtcttgacatcttctgctattctaagagattagaagttcccttcggggacagaatgacaggtggtgcatggttgtcgtcagctcgtgtcgtgagatgttgggttaagtcccgcaacgagcgcaacccttatgactagttgccagcattaagttgggcactctaatcagactgccggtgacaaaccggaggaaggtggggatgacgtcaaatcatcatgccccttatgacctgggctacacacgtgctacaatggatggtacaacgagtcgcaaaaccgcgaggttaagctaatctcttaaagccattctcagtccggactgtaggctgcaactcgcctacacgaagtcggaatcgctagtaatcgcggatcagcatgccgcggtgaatacgttcccgggccttgtacacaccgcccgtcacaccatgagagtttgtaacacccgaagccggtggggtaaccttttaggagctagccgtctaaggtgggacagatgattagggtgaagtcgtaacaaggtagccgtaggagaacctgcggctggatcacctccta

SEQ ID NO: 1119 - DNA, 1562 bp, Lactobacillus senioris
gagtttgatcatggctcaggacgaacgctggcggcgtgcctaatacatgcaagtcgaacgcgtcttggtgaatgatcggcggtgcttgcaccaaagagatttcacaatgagacgagtggcgaactggtgagtaacacgtggggaacctgcccataagcaggggataacacttggaaacaggtgctaataccgtataacaatgtaaaccgcatggtttacatttgaaagatggtttcggctatcacttatggatggacccgcggcgcattagctagttggtgaggtaacggctcaccaaggcaatgatgcgtagccgacctgagagggtaatcggccacattgggactgagacacggcccaaactcctacgggaggcagcagtagggaatcttccacaatggacgaaagtctgatggagcaacgccgcgtgagtgaagaagggtttcggctcgtaaaactctgttgttggagaagaacatggatgagagtaactgttcatttattgacggtatccaaccagaaagccacggctaactacgtgccagcagccgcggtaatacgtaggtggcaagcgttgtccggatttattgggcgtaaagcgagcgcaggcggtcttttaagtctgatgtgaaagccttcggcttaaccggagaagtgcatcggaaactgggagacttgagtgcagaagaggacagtggaactccatgtgtagcggtgaaatgcgtagatatatggaagaacaccagtggcgaaggcggctgtctggtctgtaactgacgctgaggctcgaaagcatgggtagcgaacaggattagataccctggtagtccatgccgtaaacgatgagtgctaagtgttggagggtttccgcccttcagtgctgcagctaacgcattaagcactccgcctggggagtacgaccgcaaggttgaaactcaaaggaattgacgggggcccgcacaagcggtggagcatgtggtttaattcgatgcaacgcgaagaaccttaccaggtcttgacatcttctgctaacccaagagattgggcgttcccttcggggacggaatgacaggtggtgcatggctgtcgtcagctcgtgtcgtgagatgttgggttaagtcccgcaacgagcgcaacccttattgttagttgccagcatttagttgggcactctagcaagactgccggtgacaaaccggaggaaggtggggatgacgtcaagtcctcatgccccttatgacctgggctacacacgtgctacaatggacggtacaacgagtcgcgaaaccgcgaggtcaagctaatctcttaaagccgttctcagttcggattgcaggctgcaactcgcctgcatgaagtcggaatcgctagtaatcgtggatcagcatgccacggtgaatacgttcccgggccttgtacacaccgcccgtcacaccatgagagtttgtaacacccaaagccggtggggtaaccttttaggagccagccgtctaaggtgggacagatgattagggtgaagtcgtaacaaggtagccgtaggagaacctgcggctcacctccta

SEQ ID NO: 1120 - DNA, 1617 bp, Lactobacillus sp.
  66c
gagttccactctcctcttctgcactcaagaatgacagtttccgatgcagttccacggttgagccgtgggctttcacatcagacttatcattccgcctgcgctcgctttacgcccaataaatccggacaacgcttgccacctacgtagagtttgatcatggctcaggacgaacgctgggcggcgtgcctaatacatgcaagtcgagcgagctgaattcacagatcccttcggagtgacgtgttggacgctagcggcggatgggtgagtaacacgtgggcaatctgccctaaagactgggataccacttggaaacaggtgctaataccggataacaatgatggttgcatgaccattatttgaaaggcggcgcaagctgtcactttaggatgagcccgcggtgcattagctagttggtgaggtaacggctcaccaaggccatgatgcatagccgagttgagagactgatcggccacattgggactgagacacggcccaaactcctacgggaggcagcagtagggaatcttccacaatggacgcaagtctgatggagcaacgccgcgtgagtgaagaaggttttcggatcgtaaagctctgttgttggtgaagaaggatgtgagtagcaactggctcatatttgacggtaatcaaccagaaagtcacggctaactacgtgccagcagccgcggtaatacgtaggtggcaagcgttgtccggatttattgggcgtaaagcgagcgcaggcggaatgataagtctgatgtgaaagcccacggctcaaccgtggaactgcatcggaaactgtcattcttgagtgcagaagaggagagtggaactccatgtgtagcggtggaatgcgtagatatatggaagaacaccagtggcgaaggcggctctctggtctgcaactgacgctgaggctcgaaagcatgggtagcgaacaggattagataccctggtagtccatgccgtaaacgatgagcgctaggtgttggggactttccggtcctcagtgccgcagcaaacgcattaagcgctccgcctggggagtacgaccgcaaggttgaaactcaaaggaattgacgggggcccgcacaagcggtggagcatgtggtttaattcgaagcaacgcgaagaaccttaccaggtcttgacatcctgagaccgttatagagatataattttcccttcggggactcagagacaggtggtgcatggctgtcgtcagctcgtgtcgtgagatgttgggttaagtcccgcaacgagcgcaacccttgtctttagttgccagcattaagttgggcactctagagagactgccggtgacaaaccggaggaaggtggggatgacgtcaagtcatcatgccccttatgacctgggctacacacgtgctacaatgggcagtacaacgagaagcgaacctgcgaaggcaagcggatctcttaaagctgttctcagttcggactgcaggctgcaactcgcctgcacgaagctggaatcgctagtaatcgcggatcagcacgccgcggtgaatacgttcccgggccttgtacacaccgcccgtcacaccatggaagtctgcaatgcccaaagtcggtgggataacccttttggaa

SEQ ID NO: 1121 - DNA, 1409 bp, Lactobacillus sp.
  BT6
  modified_base (8)..(8): a, c, t, g, unknown or other
  modified_base (14)..(14): a, c, t, g, unknown or other
  modified_base (40)..(40): a, c, t, g, unknown or other
tgattatntgaaanggtgcttgcatcttgatttaattttngaacgagtggcggacgggtgagtaacacgtgggtaacctgcccttaagtgggggataacatttggaaacagatgctaataccgcataaatccaagaaccgcatggttcttggctgaaagatggcgtaagctatcgcttttggatggacccgcggcgtattagctagttggtgaggtaacggctcaccaaggcaatgatacgtagccgaactgagaggttgatcggccacattgggactgagacacggcccaaactcctacgggaggcagcagtagggaatcttccacaatggacgcaagtctgatggagcaacgccgcgtgagtgaagaaggctttcgggtcgtaaaactctgttgttggagaagaatggtcggcagagtaactgttgtcggcgtgacggtatccaaccagaaagccacggctaactacgtgccagcagccgcggtaatactaggtggcaagcgttatccggatttattgggcgtaaagcgagcgcaggcggttttttaagtctgatgtgaaagccctcggcttaaccgaggaagtgcatcggaaactggaaacttgagtgcagaagaggacagtggaactccatgtgtagcggtgaaatgcgtagatatatggaagaacaccagtggcgaaggcggctgtctggtctgtaactgacgctgagctcgaaagcatgggtagcgaacaggattagataccctggtagtccatgccgtaaacgatgaatgctaggtgttggagggtttccgcccttcagtgccgcagctaacgcattaagcattccgcctggggagtacgaccgcaaggttgaaactcaaaggaattgacgggggcccgcacaagcggggagcatgtggtttaattcgaagcaacgcgaagaaccttaccaggtcttgacatcttttgatcacctgagagatcaggtttccccttcgggggcaaaatgacaggtggtgcatggttgtcgtcagctcgtgtcgtgagatgttgggttaagtcccgcaacgagcgcaacccttatgactagttgccagcatttagttgggcactctagtaagactgccggtgacaaaccggaggaaggtggggatgacgtcaaatcatcatgccccttatgacctgggctacacacgtgctacaatggatggtacaacgagttgcgagaccgcgaggtcaagctaatctcttaaagccattctcagttcggactgtaggctgcaactcgcctacacgaagtcggaatcgctagtaatcgcggatcagcacgccgcggtgaatacgttcccgggccttgtacacaccgcccgtcacaccatgagagtttgtaacacccgaagccggtggcgtaacccttttaggg

SEQ ID NO: 1122 - DNA, 1238 bp, Lactobacillus sp.
  KLDS 1.0701
agcggcggatgggtgagtaacacgtggggaacctgccccatagtctgggataccacttggaaacaggtgctaataccggataagaaaagtcgctatgggatggccccgcggtgcattagctagttggtagggtaacggcctaccaaggcaatgatgcatagccgagttgagagactgatcggccacattgggactgagacacggcccaaactcctacgggaggcagcagtagggaatcttccacaatggacgaaagtctgatggagcaacgccgcgtgagtgaagaaggttttcggatcgtaaagctctgttgttggtgaagatgacggtaatcaaccagaaagtcacggctaactacgtgccagcagccgcggtaatacgtaggtggcaagcgttgtccggatttattgggcgtaaagcgagcgcaggcggaagaataagtctgatgtgaaagccctcggcttaaccgaggaactgcatcggaaactgtttttcttgagtgcagaagaggagagtggaactccatgtgtagcggtggaatgcgtagatatatggaagaacaccagtggcgaaggcggctctctggtctgactgacgctgaggctcgaaagcatgggtagcgaacaggattagataccctggtagtccatgccgtaaacgatgagtgctaagtgttgggatctcagtgctgcagctaacgcattaagcactccgcctggggagtacgaccgcaaggttgaaactcaaaggaattgacgggggcccgcacaagcggtggagcatgtggtttaattcgaagcaacgcgaagaaccttaccaggtcttgacatcgacaggtggtgcatggctgtcgtcagctcgtgtcgtgagatgttgggttaagtcccgcaacgagcgcaacccttgtcattagttgccagcatgggcactctaatgagactgccggtgacaaaccggaggaaggtggggatgacgtcaagtcatcatgccccttatgacctgggctacacacgtgctacaatggacagcaacgaggagcaagcctgcgaaggcaagcgaatctcttctgttctcagttcggatgcagtctgcaactcgactgcagaagctggaatcgctagtaatcgcggatcagcacgccgcggtgaatacgttcccgggccttgtacacaccgcccgtcacaccatgggagtctgcaatgcccaaagccggtgcctaaggagccgtctaaggcagg

SEQ ID NO: 1123 - DNA, 1237 bp, Lactobacillus sp.
  KLDS 1.0702
agtggcgaactggtgagtaacacgtgggaaacctgcccagaagcgggggataacacctggaaacagatgctaataccgcataacgaaagtcacttttggatggtcccgcggcgtattagctagatggtggggtaacggctcaccatggcaatgatacgtagccgacctgagagggtaatcggccacattgggactgagacacggcccaaactcctacgggaggcagcagtagggaatcttccacaatggacgaaagtctgatggagcaacgccgcgtgagtgaagaagggtttcggctcgtaaaactctgttgttaaagaagatgacggtatttaaccagaaagccacggctaactacgtgccagcagccgcggtaatacgtaggtggcaagcgttgtccggatttattgggcgtaaagcgagcgcaggcggttttttaagtctgatgtgaaagccttcggctcaaccgaagaagtgcatcggaaactgggaaacttgagtgcagaagaggacagtggaactccatgtgtagcggtgaaatgcgtagatatatggaagaacaccagtggcgaaggcggctgtctggtctgactgacgctgaggctcgaaagtatgggtagcaaacaggattagataccctggtagtccataccgtaaacgatgaatgctaagtgttggagcttcagtgctgcagctaacgcattaagcattccgcctggggagtacggccgcaaggctgaaactcaaaggaattgacgggggcccgcacaagcggtggagcatgtggtttaattcgaagctacgcgaagaaccttaccaggtcttgacatatacaggtggtgcatggttgtcgtcagctcgtgtcgtgagatgttgggttaagtcccgcaacgagcgcaacccttattatcagttgccagcatgggcactctggtgagactgccggtgacaaaccggaggaaggtggggatgacgtcaaatcatcatgccccttatgacctgggctacacacgtgctacaatggatggcaacgagttgcgaactcgcgagagtaagctaatctcttccattctcagttcggatgtaggctgcaactcgcctacagaagtcggaatcgctagtaatcgcggatcagcatgccgcggtgaatacgttcccgggccttgtacacaccgcccgtcacaccatgagagtttgtaacacccaaagtcggtgggtaaccagccgcctaaggtgg

SEQ ID NO: 1124 - DNA, 1236 bp, Lactobacillus sp.
  KLDS 1.0703
agtggcgaactggtgagtaacacgtgggaaacctgcccagaagcgggggataacacctggaaacagatgctaataccgcataacgaaagtcacttttggatggtcccgcggcgtattagctagatggtggggtaacggctcaccatggcaatgatacgtagccgacctgagagggtaatcggccacattgggactgagacacggcccaaactcctacgggaggcagcagtagggaatcttccacaatggacgaaagtctgatggagcaacgccgcgtgagtgaagaagggtttcggctcgtaaaactctgttgttaaagaagatgacggtatttaaccagaaagccacggctaactacgtgccagcagccgcggtaatacgtaggtggcaagcgttgtccggatttattgggcgtaaagcgagcgcaggcggttttttaagtctgatgtgaaagccttcggctcaaccgaagaagtgcatcggaaactgggaaacttgagtgcagaagaggacagtggaactccatgtgtagcggtgaaatgcgtagatatatggaagaacaccagtggcgaaggcggctgtctggtctgactgacgctgaggctcgaaagtatgggtagcaaacaggattagataccctggtagtccataccgtaaacgatgaatgctaagtgttggagcttcagtgctgcagctaacgcattaagcattccgcctggggagtacggccgcaaggctgaaactcaaaggaattgacgggggcccgcacaagcggtggagcatgtggtttaattcgaagctacgcgaagaaccttaccaggtcttgacatatacaggtggtgcatggttgtcgtcagctcgtgtcgtgagatgttgggttaagtcccgcaacgagcgcaacccttattatcagttgccagcatgggcactctggtgagactgccggtgacaaaccggaggaaggtggggatgacgtcaaatcatcatgccccttatgacctgggctacacacgtgctacaatggatggcaacgagttgcgaactcgcgagagtaagctaatctcttccattctcagttcggatgtaggctgcaactcgcctacagaagtcggaatcgctagtaatcgcggatcagcatgccgcggtgaatacgttcccgggccttgtacacaccgcccgtcacaccatgagagtttgtaacacccaaagtcggtgggtaaccagccgcctaaggtg

SEQ ID NO: 1125 - DNA, 1264 bp, Lactobacillus sp.
  KLDS 1.0704
gcggcgtgctatacatgcagtcgaacgagtggcgaactggtgagtaacacgtgggaaacctgcccagaagcgggggataacacctggaaacagatgctaataccgcataacgaaagtcacttttggatggtcccgcggcgtattagctagatggtggggtaacggctcaccatggcaatgatacgtagccgacctgagagggtaatcggccacattgggactgagacacggcccaaactcctacgggaggcagcagtagggaatcttccacaatggacgaaagtctgatggagcaacgccgcgtgagtgaagaagggtttcggctcgtaaaactctgttgttaaagaagatgacggtatttaaccagaaagccacggctaactacgtgccagcagccgcggtaatacgtaggtggcaagcgttgtccggatttattgggcgtaaagcgagcgcaggcggttttttaagtctgatgtgaaagccttcggctcaaccgaagaagtgcatcggaaactgggaaacttgagtgcagaagaggacagtggaactccatgtgtagcggtgaaatgcgtagatatatggaagaacaccagtggcgaaggcggctgtctggtctgactgacgctgaggctcgaaagtatgggtagcaaacaggattagataccctggtagtccataccgtaaacgatgaatgctaagtgttggagcttcagtgctgcagctaacgcattaagcattccgcctggggagtacggccgcaaggctgaaactcaaaggaattgacgggggcccgcacaagcggtggagcatgtggtttaattcgaagctacgcgaagaaccttaccaggtcttgacatatacaggtggtgcatggttgtcgtcagctcgtgtcgtgagatgttgggttaagtcccgcaacgagcgcaacccttattatcagttgccagcatgggcactctggtgagactgccggtgacaaaccggaggaaggtggggatgacgtcaaatcatcatgccccttatgacctgggctacacacgtgctacaatggatggcaacgagttgcgaactcgcgagagtaagctaatctcttccattctcagttcggatgtaggctgcaactcgcctacagaagtcggaatcgctagtaatcgcggatcagcatgccgcggtgaatacgttcccgggccttgtacacaccgcccgtcacaccatgagagtttgtaacacccaaagtcggtgggtaaccagccgcctaaggtgg

SEQ ID NO: 1126 - DNA, 1240 bp, Lactobacillus sp.
  KLDS 1.0705
agtggcgaactggtgagtaacacgtgggaaacctgcccagaagcgggggataacacctggaaacagatgctaataccgcataacgaaagtcacttttggatggtcccgcggcgtattagctagatggtggggtaacggctcaccatggcaatgatacgtagccgacctgagagggtaatcggccacattgggactgagacacggcccaaactcctacgggaggcagcagtagggaatcttccacaatggacgaaagtctgatggagcaacgccgcgtgagtgaagaagggtttcggctcgtaaaactctgttgttaaagaagatgacggtatttaaccagaaagccacggctaactacgtgccagcagccgcggtaatacgtaggtggcaagcgttgtccggatttattgggcgtaaagcgagcgcaggcggttttttaagtctgatgtgaaagccttcggctcaaccgaagaagtgcatcggaaactgggaaacttgagtgcagaagaggacagtggaactccatgtgtagcggtgaaatgcgtagatatatggaagaacaccagtggcgaaggcggctgtctggtctgactgacgctgaggctcgaaagtatgggtagcaaacaggattagataccctggtagtccataccgtaaacgatgaatgctaagtgttggagcttcagtgctgcagctaacgcattaagcattccgcctggggagtacggccgcaaggctgaaactcaaaggaattgacgggggcccgcacaagcggtggagcatgtggtttaattcgaagctacgcgaagaaccttaccaggtcttgacatatacaggtggtgcatggttgtcgtcagctcgtgtcgtgagatgttgggttaagtcccgcaacgagcgcaacccttattatcagttgccagcatgggcactctggtgagactgccggtgacaaaccggaggaaggtggggatgacgtcaaatcatcatgccccttatgacctgggctacacacgtgctacaatggatggcaacgagttgcgaactcgcgagagtaagctaatctcttccattctcagttcggatgtaggctgcaactcgcctacagaagtcggaatcgctagtaatcgcggatcagcatgccgcggtgaatacgttcccgggccttgtacacaccgcccgtcacaccatgagagtttgtaacacccaaagtcggtgggtaaccagccgcctaaggtgggac

SEQ ID NO: 1127 - DNA, 1236 bp, Lactobacillus sp.
  KLDS 1.0707
agtggcggacgggtgagtaacacgtaggtaacctgcccagaagcgggggacaacatttggaaacagatgctaataccgcataacaaaagtcacttctggatggacctgcggtgcattagcttgttggtggggtaacggcctaccaaggcgatgatgcatagccgagttgagagactgatcggccacaatgggactgagacacggcccatactcctacgggaggcagcagtagggaatcttccacaatgggcgcaagcctgatggagcaacaccgcgtgagtgaagaagggtttcggctcgtaaagctctgttgttaaagaagatgacggtatttaaccagaaagtcacggctaactacgtgccagcagccgcggtaatacgtaggtggcaagcgttatccggatttattgggcgtaaagagagtgcaggcggttttctaagtctgatgtgaaagccttcggcttaaccggagaagtgcatcggaaactggataacttgagtgcagaagagggtagtggaactccatgtgtagcggtggaatgcgtagatatatggaagaacaccagtggcgaaggcggctacctggtctgactgacgctgagactcgaaagcatgggtagcgaacaggattagataccctggtagtccatgccgtaaacgatgagtgctaggtgttggagcttcagtgccggagctaacgcattaagcactccgcctggggagtacgaccgcaaggttgaaactcaaaggaattgacgggggcccgcacaagcggtggagcatgtggtttaattcgaagctacgcgaagaaccttaccaggtcttgacatcgacaggtggtgcatggtcgtcgtcagctcgtgtcgtgagatgttgggttaagtcccgcaacgagcgcaacccttgttactagttgccagcatgggcactctagtgagactgccggtgacaaaccggaggaaggtggggacgacgtcagatcatcatgccccttatgacctgggctacacacgtgctacaatggacggcaacgagtcgcgaactcgcgagggcaagcaaatctcttccgttctcagttcggatgcaggctgcaactcgcctgcagaagtcggaatcgctagtaatcgcggatcagcatgccgcggtgaatacgttcccgggccttgtacacaccgcccgtcacaccatgagagtttgtaacacccaaagtcggtgggtagccagccgcctaaggtg

SEQ ID NO: 1128 - DNA, 1237 bp, Lactobacillus sp.
  KLDS 1.0709
agtggcggacgggtgagtaacacgtaggtaacctgcccagaagcgggggacaacatttggaaacagatgctaataccgcataacaaaagtcacttctggatggacctgcggtgcattagcttgttggtggggtaacggcctaccaaggcgatgatgcatagccgagttgagagactgatcggccacaatgggactgagacacggcccatactcctacgggaggcagcagtagggaatcttccacaatgggcgcaagcctgatggagcaacaccgcgtgagtgaagaagggtttcggctcgtaaagctctgttgttaaagaagatgacggtatttaaccagaaagtcacggctaactacgtgccagcagccgcggtaatacgtaggtggcaagcgttatccggatttattgggcgtaaagagagtgcaggcggttttctaagtctgatgtgaaagccttcggcttaaccggagaagtgcatcggaaactggataacttgagtgcagaagagggtagtggaactccatgtgtagcggtggaatgcgtagatatatggaagaacaccagtggcgaaggcggctacctggtctgactgacgctgagactcgaaagcatgggtagcgaacaggattagataccctggtagtccatgccgtaaacgatgagtgctaggtgttggagcttcagtgccggagctaacgcattaagcactccgcctggggagtacgaccgcaaggttgaaactcaaaggaattgacgggggcccgcacaagcggtggagcatgtggtttaattcgaagctacgcgaagaaccttaccaggtcttgacatcgacaggtggtgcatggtcgtcgtcagctcgtgtcgtgagatgttgggttaagtcccgcaacgagcgcaacccttgttactagttgccagcatgggcactctagtgagactgccggtgacaaaccggaggaaggtggggacgacgtcagatcatcatgccccttatgacctgggctacacacgtgctacaatggacggcaacgagtcgcgaactcgcgagggcaagcaaatctcttccgttctcagttcggatgcaggctgcaactcgcctgcagaagtcggaatcgctagtaatcgcggatcagcatgccgcggtgaatacgttcccgggccttgtacacaccgcccgtcacaccatgagagtttgtaacacccaaagtcggtgggtagccagccgcctaaggtgg

SEQ ID NO: 1129 - DNA, 1236 bp, Lactobacillus sp.
  KLDS 1.0711
agtggcggacgggtgagtaacacgtaggtaacctgcccagaagcgggggacaacatttggaaacagatgctaataccgcataacaaaagtcacttctggatggacctgcggtgcattagcttgttggtggggtaatggcctaccaaggcgatgatgcatagccgagttgagagactgatcggccacaatgggactgagacacggcccatactcctacgggaggcagcagtagggaatcttccacaatgggcgcaagcctgatggagcaacaccgcgtgagtgaagaagggtttcggctcgtaaagctctgttgttaaagaagatgacggtatttaaccagaaagtcacggctaactacgtgccagcagccgcggtaatacgtaggtggcaagcgttatccggatttattgggcgtaaagagagtgcaggcggttttctaagtctgatgtgaaagccttcggcttaaccggagaagtgcatcggaaactggataacttgagtgcagaagagggtagtggaactccatgtgtagcggtggaatgcgtagatatatggaagaacaccagtggcgaaggcggctacctggtctgactgacgctgagactcgaaagcatgggtagcgaacaggattagataccctggtagtccatgccgtaaacgatgagtgctaggtgttggagcttcagtgccggagctaacgcattaagcactccgcctggggagtacgaccgcaaggttgaaactcaaaggaattgacgggggcccgcacaagcggtggagcatgtggtttaattcgaagctacgcgaagaaccttaccaggtcttgacatcgacaggtggtgcatggtcgtcgtcagctcgtgtcgtgagatgttgggttaagtcccgcaacgagcgcaacccttgttactagttgccagcatgggcactctagtgagactgccggtgacaaaccggaggaaggtggggacgacgtcagatcatcatgccccttatgacctgggctacacacgtgctacaatggacggcaacgagtcgcgaactcgcgagggcaagcaaatctcttccgttctcagttcggatgcaggctgcaactcgcctgcagaagtcggaatcgctagtaatcgcggatcagcatgccgcggtgaatacgttcccgggccttgtacacaccgcccgtcacaccatgagagtttgtaacacccaaagtcggtgggtagccagccgcctaaggtg

SEQ ID NO: 1130 - DNA, 1238 bp, Lactobacillus sp.
  KLDS 1.0712
agcggcggatgggtgagtaacacgtggggaacctgccccatagtctgggataccacttggaaacaggtgctaataccggataagaaaagtcgctatgggatggccccgcggtgcattagctagttggtaaggtaaaggcttaccaaggcgatgatgcatagccgagttgagagactgatcggccacattgggactgagacacggcccaaactcctacgggaggcagcagtagggaatcttccacaatggacgcaagtctgatggagcaacgccgcgtgagtgaagaaggttttcggatcgtaaagctctgttgttggtgaagatgacggtaatcaaccagaaagtcacggctaactacgtgccagcagccgcggtaatacgtaggtggcaagcgttgtccggatttattgggcgtaaagcgagcgcaggcggaagaataagtctgatgtgaaagccctcggcttaaccgaggaactgcatcggaaactgtttttcttgagtgcagaagaggagagtggaactccatgtgtagcggtggaatgcgtagatatatggaagaacaccagtggcgaaggcggctctctggtctgactgacgctgaggctcgaaagcatgggtagcgaacaggattagataccctggtagtccatgccgtaaacgatgagtgctaagtgttgggatctcagtgctgcagctaacgcattaagcactccgcctggggagtacgaccgcaaggttgaaactcaaaggaattgacgggggcccgcacaagcggtggagcatgtggtttaattcgaagcaacgcgaagaaccttaccaggtcttgacatcgacaggtggtgcatggctgtcgtcagctcgtgtcgtgagatgttgggttaagtcccgcaacgagcgcaacccttgttattagttgccagcatgggcactctaatgagactgccggtgacaaaccggaggaaggtggggatgacgtcaagtcatcatgccccttatgacctgggctacacacgtgctacaatgggcagcaacgagaagcgagcctgcgaaggcaagcgaatctctgctgttctcagttcggatgcagtctgcaactcgactgcagaagctggaatcgctagtaatcgcggatcagcacgccgcggtgaatacgttcccgggccttgtacacaccgcccgtcacaccatgggagtctgcaatgcccaaagccggtgcctaaggagccgtctaaggcagg

SEQ ID NO: 1131 - DNA, 1237 bp, Lactobacillus sp.
  KLDS 1.0713
agtggcggacgggtgagtaacacgtaggtaacctgcccagaagcgggggacaacatttggaaacagatgctaataccgcataacaaaagtcacttctggatggacctgcggtgcattagcttgttggtggggtaatggcctaccaaggcgatgatgcatagccgagttgagagactgatcggccacaatgggactgagacacggcccatactcctacgggaggcagcagtagggaatcttccacaatgggcgcaagcctgatggagcaacaccgcgtgagtgaagaagggtttcggctcgtaaagctctgttgttaaagaagatgacggtatttaaccagaaagtcacggctaactacgtgccagcagccgcggtaatacgtaggtggcaagcgttatccggatttattgggcgtaaagagagtgcaggcggttttctaagtctgatgtgaaagccttcggcttaaccggagaagtgcatcggaaactggataacttgagtgcagaagagggtagtggaactccatgtgtagcggtggaatgcgtagatatatggaagaacaccagtggcgaaggcggctacctggtctgactgacgctgagactcgaaagcatgggtagcgaacaggattagataccctggtagtccatgccgtaaacgatgagtgctaggtgttggagcttcagtgccggagctaacgcattaagcactccgcctggggagtacgaccgcaaggttgaaactcaaaggaattgacgggggcccgcacaagcggtggagcatgtggtttaattcgaagctacgcgaagaaccttaccaggtcttgacatcgacaggtggtgcatggtcgtcgtcagctcgtgtcgtgagatgttgggttaagtcccgcaacgagcgcaacccttgttactagttgccagcatgggcactctagtgagactgccggtgacaaaccggaggaaggtggggacgacgtcagatcatcatgccccttatgacctgggctacacacgtgctacaatggacggcaacgagtcgcgaactcgcgagggcaagcaaatctcttccgttctcagttcggatgcaggctgcaactcgcctgcagaagtcggaatcgctagtaatcgcggatcagcatgccgcggtgaatacgttcccgggccttgtacacaccgcccgtcacaccatgagagtttgtaacacccaaagtcggtgggtagccagccgcctaaggtgg

SEQ ID NO: 1132 - DNA, 1237 bp, Lactobacillus sp.
  KLDS 1.0716
agtggcggacgggtgagtaacacgtaggtaacctgccccaaagcgggggataacatttggaaacagatgctaataccgcataacaaaagtcactttgggatggacctgcggcgcattagcttgttggtagggtaacggcctaccaaggctgtgatgcgtagccgagttgagagactgatcggccacaatggaactgagacacggtccatactcctacgggaggcagcagtagggaatcttccacaatgggcgcaagcctgatggagcaacaccgcgtgagtgaagaagggtttcggctcgtaaagctctgttgttagagaagatgacggtatctaaccagaaagtcacggctaactacgtgccagcagccgcggtaatacgtaggtggcaagcgttatccggatttattgggcgtaaagcgagcgcaggcggtttgataagtctgatgtgaaagcctttggcttaaccaaagaagtgcatcggaaactgtcagacttgagtgcagaagaggacagtggaactccatgtgtagcggtggaatgcgtagatatatggaagaacaccagtggcgaaggcggctgtctggtctgactgacgctgaggctcgaaagcatgggtagcgaacaggattagataccctggtagtccatgccgtaaacgatgagtgctaggtgttggagcttcagtgccgcagctaacgcattaagcactccgcctggggagtacgaccgcaaggttgaaactcaaaggaattgacgggggcccgcacaagcggtggagcatgtggtttaattcgaagctacgcgaagaaccttaccaggtcttgacatcgacaggtggtgcatggtcgtcgtcagctcgtgtcgtgagatgttgggttaagtcccgcaacgagcgcaacccttgttactagttgccagcatgggcactctagtgagactgccggtgacaaaccggaggaaggtggggacgacgtcagatcatcatgccccttatgacctgggctacacacgtgctacaatggacggcaacgagtcgcgaactcgcgagggcaagctaatctcttccgttctcagttcggatgcaggctgcaactcgcctgcagaagtcggaatcgctagtaatcgcggatcagcatgccgcggtgaatacgttcccgggccttgtacacaccgcccgtcacaccatgagagtttgcaacacccaaagtcggtgggtagctagccgcctaaggtgg

SEQ ID NO: 1133 - DNA, 1252 bp, Lactobacillus sp.
  KLDS 1.0718
atacatgcaagtcgaacgagtggcggacgggtgagtaacacgtaggtaacctgccccaaagcgggggataacatttggaaacagatgctaataccgcataacaaaagtcactttgggatggacctgcggcgcattagcttgttggtagggtaacggcctaccaaggctgtgatgcgtagccgagttgagagactgatcggccacaatggaactgagacacggtccatactcctacgggaggcagcagtagggaatcttccacaatgggcgcaagcctgatggagcaacaccgcgtgagtgaagaagggtttcggctcgtaaagctctgttgttagagaagatgacggtatctaaccagaaagtcacggctaactacgtgccagcagccgcggtaatacgtaggtggcaagcgttatccggatttattgggcgtaaagcgagcgcaggcggtttgataagtctgatgtgaaagcctttggcttaaccaaagaagtgcatcggaaactgtcagacttgagtgcagaagaggacagtggaactccatgtgtagcggtggaatgcgtagatatatggaagaacaccagtggcgaaggcggctgtctggtctgactgacgctgaggctcgaaagcatgggtagcgaacaggattagataccctggtagtccatgccgtaaacgatgagtgctaggtgttggagcttcagtgccgcagctaacgcattaagcactccgcctggggagtacgaccgcaaggttgaaactcaaaggaattgacgggggcccgcacaagcggtggagcatgtggtttaattcgaagctacgcgaagaaccttaccaggtcttgacatcgacaggtggtgcatggtcgtcgtcagctcgtgtcgtgagatgttgggttaagtcccgcaacgagcgcaacccttgttactagttgccagcatgggcactctagtgagactgccggtgacaaaccggaggaaggtggggacgacgtcagatcatcatgccccttatgacctgggctacacacgtgctacaatggacggcaacgagtcgcgaactcgcgagggcaagctaatctcttccgttctcagttcggatgcaggctgcaactcgcctgcagaagtcggaatcgctagtaatcgcggatcagcatgccgcggtgaatacgttcccgggccttgtacacaccgcccgtcacaccatgagagtttgcaacacccaaagtcggtgggtagctagccgcctaagg

SEQ ID NO: 1134 - DNA, 1237 bp, Lactobacillus sp.
  KLDS 1.0719
agtggcggacgggtgagtaacacgtgggtaacctgcctaaaagaaggggataacacttggaaacaggtgctaataccgtatatcgaaagtcgcttttagatggacccgcggcgtattaactagttggtggggtaacggcctaccaaggtgatgatacgtagccgaactgagaggttgatcggccacattgggactgagacacggcccaaactcctacgggaggcagcagtagggaatcttccacaatggacgcaagtctgatggagcaacgccgcgtgagtgaagaaggtcttcggatcgtaaaactctgttgttagagaagatgacggtatctaaccagcaagtcacggctaactacgtgccagcagccgcggtaatacgtaggtggcaagcgttgtccggatttattgggcgtaaagggaacgcaggcggtcttttaagtctgatgtgaaagccttcggcttaaccggagtagtgcattggaaactggaagacttgagtgcagaagaggagagtggaactccatgtgtagcggtgaaatgcgtagatatatggaagaacaccagtggcgaaagcggctctctggtctgactgacgctgaggttcgaaagcgtgggtagcaaacaggattagataccctggtagtccacgccgtaaacgatgaatgctaggtgttggagcttcagtgccgcagctaacgcaataagcattccgcctggggagtacgaccgcaaggttgaaactcaaaggaattgacgggggcccgcacaagcggtggagcatgtggtttaattcgaagcaacgcgaagaaccttaccaggtcttgacatcgacaggtggtgcatggctgtcgtcagctcgtgtcgtgagatgttgggttaagtcccgcaacgagcgcaacccttgttgtcagttgccagcatgggcactctggcgagactgccggtgacaaaccggaggaaggtggggacgacgtcaagtcatcatgccccttatgacctgggctacacacgtgctacaatggacggcaacgagtcgcaagaccgcgaggtttagctaatctcttccgttctcagttcggatgtaggctgcaactcgcctacagaagtcggaatcgctagtaatcgcgaatcagcatgtcgcggtgaatacgttcccgggccttgtacacaccgcccgtcacaccatgagagtttgtaacacccaaagccggtgggtagccagccgtctaaggtgg

SEQ ID NO: 1135 - DNA, 1364 bp, Lactobacillus sp.
  oral clone HT002
gagtttgattctggctcaggatgaacgccggcggtgtgcctaatacatgcaagtcgaacgagtggcggacgggtgagtaacacgtaggtaacctgcccggaagcgggggacaacatttggaaacagatgctaataccgcataacaaaagtcacttctggatggacctgcggtgcattagcttgttggtggggtaacggcttaccaaggcgatgatgcatagccgagttgagagactgatcggccacaatggaactgagacacggtccatactcctacgggaggcagcagtagggaatcttccacaatgggcgcaagcctgatggagcaacaccgcgtgagtgaagaagggtttcggctcgtaaagctctgttgttggagaagatgacggtatccaaccagaaagtcacggctaactacgtgccagcagccgcggtaatacgtaggtggcaagcgttgtccggatttattgggcgtaaagcgagtgcaggcggttcaataagtctgatgtgaaagccttcggctcaaccggagaattgcatcagaaactgttgaacttgagtgcagaagaggagagtggaactccatgtgtagcggtggaatgcgtagatatatggaagaacaccagtggcgaaggcggctctctggtctgactgacgctgaggctcgaaagcatgggtagcgaacaggattagataccctggtagtccatgccgtaaacgatgagtgctaagtgttgggatctcagtgctgcagctaacgcattaagcactccgcctggggagtacgaccgcaaggttgaaactcaaaggaattgacgggggcccgcacaagcggtggagcatgtggtttaattcgaagcgacgcgaagaaccttaccaggtcttgacatcgacaggtggtgcatggctgtcgtcagctcgtgtcgtgagatgttgggttaagtcccgcaacgagcgcaacccttgtcattagttgccatcatgggcactataatgagactgccggtgacaaaccggaggaaggtggggatgacgtcaagtcatcatgccccttatgacctgggctacacacgtgctacaatggacggcaacgagaagcgaacctgcgaaggcaagcggatctctgccgttctcagttcggatgtaggctgcaactcgcctacagaagctggaatcgctagtaatcgcggatcagcacgccgcggtgaatacgttcccgggccttgtacacaccgcccgtcacaccatgagagtctgtaacacccaaagccggtggatagtcagccgtctaaggtaggacagatgattagggtgaagtcgtaacaaggtagccgtaggagaacctgcggctggatcacctcctt

SEQ ID NO: 1136 - DNA, 1361 bp, Lactobacillus sp.
  oral clone HT070
gagtttgattctggctcaggacgaacgctggcggcgtgcctaatacatgcaagtcgagcgagcggcggatgggtgagtaacacgtggggaacctgccccagagtctgggataccacttggaaacaggtgctaataccggataagaaaagtcgctcagggatggccccgcggtgcattagctagttggcaaggtaacggcctaccaaggcaatgatgcatagccgagttgagagactgatcggccacattgggactgagacacggcccaaactcctacgggaggcagcagtagggaatcttccacaatggacgcaagtctgatggagcaacgccgcgtgagtgaagaaggttttcggatcgtaaagctctgttgttggtgaagatgacggtaatcaaccagaaagtcacggctaactacgtgccagcagccgcggtaatacgtaggtggcaagcgttgtccggatttattgggcgtaaagcgagcgcaggcggaaaaataagtctaatgtgaaagccctcggcttaaccgaggaattgcatcggaaactgtttttcttgagtgcagaagaggagagtggaactccatgtgtagcggtggaatgcgtagatatatggaagaacaccagtggcgaaggcggctctctggtctgactgacgctgaggctcgaaagcatgggtagcgaacaggattagataccctggtagtccatgccgtaaacgatgagtgctaagtgttgggatctcagtgctgcagctaacgcattaagcactccgcctggggagtacgaccgcaaggttgaaactcaaaggaattgacgggggcccgcacaagcggtggagcatgtggtttaattcgaagcaacgcgaagaaccttaccaggtcttgacatcgacaggtggtgcatggctgtcgtcagctcgtgtcgtgagatgttgggttaagtcccgcaacgagcgcaacccttgttattagttgccagcatgggcactctaatgagactgccggtgacaaaccggaggaaggtggggatgacgtcaagtcatcatgccccttatgacctgggctacacacgtgctacaatggacagcaacgagcagcgagcctgcgaaggcaagcgaatctctgctgttctcagttcggatgcagtctgcaactcgactgcagaagctggaatcgctagtaatcgcggatcagcacgccgcggtgaatacgttcccgggccttgtacacaccgcccgtcacaccatgggagtctgcaatgcccaaagccggtgcctaaggagccgtctaaggcagggcagatgactggggtgaagtcgtacaaggtagccgtaggaaacctgcggctggacacctcctt

SEQ ID NO: 1137 - DNA, 994 bp, Lactobacillus sp.
  oral taxon 052
  modified_base (43)..(43): a, c, t, g, unknown or other
  modified_base (45)..(45): a, c, t, g, unknown or other
  modified_base (633)..(633): a, c, t, g, unknown or other
  modified_base (635)..(635): a, c, t, g, unknown or other
  modified_base (637)..(637): a, c, t, g, unknown or other
  modified_base (727)..(727): a, c, t, g, unknown or other
  modified_base (876)..(876): a, c, t, g, unknown or other
  modified_base (944)..(945): a, c, t, g, unknown or other
  modified_base (978)..(978): a, c, t, g, unknown or other
  modified_base (984)..(986): a, c, t, g, unknown or other
cgcactggcccaactgagatgacgtgcttgcactgatttgacnanggattaccagtgagtggcggacgggtgagtaacacgtaggcaacctgcccaagagcgggggataacatttggaaacaagtgctaataccgcataagattgatgaccacatggtcatcaatttaaagatggcttcggctatcactcttggatgggcctgcggtgcattagctagttggtaaggtaacggcttaccaaggcagtgatgcatagccgagttgagagactgatcggccacaatgggactgagacacggcccatactcctacgggaggcagcagtagggaatcttccacaatgggcgcaagcctgatggagcgacaccgcgtgagtgaagaagggtttcggctcgtaaagctctgttgttgaagaagaacgtgcgtgagagtaactgttcacgcagtgacggtattcaaccagaaagtcacggctaactacgtgccagcagccgcggtaatacgtaggtggcaagcgttatccggatttattgggcgtaaagcgagcgcaggcggttttctaagtctgatgtgaaagccttcggcttaaccgaagaagggcatcggaaactggatgacttgagtgcagaagangncngtggaactccatgtgtagcggtggaatgcgtagatatatggaagaacaccagtggcgaaggcggctgcctagtctgcaactgacgctgangctcgaaagcatgggtagcgaacaggattagataccctggtagtccatgccgtaaacgatgagtgctaggtgttggagggtttccgcccttcagtgccgcagctaacgcaataagcactccgcctggggagtacgaccgcaaggttganctcaaaggaattgacgggggcccgcacaagcggtggagcatgtggtttaattcgaagctacgcgagannttaccaggtcttgacatcttgcgctaacctaanagattnnngttccctt

SEQ ID NO: 1138 - DNA, 1557 bp, Lactobacillus tucceti
  modified_base (1548)..(1548): a, c, t, g, unknown or other
ttaagagtttgatttaggctcaggacgaacgctggcggcgtgcctaatacatgcaagtcgagcgaactctggtaactgaacgatgggtgcttgcaccggagtgatgatacatttgagtgagcggcggatgggtgagtaacacgtgggtaacctgccctaaagtgggggataacatctggaaacaggtgctaataccgcataacaacatttaccacatggtttatgtttgaaagatggttctgctatcgctttaggatggacccgcggcgtattagctagttggtgaggtaacggctcaccaaggcaatgatacgtagccgacctgagagggtaatcggccacattgggactgagacacggcccaaactcctacgggaggcagcagtagggaatcttccacaatggacgaaagtctgatggagcaacgccgcgtgagtgaagaaggttttcggatcgtaaaactctgttgttgaagaagaacatgcgtgagagtaactgttcatgtattgacggtattcaaccagaaagccacggctaactacgtgccagcagccgcggtaatacgtaggtggcaagcgttgtccggatttattgggcgtaaagcgagcgtaggcggtttattaagtctgatgtgaaagccctcggctcaaccgaggaagtgcatcggaaactggtaaacttgagtgcagaagaggaaagtggaactccatgtgtagcggtggaatgcgtagatatatggaagaacaccagtggcgaaggcggctttctggtctgtaactgacgctgaggttcgaaagcgtgggtagcaaacaggattagataccctggtagtccacgccgtaaacgatgagtgctaagtgttggagggtttccgcccttcagtgctgcagctaacgcattaagcactccgcctggggagtacgaccgcaaggttgaaactcaaaggaattgacgggggcccgcacaagcggtggagcatgtggtttaattcgaagcaacgcgaagaaccttaccaggtcttgacatatcttgaaagtctaagagattagaggttcccttcggggacaagaatacaggtggtgcatggttgtcgtcagctcgtgtcgtgagatgttgggttaagtcccgcaacgagcgcaacccttattactagttgccagcattaagttgggcactctagtgagactgccggtgacaaaccggaggaaggtggggacgacgtcaaatcatcatgccccttatgacctgggctacacacgtgctacaatggtcggtacaacgtgctgcgaactcgcgagggtaagcaaatcacttaaaaccgatctcagttcggattgcaggctgcaactcgcctgcatgaagctggaatcgctagtaatcgtggatcagcatgccacggtgaatacgttcccgggccttgtacacaccgcccgtcacaccatgagagtttgtaacacccaaagccggtggggtaaccttttaggagctagccgtctaaggtgggacaaatgattagggtgaagtcgtaacaaggtagccgtaggagancctgcggct

SEQ ID NO: 1139 - DNA, 1561 bp, Lactobacillus ultunensis
tgagagtttgatcctggctcaggacgaacgctggcggcgtgcctaatacatgcaagtcgagcgagcggaaccagcagatctgcttcggcagtgacgctgggaaagcgagcggcggatgggtgagtaacacgtggggaacctgccccaaagtctgggataccacttggaaacaggtgctaataccggataagaaagcagatcgcatgatcagcttttaaaaggcggcgtaagctgtcgctatgggatggccccgcggtgcattagctagttggtagagtaacggcctaccaaggcaatgatgcatagccgagttgagagactgatcggccacattgggactgagacacggcccaaactcctacgggaggcagcagtagggaatcttccacaatggacgcaagtctgatggagcaacgccgcgtgagtgaagaaggttttcggatcgtaaagctctgttgttggtgaagaaggatagaggtagtaactggcctttatttgacggtaatcaaccagaaagtcacggctaactacgtgccagcagccgcggtaatacgtaggtggcaagcgttgtccggatttattgggcgtaaagcgagcgcaggcggaaaaataagtctaatgtgaaagccctcggcttaaccgaggaactgcatcggaaactgtttttcttgagtgcagaagaggagagtggaactccatgtgtagcggtggaatgcgtagatatatggaagaacaccagtggcgaaggcggctctctggtctgcaactgacgctgaggctcgaaagcatgggtagcgaacaggattagataccctggtagtccatgccgtaaacgatgagtgctaagtgttgggaggtttccgcctctcagtgctgcagctaacgcattaagcactccgcctggggagtacgaccgcaaggttgaaactcaaaggaattgacgggggcccgcacaagcggtggagcatgtggtttaattcgaagcaacgcgaagaaccttaccaggtcttgacatctagtgccatcttcagagatgaagagttcccttcggggacgctaagacaggtggtgcatggctgtcgtcagctcgtgtcgtgagatgttgggttaagtcccgcaacgagcgcaacccttgttattagttgccagcattaagttgggcactctaatgagactgccggtgacaaaccggaggaaggtggggatgacgtcaagtcatcatgccccttatgacctgggctacacacgtgctacaatgggcagtacaacgagaagcgagcctgcgaaggcaagcgaatctctgaaagctgttctcagttcggactgcagtctgcaactcgactgcacgaagctggaatcgctagtaatcgcggatcagcacgccgcggtgaatacgttcccgggccttgtacacaccgcccgtcacaccatgggagtctgcaacgcccaaagccggtggcctaaccgaaaggaaggagccgtctaaggcagggcagatgactggggtgaagtcgtaacaaggtagccgtaggagaacctgcggctggatcacctcctttct

SEQ ID NO: 1140 - DNA, 1410 bp, Lactobacillus vaginalis
gggggataacatctggaaacaggtgctaataccgcataacaacgaaaaccacatggttttcgtttcaaagatggtttcggctatcacttcaggatgggcccgcggtgcattagctagttggtaaggtaacggcttaccaaggcaatgatgcatagccgagttgagagactgatcggccacaatggaactgagacacggtccatactcctacgggaggcagcagtagggaatcttccacaatgggcgcaagcctgatggagcaacaccgcgtgagtgaagaagggtttcggctcgtaaagctctgttgttggagaagaacgtgcgtgagagtaactgttcacgcagtgacggtatccaaccagaaagtcacggctaactacgtgccagcagccgcggtaatacgtaggtggcaagcgttatccggatttattgggcgtaaagcgagcgcaggcggttgcttaggtctgatgtgaaagccttcggcttaaccgaagaagggcatcggaaaccgggcgacttgagtgcagaagaggacagtggaactccatgtgtagcggtggaatgcgtagatatatggaagaacaccagtggcgaaggcggctgtctggtctgcaactgacgctgaggctcgaaagcatgggtagcgaacaggattagataccctggtagtccatgccgtaaacgatgagtgctaggtgttggagggtttccgcccttcagtgccggagctaacgcattaagcactccgcctggggagtacgaccgcaaggttgaaactcaaaggaattgacgggggcccgcacaagcggtggagcatgtggtttaattcgaagctacgcgaagaaccttaccaggtcttgacatcttgcgctaacctaagagattaggcgttcccttcggggacgcaatgacaggtggtgcatggtcgtcgtcagctcgtgtcgtgagatgttgggttaagtcccgcaacgagcgcaacccttgttactagttgccagcattcagttgggcactctagtgagactgccggtgacaaaccggaggaaggtggggacgacgtcagatcatcatgccccttatgacctgggctacacacgtgctacaatggacggtacaacgagttgcgaactcgcgagagtaagctaatctcttaaagccgttctcagttcggactgtaggctgcaactcgcctacacgaagtcggaatcgctagtaatcgcggatcagcatgccgcggtgaatacgttcccgggccttgtacacaccgcccgtcacaccatggaagtttgcaatgcccaaagtcggtggcctaaccatttggagggaaccgcctaaggcagggcagatgactggggtgaagtcgtaacaaggtagccgtaggagaacctgcggctggatcacctcctttct

SEQ ID NO: 1141 - DNA, 1503 bp, Lactobacillus vini
agagtttgattatggctcaggacgaacgctggcggcgtgcctaatacatgcaagtcgaacgagactttttatttgatgcttgcatcttttaaaaagttgagtggcgaacgggtgagtaacacgtgggtaacctgccttaaagtgggggataacacttggaaacaggtgctaataccgcataaccatcaaaaccgcctggttttgatgttaaagatggttctgctatcgctttaagatggacccgcggcgtattagctagttggtgaggtaacggcttaccaaggcaatgatacgtagccgaactgagaggttgatcggccacattgggactgagacacggcccaaactcctacgggaggcagcagtagggaatcttccacaatggacgaaagtctgatggagcaacgccgcgtgagtgaagaaggttttcggatcgtaaaactctgttgtcagagaagaacgtgtgtgagagtaactgttcacgcagtgacggtatctgaccagaaagtcacggctaactacgtgccagcagccgcggtaatacgtaggtggcaagcgttgtccggatttattgggcgtaaagggaacgcaggcggtcttttaagtctgatgtgaaagccttcggcttaaccgaagtcgggcattggaaactgggagacttgagtgcagaagaagagagtggaactccatgtgtagcggtgaaatgcgtagatatatggaagaacaccagtggcgaaagcggctctctggtctgtaactgacgctgaggttcgaaagcgtgggtagcaaacaggattagataccctggtagtccacgccgtaaacgatgaatgctaagtgttggagggtttccgcccttcagtgccgcagctaacgcattaagcattccgcctggggagtacgatcgcaagattgaaactcaaaggaattgacgggggcccgcacaagcggtggagcatgtggtttaattcgaagcaacgcgaagaaccttaccaggtcttgacatcttttgctaacctgagagatcaggtgttcccttcggggacaaaatgacaggtggtgcatggttgtcgtcagctcgtgtcgtgagatgttgggttaagtcccgcaacgagcgcaacccttattgttagttgccagcatttagttgggcactctaacgagactgccggtgacaaaccggaggaaggtggggatgacgtcaaatcatcatgccccttatgacctgggctacacacgtgctacaatggacggtacaacgagtcgcaagaccgcgaggtcaagctaatctctgaaaaccgttctcagttcggattgcaggctgcaactcgcctgcatgaagtcggaatcgctagtaatcgcggatcagcatgccgcggtgaatacgttcccgggccttgtacacaccgcccgtcacaccatgagagtttgtaacacccaaagccggtggggtaacctttgggagccagccgtctaaggtgggacagatgattggggtgaaga

SEQ ID NO: 1142 - DNA, 1450 bp, Lactobacillus vitulinus
gatgaacgctggcggcgtgcctaatacatgcaagtcgaacgggaatcttcggattccagtggcgaacgggtgaggaatacataggtaacctgcccctccgagggggacaacagacggaaacatctgctaagaccgcatagccacagggaaggcatcttccctgtgccaaatgtcctttcggggacagcggggggatggacctatgccgcattagctggttggcggggcaacggcccaccaaggcgacgatgcgtagccggcctgagagggcggacggccacactgggactgagacacggcccagactcctacgggaggcagcagtagggaattttcggcaatgggggaaaccctgaccgagcaacgccgcgtgaacgatgaaggccttcgggtcgtaaagttctgttgcgaaggaagaacgccggtgtcaggaaatgggcgccgggtgacggtacttcgcatagaaagccacggctaactacgtgccagcagccgcggtaatacgtaggtggcgagcgttatccggaatcattgggcgtaaagagggagcaggcggcgatacaggtctgtggtgaaattccgaagctaaacttcggccagccaaagaaaccggatcgctagagtgcggaagaggatcgtggaattccatgtgtagcggtgaaatgcgtagatatatggaggaacaccagtggcgaaggcgacggtctgggccgcaactgacgctcattcccgaaagcgtggggagcaaataggattagataccctagtagtccacgccgtaaacgatcgatactaagtgtcgggggtcaaacctcggtgctggagtcaacgcaataagtatcgcgcctgagtagtacgttcgcaagaatgaaactcaaaggaattgacgggggcccgcacaagcggtggagcatgtggtttaattcgaagcaacgcgaagaaccttaccaggtcttgacatcgatccaaaagggacggaaacgtccccatagctatggagaagacaggtggtgcatggtgtcgtcagctcgtgtcgtgagatgttgggttaagtcccgcaacgagcgcaacccctgtcgccagttgccagcattgagttggggactctggcgagactgcctctgcaaggaggaggaaggcggggatgacgtcaaatcatcatgccccttatgacctgggccacacacgtgctacaatggacggagcagagggaagcgaagcggcgacgccaagcggatcccagaaacccgttctcagttcggactgcagtctgcaactcgactgcacgaagctggaatcgctagtaatcgcggatcagcatgccgcggtgaatacgttctcgggccttgtacacaccgcccgtcacaccatgagagtcggcaacacccgaagccggtggctcaacccttctgggagggagctgtctaaggtggggccgatgattggggtg

SEQ ID NO: 1143 - DNA, 1419 bp, Lactobacillus zeae
cgagttttggtcgatgaacggtgcttgcatcgtgattcaacttaaaacgagtggcggacgggtgagtaacacgtgggtaacctgcccttaagtgggggataacatttggaaacagatgctaataccgcataaatccaagaaccgcatggttcttggctgaaagatggcgtaagctatcgcttttggatggacccgcggcgtattagctagttggtgaggtaacggctcaccaaggcgatgatacgtagccgaactgagaggttgatcggccacattgggactgagacacggcccaaactcctacgggaggcagcagtagggaatcttccacaatggacgcaagtctgatggagcaacgccgcgtgagtgaagaaggctttcgggtcgtaaaactctgttgttggagaagaatggtcggcagagtaactgttgtcggcgtgacggtatccaaccagaaagccacggctaactacgtgccagcagccgcggtaatacgtaggtggcaagcgttatccggatttattgggcgtaaagcgagcgcaggcggttttttaagtctgatgtgaaagccctcggcttaaccgaggaagcgcatcggaaactgggaaacttgagtgcagaagaggacagtggaactccatgtgtagcggtgaaatgcgtagatatatggaagaacaccagtggcgaaggcggctgtctggtctgtaactgacgctgagctcgaaagcatgggtagcgaacaggattagataccctggtagtccatgccgtaaacgatgaatgctaggtgttggagggtttccgcccttcagtgccgcagctaacgcattaagcattccgcctggggagtacgaccgcaaggttgaaactcaaaggaattgacgggggcccgcacaagcggtggagcatgtggtttaattcgaagcaacgcgaagaaccttaccaggtcttgacgtcttttgatcacctgagagatcaggtttccccttcgggggcaaaatgacaggtggtgcatggttgtcgtcagctcgtgtcgtgagatgttgggttaagtcccgcaacgagcgcaacccttatgactagttgccagcattcagttgggcactctagtaagactgccggtgacaaaccggaggaaggtggggatgacgtcaaatcatcatgccccttatgacctgggctacacacgtgctacaatggatggtacaacgagttgcgagaccgcgaggtcaagctaatctcttaaagccattctcagttcggactgtaggctgcaactcgcctacacgaagtcggaatcgctagtaatcgcggatcagcacgccgcggtgaatacgttcccgggccttgtacacaccgcccgtcacaccatgagagtttgtaacacccgaagccggtggcgtaacccttttagggagc

SEQ ID NO: 1144 - DNA, 1485 bp, Lactococcus garvieae
aacgctggcggcgtgcctaatacatgcaagtcgagcgatgattaaagatagcttgctatttttatgaagagcggcgaacgggtgagtaacgcgtgggaaatctgccgagtagcgggggacaacgtttggaaacgaacgctaataccgcataacaatgagaatcgcatgattcttatttaaaagaagcaattgcttcactacttgatgatcccgcgttgtattagctagttggtagtgtaaaggactaccaaggcgatgatacatagccgacctgagagggtgatcggccacactgggactgagacacggcccagactcctacgggaggcagcagtagggaatcttcggcaatgggggcaaccctgaccgagcaacgccgcgtgagtgaagaaggttttcggatcgtaaaactctgttgttagagaagaacgttaagtagagtggaaaattacttaagtgacggtatctaaccagaaagggacggctaactacgtgccagcagccgcggtaatacgtaggtcccaagcgttgtccggatttattgggcgtaaagcgagcgcaggtggtttcttaagtctgatgtaaaaggcagtggctcaaccattgtgtgcattggaaactgggagacttgagtgcaggagaggagagtggaattccatgtgtagcggtgaaatgcgtagatatatggaggaacaccggaggcgaaagcggctctctggcctgtaactgacactgaggctcgaaagcgtggggagcaaacaggattagataccctggtagtccacgccgtaaacgatgagtgctagctgtagggagctataagttctctgtagcgcagctaacgcattaagcactccgcctggggagtacgaccgcaaggttgaaactcaaaggaattgacgggggcccgcacaagcggtggagcatgtggtttaattcgaagcaacgcgaagaaccttaccaggtcttgacatactcgtgctatccttagagataaggagttccttcgggacacgggatacaggtggtgcatggttgtcgtcagctcgtgtcgtgagatgttgggttaagtcccgcaacgagcgcaacccttattactagttgccatcattaagttgggcactctagtgagactgccggtgataaaccggaggaaggtggggatgacgtcaaatcatcatgccccttatgacctgggctacacacgtgctacaatggatggtacaacgagtcgccaacccgcgagggtgcgctaatctcttaaaaccattctcagttcggattgcaggctgcaactcgcctgcatgaagtcggaatcgctagtaatcgcggatcagcacgccgcggtgaatacgttcccgggccttgtacacaccgcccgtcacaccacggaagttgggagtacccaaagtaggttgcctaaccgcaaggagggcgcttcctaaggtaagaccgatgactggggtgaagtcgtaacaaggtagc

SEQ ID NO: 1145 - DNA, 1554 bp, Lactococcus lactis
ctttatttgagagtttgatcctggctcaggacgaacgctggcggcgtgcctaatacatgcaagttgagcgctgaaggttggtacttgtaccgactggatgagcagcgaacgggtgagtaacgcgtggggaatctgcctttgagcgggggacaacatttggaaacgaatgctaataccgcataaaaactttaaacacaagttttaagtttgaaagatgcaattgcatcactcaaagatgatcccgcgttgtattagctagttggtgaggtaaaggctcaccaaggcgatgatacatagccgacctgagagggtgatcggccacattgggactgagacacggcccaaactcctacgggaggcagcagtagggaatcttcggcaatggacgaaagtctgaccgagcaacgccgcgtgagtgaagaaggttttcggatcgtaaaactctgttggtagagaagaacgttggtgagagtggaaagctcatcaagtgacggtaactacccagaaagggacggctaactacgtgccagcagccgcggtaatacgtaggtcccgagcgttgtccggatttattgggcgtaaagcgagcgcaggtggtttattaagtctggtgtaaaaggcagtggctcaaccattgtatgcattggaaactggtagacttgagtgcaggagaggagagtggaattccatgtgtagcggtgaaatgcgtagatatatggaggaacaccggtggcgaaagcggctctctggcctgtaactgacactgaggctcgaaagcgtggggagcaaacaggattagataccctggtagtccacgccgtaaacgatgagtgctagatgtagggagctataagttctctgtatcgcagctaacgcaataagcactccgcctggggagtacgaccgcaaggttgaaactcaaaggaattgacgggggcccgcacaagcggtggagcatgtggtttaattcgaagcaacgcgaagaaccttaccaggtcttgacatactcgtgctattcctagagataggaagttccttcgggacacgggatacaggtggtgcatggttgtcgtcagctcgtgtcgtgagatgttgggttaagtcccgcaacgagcgcaacccctattgttagttgccatcattaagttgggcactctaacgagactgccggtgataaaccggaggaaggtggggatgacgtcaaatcatcatgccccttatgacctgggctacacacgtgctacaatggatggtacaacgagtcgcgagacagtgatgtttagctaatctcttaaaaccattctcagttcggattgtaggctgcaactcgcctacatgaagtcggaatcgctagtaatcgcggatcagcacgccgcggtgaatacgttcccgggccttgtacacaccgcccgtcacaccacgggagttgggagtacccgaagtaggttgcctaaccgcaaggagggcgcttcctaaggtaagaccgatgactggggtgaagtcgtaacaaggtagccgtatcggaaggtgcggctggatcacctcctttctaag

SEQ ID NO: 1146 - DNA, 1440 bp, Lactococcus raffinolactis
agttgaacgcttgattttcaccgaagcttgcttcaccgaaaatcaagagtagcgaacgggtgagtaacgcgtgggtaacctacctatcagcgggggataactattggaaacgatagctaataccgcataacaatgttggatgcatattcgacatttgaaagtaccaaatggtacactgagagatggacccgcgttgtattagctagttggtagtgtaatggactaccaaggcgatgatacatagccgacctgagagggtgatcggccacattgggactgagacacggcccaaactcctacgggaggcagcagtagggaatcttcggcaatggacgaaagtctgaccgagcaacgccgcgtgagtgaagaaggttttcggatcgtaaaactctgttgttagagaagaacgttgcatagagtggaaaattatgcaagtgacggtatctaaccagaaagggacggctaactacgtgccagcagccgcggtaatacgtaggtcccgagcgttgtccggatttattgggcgtaaagcgagcgcaggtggtttaataagtctgatgtaaaaggcagtggctcaaccattgtgtgcattggaaactgttagacttgagtgcagtagaggagagtggaattccatgtgtagcggtgaaatgcgtagatatatggaggaacaccggtggcgaaagcggctctctggactgtcactgacactgaggctcgaaagcgtgggtagcaaacaggattagataccctggtagtccacgccgtaaacgatgagtgctagttgtttggggctatccagccctaagtgacgcagcaaacgcattaagcactccgcctggggagtacgaccgcaaggttgaaactcaaaggaattgacgggggcccgcacaagcggtggagcatgtggtttaattcgaagcaacgcgaagaaccttaccaggtcttgacatactcgtgctattcctagagataggaagttccttcgggacacgggatacaggtggtgcatggttgtcgtcagctcgtgtcgtgagatgttgggttaagtcccgcaacgagcgcaacccctattgttagttgccatcattaagttgggcactctagcgagactgccggtaataaaccggaggaaggtggggatgacgtcaaatcatcatgccccttatgacctgggctacacacgtgctacaatggttggtacaacgagtcgcaaggcagtgatgtcaagctaatctcttaaagccaatctcagttcggattgtaggctgcaactcgcctacatgaagtcggaatcgctagtaatcgcggatcagcacgccgcggtgaatacgttcccgggccttgtacacaccgcccgtcacaccacgagagtttgtaatacccaaagccggtgagctaaccttttaggaggcagccgtctaaggtaggatagatgat

SEQ ID NO: 1147 - DNA, 1281 bp, Lactonifactor longoviformis
gagtttgattatggctcaggatgaacgctggcggcgtgcttaacacatgcaagtcgaacgagtggcggacgggtgagtaacgcgtggataacctgcctcatacagggggataacagttagaaatgactgctaataccgcataagaaaaggcggtatgagatggatccgcgtttgattagctagttggtggggtaaaggcctaccaaggcgacgatcaatagccgacctgagagggtgaccggccacattgggactgagacacggcccaaactcctacgggaggcagcagtggggaatattgcacaatgggggaaaccctgatgcagcgacgccgcgtgaaggaagaagtatttcggtatgtaaacttctatcagcagggaagatgacggtacctgactaagaagccccggctaattacgtgccagcagccgcggtaatacgtaaggggcaagcgttatccggatttactgggtgtaaagggagcgtagacggcagtgcaagtctgatgtgaaagcccggggctcaaccccgggactgcattggaaactgtgcagctagagtgtcggagaggtaagtggaattcctagtgtagcggtgaaatgcgtagatattaggaggaacaccagtggcgaaggcggcttactggacgaactgacgttgaggctcgaaagcgtggggagcaaacaggattagataccctggtagtccacgccgtaaacgatgaatactaggtgtcgggcgttcggtgccgcagcaaacgcaataagtattccacctggggagtacgttcgcaagaatgaaactcaaaggaattgacggggacccgcacaagcggtggagcatgtggtttaattcgaagcaacgcgaagaaccttaccaagtcttgacatcgacaggtggtgcatggttgtcgtcagctcgtgtcgtgagatgttgggttaagtcccgcaacgagcgcaacccttatccttagtagccagcagctgggcactctagggagactgccagggacaacctggaggaaggtggggatgacgtcaaatcatcatgccccttatgatttgggctacacacgtgctacaatggcgtacaaagggaagcgaaggggtgacctgaagcaaatcccaaaacgtctcagttcggatgtagtctgcaactcgactacagaagctggaatcgctagtaatcgcgaatcagaatgtcgcggtgaatacgttcccgggtcttgtacacaccgcccgtcacaccatgggagtcggatatgcccgaagccggtaccga

SEQ ID NO: 1148 - DNA, 1544 bp, Laribacter hongkongensis
tgaacgaaagagtttgatcctggctcagattgaacgctggcggcatgctttacacatgcaagtcgaacggtaacagggacttcggtctgctgacgagtggcgaacgggtgagtaatgcatcggaacgtaccgagtaatgggggataacgcatcgaaaggtgtgctaataccgcatacgccctgagggggaaagcgggggatcgaaagacctcgcgttattcgagcggccgatgccggattagctagttggtggggtaaaggctcaccaaggcgacgatccgtagcaggtctgagaggatgatctgccacactgggactgagacacggcccagactcctacgggaggcagcagtggggaattttggacaatgggggcaaccctgatccagccatgccgcgtgtctgaagaaggccttcgggttgtaaaggacttttgtcagggaggaaatccttaaggctaatacccttgggggatgacagtacctgaagaataagcaccggctaactacgtgccagcagccgcggtaatacgtagggtgcaagcgttaatcggaattactgggcgtaaagcgtgcgcaggcggtttgaaaagtcagctgtgaaagccccgggctcaacctgggaactgcggttgaaactctcaagctagagtgcgtcagaggggggtggaattccacgtgtagcagtgaaatgcgtagagatgtggaggaacaccaatggcgaaggcagccccctgggatgacactgacgctcatgcacgaaagcgtggggagcaaacaggattagataacctggtagtccacgccctaaacgatgtcgactagccgttggagatttcggtttctggtggcgcagctaacgcgtgaagtcgaccgcctggggagtacggtcgcaagattaaaactcaaaggaattgacgggggcccgcacaagcggtggatgatgtggattaattcgatgcaacgcgaaaaaccttacctggtcttgacatgtaccgaacctcgaagagatttgagggtgcccgaaagggagcggtaacacaggtgctgcatggctgtcgtcagctcgtgtcgtgagatgttgggttaagtcccgcaacgagcgcaacccttgtcattagttgccagcattaagttgggcactctaatgagactgccggtgacaaaccggaggaaggtggggatgacgtcaagtcctcatggcccttatgaccagggcttcacacgtcatacaatggtcggtacagagggtcgctaagccgcgaggtagtgccaatctcataaaaccgatcgtagtccggatcgcagtctgcaactcgactgcgtgaagtcggaatcgctagtaatcgcggatcagcatgtcgcggtgaatacgttcccgggccttgtacacaccgcccgtcacaccatgggagtggaatccgccagaagtgggtagggtaaccgtaaggagcccgcttaccacggtaggtttcatgactggggtgaagtcgtaacaaggtagccgtaggggaacctgcggctggatcacctcctttctagaga

SEQ ID NO: 1149 - DNA, 1534 bp, Lautropia mirabilis
ttgaactgaagagtttgatcctggctcagattgaacgctggcggcatgctttacacatgcaagtcgaacggcagcgcgggcttcggcctggcggcgagtggcgaacgggtgagtaatacatcggaacgtgcccagtagtgggggatagctcggcgaaagccggattaataccgcatacgacctgagggtgaaagcgggggatcttcggacctcgcgctattggagcggccgatggcagattagctagttggtggggtaaaggcctaccaaggcgacgatctgtagctggtctgagaggacgaccagccacactgggactgagacacggcccagactcctacgggaggcagcagtggggaattttggacaatgggcgaaagcctgatccagcaatgccgcgtgtgtgatgaaggccttcgggttgtaaagcacttttggcgggaacgaaaaggactgtgccaataccacggttcgatgacggtacccgcagaataagcaccggctaactacgtgccagcagccgcggtaatacgtagggtgcaagcgttaatcggaattactgggcgtaaagagtgcgcaggcggttttgcaagaccgatgtgaaatccccgggcttaacctgggaactgcattggtgactgcaaggctagagtgtgtcagagggaggtggaattccgcatgtagcagtgaaatgcgtagatatgcggaggaacaccgatggcgaaggcagcctcctgggataacactgacgctcatgcacgaaagcgtggggagcaaacaggattagataccctggtagtccacgccctaaacgatgtctactagttgtcggggattaatttccttggtaacgcagctaacgcgtgaagtagaccgcctggggagtacggtcgcaagattaaaactcaaaggaattgacggggacccgcacaagcggtggatgatgtggattaattcgatgcaacgcgaaaaaccttacctacgcttgacatgtccggaaccctgaagagatttgggggtgctcgaaagagagccggaacacaggtgctgcatggctgtcgtcagctcgtgtcgtgagatgttgggttaagtcccgcaacgagcgcaacccttatcattagttgctacgcaagggcactctaatgagactgccggtgacaaaccggaggaaggtggggatgacgtcaagtcctcatggcccttatgtgtagggcttcacacgtcatacaatggtcggtacagagggttgcgaagccgcgaggtggagccaatcccaaaaaaccgatcgtagtccggattgcagtctgcaactcgactgcatgaagtcggaatcgctagtaatcgcggatcagcatgccgcggtgaatacgttcccgggtcttgtacacaccgcccgtcacaccatgggagtgggttttaccagaagtaggtagcttaaccgcaaggagggcgcttaccacggtagggctcatgactggggtgaagtcgtaacaaggtagccgtaccggaaggtgcggctggatcacctcctttc

SEQ ID NO: 1150 - DNA, 1491 bp, Lautropia sp.
  oral clone AP009
agagtttgattatggctcagattgaacgctggcggcatgctttacacatgcaagtcgaacggcagcgcgggcttcggcctggcggcgagtggcgaacgggtgagtaatacatcggaacgtgcccagtagtgggggatagctcggcgaaagccggattaataccgcatacgacctgagggtgaaagcgggggatcttcggacctcgcgctattggagcggccgatggcagattagctggttggtggggtaaaggcctaccaaggcgacgatctgtagctggtctgagaggacgaccagccacactgggactgagacacggcccagactcctacgggaggcagcagtggggaattttggacaatgggcgcaagcctgatccagcaatgccgcgtgtgtgatgaaggccttcgggttgtaaagcacttttggcgggaacgaaaaggactgtgccaataccacggttcgatgacggtacccgcagaataagcaccggctaactacgtgccagcagccgcggtaatacgtagggtgcgagcgttaatcggaattactgggcgtaaagagtgcgcaggcggttttgcaagaccgatgtgaaatccccgggcttaacctgggaactgcattggtgactgcaaggctagagtgtgtcagagggaggtggaactccgcatgtagcagtgaaatgcgtagatatgcggaagaacaccgatggcgaaggcagcctcctgggataacactgacgctcatgcacgaaagcgtggggagcaaacaggattagataccctggtagtccacgccctaaacgatgtctactagttgtcggggattaatttccttggtaacgcagctaacgcgtgaagtagaccgcctggggagtacggtcgcaagattaaaactcaaaggaattgacggggacccgcacaagcggtggatgatgtggattaattcgatgcaacgcgaaaaaccttacctacgcttgacatgtccggaaccttggagagattcgagggtgcccgaaagggaaccggaacacaggtgctgcatggctgtcgtcagctcgtgtcgtgagatgttgggttaagtcccgcaacgagcgcaacccttatcattagttgctacgcaagggcactctaatgagactgccggtgacaaacckgagkaaggtggggatgacgtcaagtcctcatggcccttatgtgtagggcttcacacgtcatacaatggtcggtacagagggttgccaagccgcgaggtggagccaatcccacaaaaccgatcgtagtccggattgcagtctgcaactcgactgcatgaagtcggaatcgctagtaatcgcggwtcagcatgccgcggtgaatacgttcccgggtcttgtacacaccgcccgtcacaccatgggagtgggttttaccagaagtaggtagcttaaccgcaaggggggcgcttaccacggtagggctcatgactggggtgaagtcgtaacaaggtaac

SEQ ID NO: 1151 - DNA, 1467 bp, Legionella hackeliae
  modified_base (8)..(8): a, c, t, g, unknown or other
  modified_base (23)..(24): a, c, t, g, unknown or other
  modified_base (31)..(31): a, c, t, g, unknown or other
  modified_base (42)..(42): a, c, t, g, unknown or other
  modified_base (70)..(71): a, c, t, g, unknown or other
  modified_base (74)..(74): a, c, t, g, unknown or other
  modified_base (82)..(82): a, c, t, g, unknown or other
  modified_base (112)..(112): a, c, t, g, unknown or other
  modified_base (149)..(149): a, c, t, g, unknown or other
  modified_base (158)..(158): a, c, t, g, unknown or other
  modified_base (164)..(164): a, c, t, g, unknown or other
  modified_base (174)..(174): a, c, t, g, unknown or other
  modified_base (210)..(210): a, c, t, g, unknown or other
  modified_base (216)..(216): a, c, t, g, unknown or other
  modified_base (243)..(243): a, c, t, g, unknown or other
  modified_base (359)..(359): a, c, t, g, unknown or other
  modified_base (414)..(414): a, c, t, g, unknown or other
  modified_base (420)..(420): a, c, t, g, unknown or other
  modified_base (447)..(447): a, c, t, g, unknown or other
  modified_base (466)..(466): a, c, t, g, unknown or other
  modified_base (471)..(471): a, c, t, g, unknown or other
  modified_base (502)..(502): a, c, t, g, unknown or other
  modified_base (525)..(525): a, c, t, g, unknown or other
  modified_base (546)..(546): a, c, t, g, unknown or other
  modified_base (565)..(565): a, c, t, g, unknown or other
  modified_base (583)..(584): a, c, t, g, unknown or other
  modified_base (592)..(592): a, c, t, g, unknown or other
  modified_base (596)..(596): a, c, t, g, unknown or other
  modified_base (613)..(613): a, c, t, g, unknown or other
  modified_base (625)..(625): a, c, t, g, unknown or other
  modified_base (629)..(629): a, c, t, g, unknown or other
  modified_base (632)..(632): a, c, t, g, unknown or other
  modified_base (646)..(646): a, c, t, g, unknown or other
  modified_base (686)..(686): a, c, t, g, unknown or other
  modified_base (734)..(734): a, c, t, g, unknown or other
  modified_base (739)..(739): a, c, t, g, unknown or other
  modified_base (833)..(833): a, c, t, g, unknown or other
  modified_base (879)..(879): a, c, t, g, unknown or other
  modified_base (938)..(938): a, c, t, g, unknown or other
  modified_base (950)..(952): a, c, t, g, unknown or other
  modified_base (961)..(961): a, c, t, g, unknown or other
  modified_base (976)..(976): a, c, t, g, unknown or other
  modified_base (986)..(986): a, c, t, g, unknown or other
  modified_base (1085)..(1085): a, c, t, g, unknown or other
  modified_base (1110)..(1110): a, c, t, g, unknown or other
  modified_base (1205)..(1205): a, c, t, g, unknown or other
  modified_base (1268)..(1268): a, c, t, g, unknown or other
  modified_base (1280)..(1280): a, c, t, g, unknown or other
  modified_base (1288)..(1288): a, c, t, g, unknown or other
  modified_base (1294)..(1294): a, c, t, g, unknown or other
  modified_base (1344)..(1344): a, c, t, g, unknown or other
agagtttnatcctggctcagatnnaacgctngcggcatgctnaacacatgcaagtcgaacggcagcatgnnctngctggctnggaagatggcgagtggcgaacgggtgagtnacgcgtaggaatrtgccttaaagagggggacaacctngggaaactnaggctnataccgcatnatttctgaggaaaaaagctggggaccgcaaggcctngcgctnaaagattagcctgcgtccgattagctngttggtggggtaagggcctaccaaggcgacgatcggtagctggtctgagaggatgatcagccacactgggactgagacacggcccagactcctacgggaggcagcagtggggaatnttggacaatggggggaaccctratccagcaatgccgcgtgtgtgaagaaggcctnagggtngtaaagcactttcagtggggaggaganraggttaggttaagagctngactnaaggacgcacccacagaagaagcaccggctnactccgtgccagcagccgcggtnatacggagggtgcaagcgttnatcggaattactgggcgtnaagggtgcgtaggtggtnnaataagtnagtngtgaaatccctrggctnaacctgggaatngcanctnagactgttagactngagtataggagagggtagtggaatttccggtgtagcggtnaaatgcgtagagatcggaaggaacaccagtggcgaaggcggctacctngcctnatactgacactgaggcacgaaagcgtggggagcaaacaggattagataccctggtagtccacgctgtaaacgatgtcaactagctrttggtctnataaatgagattagtggcgcagcaaacgcgataagttgaccgcctngggagtacggtcgcaagatyaaaactcaaaggaattgacgggggcccgcacaagcggtngagcatgtggtnnnattcgatgnaacgcgaagaacctnacctaccctngacatacagtgaatgatgcagagatgcatyagtgccttcgggaacactgatacaggtgctgcatggctgtcgtcagctcgtgtcgtgagatgttgggtnaagtcccgtaacgagcgcaaccctngtccttagttgccagcgcgtagaggcgggaactctagggagactgccggtgacaaaccggaggaaggcggggatgacgtcaagtcatcatrgccnttacgggtagggctacacacgtgctacaatggccggtacagagggaagcgaaggggcgacctngagcaaatcctnaaaagctngtcgtngtccggattggagtctgcaactcgactccatgaagtcggaatcgctagtnatcgcgaatcagcatgtcgcggtgaatacgttcccgggccttgtacacaccgcccgtcacaccatgggagtgggttgcaccagaagtagatagtctaaccttcggggggacgtrtaccacggt

SEQ ID NO: 1152 - DNA, 1473 bp, Legionella longbeachae
  modified_base (13)..(14): a, c, t, g, unknown or other
  modified_base (29)..(30): a, c, t, g, unknown or other
  modified_base (37)..(37): a, c, t, g, unknown or other
  modified_base (48)..(48): a, c, t, g, unknown or other
  modified_base (84)..(84): a, c, t, g, unknown or other
  modified_base (88)..(88): a, c, t, g, unknown or other
  modified_base (92)..(92): a, c, t, g, unknown or other
  modified_base (137)..(137): a, c, t, g, unknown or other
  modified_base (164)..(164): a, c, t, g, unknown or other
  modified_base (170)..(170): a, c, t, g, unknown or other
  modified_base (177)..(177): a, c, t, g, unknown or other
  modified_base (216)..(216): a, c, t, g, unknown or other
  modified_base (222)..(222): a, c, t, g, unknown or other
  modified_base (236)..(236): a, c, t, g, unknown or other
  modified_base (249)..(249): a, c, t, g, unknown or other
  modified_base (365)..(365): a, c, t, g, unknown or other
  modified_base (420)..(420): a, c, t, g, unknown or other
  modified_base (464)..(464): a, c, t, g, unknown or other
  modified_base (471)..(471): a, c, t, g, unknown or other
  modified_base (478)..(479): a, c, t, g, unknown or other
  modified_base (508)..(508): a, c, t, g, unknown or other
  modified_base (552)..(552): a, c, t, g, unknown or other
  modified_base (571)..(571): a, c, t, g, unknown or other
  modified_base (590)..(590): a, c, t, g, unknown or other
  modified_base (598)..(598): a, c, t, g, unknown or other
  modified_base (619)..(619): a, c, t, g, unknown or other
  modified_base (740)..(740): a, c, t, g, unknown or other
  modified_base (745)..(745): a, c, t, g, unknown or other
  modified_base (765)..(765): a, c, t, g, unknown or other
  modified_base (846)..(846): a, c, t, g, unknown or other
  modified_base (885)..(885): a, c, t, g, unknown or other
  modified_base (906)..(906): a, c, t, g, unknown or other
  modified_base (944)..(944): a, c, t, g, unknown or other
  modified_base (956)..(958): a, c, t, g, unknown or other
  modified_base (982)..(982): a, c, t, g, unknown or other
  modified_base (992)..(992): a, c, t, g, unknown or other
  modified_base (1091)..(1091): a, c, t, g, unknown or other
  modified_base (1116)..(1116): a, c, t, g, unknown or other
  modified_base (1211)..(1211): a, c, t, g, unknown or other
  modified_base (1274)..(1274): a, c, t, g, unknown or other
  modified_base (1300)..(1300): a, c, t, g, unknown or other
  modified_base (1374)..(1374): a, c, t, g, unknown or other
aactgaagagttnnatcctggctcagatnnaacgctngcggcatgctnaacacatgcaagtcgaacggcagcatgacctagctngctnggtngatggcgagtgccgaacgggtgagtaacgcgtaggaatrtgcctnaaagactgggataacttggggaaactnaagctnataccgnatgatgtctgaggacgaaagctggggaccttcgggcctngcgctnaaagattagcctgngtccgatyagctngttggtggggtaagggcctaccaaggcgacgatcggtagctggtctgagaggatgaccagccacactggaactgagacacggtccaggctcctacgggaggcagcagtggggaatnttggacaatgggggcaaccctratccagcaatgccgcgtgtgtgaagaaggcctnagggtygtaaagcactttcagtggggaggagggtygataggtgnagagctnatggatnngacgttacccacagaagaagcaccggctnactccgtgccagcagccgcggtaatacggagggtgctagcgttnatcggaattactgggcgtnaagcgtgcgtaggtggttnattaagtnatctgtgaaatccctrggctnaacctgggcaggtcagatgatactggttgactcgagtatgggagagggtagtggaatttccggtgtagcggtgaaatgcgtagagatcggaaggaacaccagtggcgaaggcggctacctngcctnatactgacactgaggcacgnaagcgtggggagcaaacaggattagataccctggtagtccacgccgtaaacgatgtcaactagctrttggatatatgaatntrtttagtggcgcagcaaacgcgataagtwgaccgcctngggagtacggtcgcaagayynaaactcaaaggaattgacgggggcccgcacaagcggtngagcatgtggtnnnattcgatgcaacgcgaagaacctnacctaccctngacatacagtgaatgatgcagagatgcatyagtgccttcgggaacactgatacaggtgctgcatggctgtcgtcagctcgtgtcgtgagatgttgggtnaagtcccgtaacgagcgcaaccctngtccttagttgccagcacgtaaaggtgggaactctaaggagactgccggtgacaaaccggaggaaggcggggatgacgtcaagtcatcatrgccnttacgggtagggctacacacgtgctacaatggacgatacagagggaagcgaaggggtgacctngagccaatcttagaaagtygttcgtngtccggattggagtctgcaactcgactccatgaagtcggaatcgctagtaatcgcgaatcagcatgtcgcggtnaatacgttcccgggccttgtacacaccgcccgtcacaccatgggagtgggctgcaccagaagtagatagtctaaccttcggggggacgtgtaccacggt

SEQ ID NO: 1153 - DNA, 1546 bp, Legionella pneumophila
tgaactgaagagtttgatcctggctcagattgaacgctggcggcatgcttaacacatgcaagtcgaacggcagcattgtctagcttgctagacagatggcgagtggcgaacgggtgagtaacgcgtaggaatatgccttgaagagggggacaacttggggaaactcaagctaataccgcataatgtctgaggacgaaagctggggaccttcgggcctggcgctttaagattagcctgcgtccgattagctagttggtggggtaagggcctaccaaggcgacgatcggtagctggtctgagaggatgaccagccacactggaactgagacacggtccagactcctacgggaggcagcagtggggaatattggacaatgggggcaaccctgatccagcaatgccgcgtgtgtgaagaaggcctgagggttgtaaagcactttcagtggggaggagggttgataggttaagagctgattaactggacgttacccacagaagaagcaccggctaactccgtgccagcagccgcggtaatacggagggtgcgagcgttaatcggaattactgggggtaaagggtgcgtaggtggttgattaagttatctgtgaaattcctgggcttaacctgggacggtcagataatactggttgactcgagtatgggagagggtagtggaatttccggtgtagcggtgaattgcgtagagatcggaaggaacaccagtggcgaaggcggctacctggcctaatactgacactgaggcacgaaagcgtggggagcaaacaggattagataccctggtagtccacgctgtaaacgatgtcaactagctgttggttatatgaaaataattagtggcgcagcaaacgcgataagttgaccgcctggggagtacggtcgcaagattaaaactcaaaggaattgacgggggcccgcacaagcggtggagcatgtggtttaattcgatgcaacgcgaagaaccttacctacccttgacatacagtgaattttgcagagatgcattagtgccttcgggaacactgatacaggtgctgcatggctgtcgtcagctcgtgtcgtgagatgttgggttaagtcccgtaacgagcgcaacccttatccttagttgccagcatgtgatggtggggactctaaggagactgccggtgacaaaccggaggaaggcggggatgacgtcaagtcatcatggcccttacgggtagggctacacacgtgctacaatggccgatacagagggcggcgaaggggcgacctggagcaaatccttaaaagtcggtcgtagtccggattggagtctgcaactcgactccatgaagtcggaatcgctagtaatcgcgaatcagcatgtcgcggtgaatacgttcccgggccttgtacacaccgcccgtcacaccatgggagtgggttgcaccagaagtagatagtctaaccttcggggggacgtttaccacggtgtggttcatgactggggtgaagtcgtaacaaggtagccgtaggggaacctgcggctggatcacctccttac

SEQ ID NO: 1154 - DNA, 1362 bp, Legionella sp.
  D3923
catgcttaacacatgcaagtcgaacggcagcacggtctagcttgctagatgggtggcgagtggcgaacgggtgagtaacgcgtaggaatatgccttaaagtttgggataacatggggaaactcatgctaataccggatgagctctgaggaggaaagctggggaccgtaaggcctggcgctttaagattagcctgcgtccgattagctagttggtggggtaagggcctaccaaggcgacgatcggtagctggtctgagaggatgaccagccacactgggactgagacacggcccagactcctacgggaggcagcagtggggaatattggacaatgggggcaaccctgatccagcaatgccgcgtgtgtgaagaaggcctgagggttgtaaagcactttcagtggggaggaggattgattggttaagagctgattgattggacgttacccacagaagaagcaccggctaactccgtgccagcagccgcggtaatacggagggtgcgagcgttaatcggaattactgggcgtaaagggtgcgtaggtggttgtataagttagctgtgaaatccccgggctcaacctgggcaggtcagctaagactgtatgactcgagtataggagagggtagtggaatttccggtgtagcggtgaaatgcgtagagatcggaaggaacaccagtggcgaaggcggctacctggcctaatactgacactgaggcacgaaagcgtggggagcaaacaggattagataccctggtagtccacgctgtaaacgatgtcaactagttgttggccttatgaatgaggttagtgacgcagcaaacgcgataagttgaccgcctggggagtacggtcgcaagattaaaactcaaaggaattgacgggggcccgcacaagcggtggagcatgtggtttaattcgatgcaacgcgaagaaccttacctacccttgacatacagtgaactttgcagagatgcattggtgccttcgggagcactgatacaggtgctgcatggctgtcgtcagctcgtgtcgtgagatgttgggttaagtcccgtaacgagcgcaacccttatccttagttgccagcgcgtgatggtgggaactctaaggagactgccggtgacaaaccggaggaaggcggggatgacgtcaagtcatcatggcccttacgggtagggctacacacgtgctacaatggccggtacagagggcagcgaaggggcgacctggagcaaatcttgtaaagctggtcgtagtccggattggagtctgcaactcgactccatgaagtcggaatcgctagtaatcgcgaatcagcatgtcgcggtgaatacgttcccgggccttgtacacaccgc

SEQ ID NO: 1155 - DNA, 1203 bp, Legionella sp.
  D4088
catgcttaacacatgcaagtcgaacgagtggcgaacgggtgagtaatgcgtaggaatatgccttgaagagggggataacccggggaaactcgggctaataccgcataatgaaaggcgctttaagattagcctacgtccgattagctagttggtggggtaagggcctaccaaggctgtgatcggtagctggtctgagaggatggacagccacactgggactgagacacggcccagactcctacgggaggcagcagtggggaatattggacaatggggggaaccctgatccagcaatgccgcgtgtgtgaagaaggcctgagggttgtaaagcactatcggtggggaggatgacgttacccacagaagaagcaccggctaactccgtgccagcagccgcggtaatacggagggtgcgagcgttaatcggaattactgggcgtaaagggtgcgtaggtggttttttaagttatctgtgaaattcctgggcttaacctgggctggtcagataagactggaagacttgagtatgggagagggcagtggaatttccggtgtagcggtgaaatgcgtagagatcggaaggaacaccagtggcgaaggcggctgcctggcctgactgacactgaggcacgaaagcgtgggtagcgaacaggattagataccctggtagtccacgctgtaaacgatgtcaactagctgttggctagttagtggcgcagcaaacgcgataagttgaccgcctggggagtacggtcgcaagactaaaactcaaaggaattgacgggggcccgcacaagcggtggagcatgtggtttaattcgatgcaacgcgaagaaccttacctacccttgacatatacaggtgctgcatggctgtcgtcagctcgtgtcgtgagatgttgggttaagtcccgtaacgagcgcaacccttattcctagttaccagcacgtggggactctagggagactgccggtgacaaaccggaggaaggcggggacgacgtcaagtcatcatggcccttacgggtagggctacacacgtgctacaatggacggcagagggcggcgaaggggcgacctggagcgaatccttactgttcgtagtccggatggagtctggaactcgactccagaagtcggaatcgctagtaatcgcgaatcagcatgtcgcggtgaatacgttcccgggccttgtacacaccgc

SEQ ID NO: 1156 - DNA, 1423 bp, Legionella sp.
  H63
aagtcgaacggcagcattttctagcttgctaggaagatggcgagtggcgaacgggtgagtaacgcgtaggaatatgccttaaagagggggataacatggggaaactcatgctaataccgcataatttcttaggaaaaaagctggggaccgtaaggcctggcgctttaagattagcctgcgtccgattagctagttggtggggtaagggcctaccaaggcgacgatcggtagctggtctgagaggatggccagccacactgggactgagacacggcccagactcctacgggaggcagcagtggggaatattggacaatggggggaaccctgatccagcaatgccgcgtgtgtgaagaaggcctgagggttgtaaagcactttcagtggggaggagtgattgataggttaagagctaattgattggacgttacccacagaagaagcaccggctaactccgtgccagcagccgcggtaatacggagggtgcaagcgttaatcggaattactgggcgtaaagggtgcgtaggtggtttggtaagttagttgtgaaatccctgggcttaacctgggaactgcaactaagactgtcagactcgagtataggagagggtagtggaatttccggtgtagcggtgaaatgcgtagagatcggaaggaacaccagtggcgaaggcggctacctggcctaatactgacactgaggcacgaaagcgtggggagcaaacaggattagataccctggtagtccacgctgtaaacgatgtcaactagctgttggtcttataaatgagattagtggcgcagcaaacgcgataagttgaccgcctggggagtacggtcgcaagattaaaactcaaaggaattgacgggggcccgcacaagcggtggagcatgtggtttaattcgatgcaacgcgaagaaccttacctacccttgacatacagtgaactttgcagagatgcattggtgccttcgggagcactgatacaggtgctgcatggctgtcgtcagctcgtgtcgtgagatgttgggttaagtcccgtaacgagcgcaacccttgtccttagttgccagcatgtaatggtggggactctaaggagactgccggtgacaaaccggaggaaggcggggatgacgtcaagtcatcatggcccttacgggtagggctacacacgtgctacaatggccggtacagagggcagcgaaggggtgacctggagcaaatcttttaaagctggtcgtagtccggattggagtctgcaactcgactccatgaagtcggaatcgctagtaatcgcgaatcagcatgtcgcggtgaatacgttcccgggccttgtacacaccgcccgtcacaccatgggagtgggttgcaccagaagtagatagtctaacctttggggggacgtttaccacggtgtgatt

SEQ ID NO: 1157 - DNA, 1508 bp, Legionella sp.
  NML 93L054
ggctcagattgaacgctggcggcatgcttaacacatgcaagtcgaacggcagcatggtccagcttgctggactgatggcgagtggcgaacgggtgagtaatgcgtaggaatatgccttgaagagggggataacccggggaaactcgggctaataccgcataatctcttaggaggaaagctggggaccttatggcctggcgctttaagattagcctacgtccgattagctagttggtggggtaagggcctaccaaggctgtgatcggtagctggtctgagaggatggacagccacactgggactgagacacggcccagactcctacgggaggcagcagtggggaatattggacaatggggggaaccctgatccagcaatgccgcgtgtgtgaagaaggcctgagggttgtaaagcactatcggtggggaggaagtttgattggttaagagctgattggattgacgttacccacagaagaagcaccggctaactccgtgccagcagccgcggtaatacggagggtgcgagcgttaatcggaattactgggcgtaaagggtgcgtaggtggttttttaagttatctgtgaaattcctgggcttaacctgggctggtcagataagactggaagacttgagtatgggagagggcagtggaatttccggtgtagcggtgaaatgcgtagagatcggaaggaacaccagtggcgaaggcggctgcctggcctgatactgacactgaggcacgaaagcgtgggtagcgaacaggattagataccctggtagtccacgctgtaaacgatgtcaactagctgttggctttatagataaagttagtggcgcagcaaacgcgataagttgaccgcctggggagtacggtcgcaagactaaaactcaaaggaattgacgggggcccgcacaagcggtggagcatgtggtttaattcgatgcaacgcgaagaaccttacctacccttgacatacagtggagcttgcagagatgcgagtgtgcctttgggaacactgatacaggtgctgcatggctgtcgtcagctcgtgtcgtgagatgttgggttaagtcccgtaacgagcgcaacccttattcctagttaccagcacgtgatggtggggactctagggagactgccggtgacaaaccggaggaaggcggggacgacgtcaagtcatcatggcccttacgggtagggctacacacgtgctacaatggacggtacagagggcggcgaaggggcgacctggagcgaatccttaaaagctgttcgtagtccggattggagtctggaactcgactccatgaagtcggaatcgctagtaatcgcgaatcagcatgtcgcggtgaatacgttcccgggccttgtacacaccgcccgtcacaccatgggagtgggctgcaccagaagtagatagtctaaccttcggggggacgtttaccacggtgtggttcatgactggggtgaagtcgtaacaaggtagccgtaggggaacctgcgg

SEQ ID NO: 1158 - DNA, 1362 bp, Legionella steelei
catgcttaacacatgcaagtcgaacggcagcatgatctagcttgctagattgatggcgagtggcgaacgggtgagtaacgcgtaggaatatgccttgaagtgggggacaacttggggaaactcaagctaataccgcataatgtctaaggacgaaagctggggaccttagggcctggcgctttaagattagcctgcgtccgattagctagttggtggggtaagggcctaccaaggcgacgatcggtagctggtctgagaggatgaccagccacactggaactgagacacggtccagactcctacgggaggcagcagtggggaatattggacaatgggggcaaccctgatccagcaatgccgcgtgtgtgaagaaggcctgagggttgtaaagcactttcagtagggaggaggattgctaggttaagagctaagtgattggacgttacctacagaagaagcaccggctaactccgtgccagcagccgcggtaatacggagggtgcaagcgttaatcggaattactgggcgtaaagcgtgcgtaggtggttaattaagttatctgtgaaatccctgggcttaacctgggcaggtcagatgatactggttgactcgagtatgggagagggtagtggaatttccggtgtagcggtgaaatgcgtagagatcggaaggaacaccagtggcgaaggcggctacctggcctaatactgacactgaggcacgaaagcgtggggagcaaacaggattagataccctggtagtccacgccgtaaacgatgtcaactagctgttggttatatgaaaataattagtggcgcagcaaacgcgataagttgaccgcctggggagtacggtcgcaagattaaaactcaaaggaattgacgggggcccgcacaagcggtggagcatgtggtttaattcgatgcaacgcgaagaaccttacctacccttgacatacagtgaattttgcagagatgcattagtgccttcgggaacactgatacaggtgctgcatggctgtcgtcagctcgtgtcgtgagatgttgggttaagtcccgtaacgagcgcaacccttgtccttagttgccagcacgtaatggtgggaactctaaggagactgccggtgacaaaccggaggaaggcggggacgacgtcaagtcatcatggcccttacgggtagggctacacacgtgctacaatgggtgatacagagggaagcgaaggggtgacctggagctaatcttagaaagtcgctcgtagtccggattggagtctgcaactcgactccatgaagtcggaatcgctagtaatcgcgaatcagcatgtcgcggtgaatacgttcccgggccttgtacacaccgc

SEQ ID NO: 1159 - DNA, 1482 bp, Leminorella grimontii
ggcggcaggcctaacacatgcaagtcgaacggcagcgggaagtagcttgctactttgccggcgagtggcggacgggtgagtaatgtctgggaaactgcccgatggagggggataactactggaaacggtagctaataccgcatgacgtcttcggaccaaagagggggaccttagggcctcttgccatcggatgtgcccagatgggattagctagtaggcggggtaatggcccacctaggcgacgatccctagctggtctgagaggatgaccagccacactgggactgagacacggcccagactcctacgggaggcagcagtggggaatattgcacaatgggggaaaccctgatgcagccatgccgcgtgtgtgaagaaggccttcgggttgtaaagcactttcagcgaggaggaaggggttgtatttaatacatgcaatcattgacgttactcgcagaagaagcaccggctaactccgtgccagcagccgcggtaatacggagggtgcaagcgttaatcggaattactgggcgtaaagcgcacgcaggcggttgattaagttagatgtgaaatccccgggcttaacctgggaactgcatttaaaactggtcagctagagtcttgtagaggggggtagaattccacgtgtagcggtgaaatgcgtagagatgtggaggaataccggtggcgaaggcggccccctggacaaagactgacgctcaggtgcgaaagcgtggggagcaaacaggattagataccctggtagtccacgctgtaaacgatgtcgatttggaggttgtgcccttgaggcgtggcttccggagctaacgcgttaaatcgaccgcctggggagtacggccgcaaggttaaaactcaaatgaattgacgggggcccgcacaagcggtggagcatgtggtttaattcgatgcaacgcgaagaaccttacctactcttgacatccagagaacttagcagagatgctttggtgccttcgggaactctgagacaggtgctgcatggctgtcgtcagctcgtgttgtgaaatgttgggttaagtcccgcaacgagcgcaacccttatcctttgttgccagcggttcggccgggaactcaaaggagactgccagtgataaactggaggaaggtggggatgacgtcaagtcatcatggcccttacgagtagggctacacacgtgctacaatggcgtatacaaagagaagcgacctcgcgagagcaagcggacctcataaagtacgtcgtagtccggattggagtctgcaactcgactccatgaagtcggaatcgctagtaatcgcggatcagaatgccgcggtgaatacgttcccgggccttgtacacaccgcccgtcacaccatgggagtgggttgcaaaagaagtaggtagcttaaccttcgggggggcgcttaccactttgtgatccatgactggggtgaagtcgtaacaaggtaaccgtaggggaa

SEQ ID NO: 1160 - DNA, 1516 bp, Leminorella richardii
attgaacgctggcggcaggcctaacacatgcaagtcgaacggtagcaggaagaagcttgcttctttgctgacgagtggcggacgggtgagtaatgtctgggaaactgcccgatggagggggataactactggaaacggtagctaataccgcataacgtcttcggaccaaagtgggggaccttcgggcctcacaccatcggatgtgcccagatgggattagctagtaggcggggtaatggcccaccctaggcgacgatccctagctggtctgagaggatgaccagccacactgggactgagacacggcccagactcctacgggaggcagcagtggggaatattgcacaatgggcgcaagcctgatgcagccatgccgcgtgtgtgaagaaggccttcgggttgtaaagcactttcagcgaggaggaagggtgtggagttaataacttcatgcattgacgttactcgcagaagaagcaccggctaactccgtgccagcagccgcggtaatacggagggtgcaagcgttaatcggaattactgggcgtaaagcgcacgcaggcggttgattaagtcagatgtgaaatccccgggctcaacctgggaactgcatttgaaactggtcagctagagtcttgtagaggggggtagaattccacgtgtagcggtgaaatgcgtagagatgtggaggaataccggtggcgaaggcggccccctggacaaagactgacgctcaggtgcgaaagcgtggggagcaaacaggattagataccctggtagtccacgctgtaaacgatgtcgacttggaggttgttcccttgaggagtggcttccggagctaacgcgttaagtcgaccgcctggggagtacggccgcaaggttaaaactcaaatgaattgacgggggcccgcacaagcggtggagcatgtggtttaattcgatgcaacgcgaagaaccttacctactcttgacatccagagaagtttgcagagatgcgaatgtgccttcgggaactctgagacaggtgctgcatggctgtcgtcagctcgtgttgtgaaatgttgggttaagtcccgcaacgagcgcaacccttatcctttgttgccagcggttcggccgggaactcaaaggagactgccagtgataaactggaggaaggtggggatgacgtcaagtcatcatggcccttacgagtagggctacacacgtgctacaatggcgtatacaaagagaagcgacctcgcgagagcaagcggacctcacaaagtacgtcgtagtccggattggagtctgcaactcgactccatgaagtcggaatcgctagtaatcgcggatcagaatgccgcggtgaatacgttcccgggccttgtacacaccgcccgtcacaccatgggagtgggatgcaaaagaagtaggtagcttaaccttcgggggggcgcttaccactttgtgtttcatgactggggtgaagtcgtaacaaggtaaccgtaggggaacctgcggttggatcacctcctta

SEQ ID NO: 1161 - DNA, 1511 bp, Leptospira borgpetersenii
aacacggagagtttgatcctggctcagaactaacgctggcggcgcgtcttaaacatgcaagtcaagcggagtagcaatactcagcggcgaacgggtgagtaacacgtgggtaatcttcctccgagtctgggataactttccgaaaggggagctaatactggatagtcccgagaggtcataggatttttcgggtaaagatttattgctcggagatgagcccgcgcccgattagctagttggtgaggtaatggctcaccaaggcgacgatcggtagccggcctgagagggtgttcggccacaatggaactgagacacggtccatactcctacgggaggcagcagttaagaatcttgctcaatggggggaaccctgaaagcagcgacgccgcgtgaacgatgaaaggtcttcggattgtaaagttcaataagcagggaaaaataagcagcgatgtgatgatggtacctgcctaaagcaccggctaactacgtgccagcagccgcggtaatacgtatggtgcaagcgttgttcggaatcattgggcgtaaagggtgcgtaggcggacatgtaagtcaggtgtgaaaactgcgggctcaactcgcagcctgcacttgaaactatgtgtctggagtttgggagaggcaagtggaattccaggtgtagcggtgaaatgcgtagatatctggaggaacaccagtggcgaaggcgacttgctggcctaaaactgacgctgaggcacgaaagcgtgggtagtgaacgggattagataccccggtaatccacgccctaaacgttgtctaccagttgttgggggttttaaccctcagtaacgaacctaacggattaagtagaccgcctggggactatgctcgcaagagtgaaactcaaaggaattgacgggggtccgcacaagcggtggagcatgtggtttaattcgatgatacgcgaaaaacctcacctaggcttgacatggagtggaatcatgtagagatacatgagccttcgggccgcttcacaggtgctgcatggttgtcgtcagctcgtgtcgtgagatgttgggttaagtcccgcaacgagcgcaaccctcaccttatgttgccatcattcagttgggcactcgtaaggaactgccggtgacaaaccggaggaaggcggggatgacgtcaaatcctcatggcctttatgtctagggcaacacacgtgctacaatggccggtacaaagagtagccaactcgcgagggggagctaatctcaaaaagccggtcccagttcggattggagtctgcaactcgactccatgaagtcggaatcgctagtaatcgcggatcagcatgccgcggtgaatacgttcccggaccttgtacacaccgcccgtcacaccacctgagtggggagcacccgaagtggtctttgccaaccgcaaggaagcagactactaaggtgaaactcgtgaagggggtgaagtcgtaacaaggtagccgtatcggaaggtgcggctggatcacctccttt

SEQ ID NO: 1162 - DNA, 1293 bp, Leptospira broomii
aactaacgctggcggcgcgtcttaaacatgcaagtcgagcgagcggcgaacgggtgagtaacacgtgggtaatcttcctccgagtctgggataactttccgaaaggaaagctaataccggatagttaaagttgcttggagatgagcccgcggccgattagctagttggtgaggtaatggctcaccaaggcgacgatcggtagccggcctgagagggtgtccggccacaatggaactgagacacggtccatactcctacgggaggcagcagttaagaatcttgctcaatgggggaaaccctgaagcagcgacgccgcgtgaacgaagaaggtcttcggattgtaaagttcattaagcagggaaaatgatggtacctgcctaaagcaccggctaactacgtgccagcagccgcggtaatacgtatggtgcaagcgttgttcggaatcattgggcgtaaagggtgcgtaggcggatttgtaagtcaggtgtgaaaactgcgggctcaacccgtggcctgcacttgaaactacaagtctggagtttgggagaggcaagtggaattccaggtgtagcggtgaaatgcgtagatatctggaggaacaccagtggcgaaggcgacttgctggctcaactgacgctgaggcacgaaagcgtgggtagtaaacgggattagataccccggtaatccacgccctaaacgttgtctaccagttgttggggcctcagtaacgaacctaacggattaagtagaccgcctggggactatgctcgcaagagtgaaactcaaaggaattgacgggggtccgcacaagcggtggagcatgtggtttaattcgatgatacgcgaaaaacctcacctgggcttgacatgcacaggtgctgcatggttgtcgtcagctcgtgtcgtgagatgttgggttaagtcccgcaacgagcgcaacccctatcgtatgttgctaccatgggcactcgtacgaaactgccggtgacaaaccggaggaaggcggggatgacgtcaaatcctcatggcctttatgtccagggccacacacgtgctacaatggccgacagagggtcgccaactcgcaagagggagctaatctctatcggtcccagttcggatggggtctgcaactcgaccccagaagtcggaatcgctagtaatcgcggatcagcatgccgcggtgaatacgttcccggaccttgtacacaccgcccgtcacaccacctgagtggggagcacccgaagtggtttgttagacagactactaaggtgaaactcgtaaagggggtg

SEQ ID NO: 1163 - DNA, 1508 bp, Leptospira interrogans
aacacggagagtttgatcctggctcagaactaacgctggcggcgcgtcttaaacatgcaagtcaagcggagtagcaatactcagcggcgaacgggtgagtaacacgtgggtaatcttcctctgagtctgggataactttccgaaagggaagctaatactggatggtcccgagagatcataagatttttcgggtaaagatttattgctcggagatgagcccgcgtccgattagctagttggtgaggtaaaggctcaccaaggcgacgatcggtagccggcctgagagggtgttcggccacaatggaatgagacacggtccatactcctacgggaggcagcagttaagaatcttgctcaatggggggaaccctgaagcagcgacgccgcgtgaacgatgaaggtcttcggattgtaaagttcagtaagcagggaaaaataagcagcaatgtgatgatggtacctgcctaaagcaccggctaactacgtgccagcagccgcggtaatacgtatggtgcaagcgttgttcggaatcattgggcgtaaagggtgcgtaggcggacatgtaagtcaggtgtgaaaactgcgggctcaactcgcagcctgcacttgaaactatgtgtctggagtttgggagaggcaagtggaattccaggtgtagcggtgaaatgcgtagatatctggaggaacaccagtggcgaaggcgacttgctggcctaaaactgacgctgaggcacgaaagcgtgggtagtgaacgggattagataccccggtaatccacgccctaaacgttgtctaccagttgttgggggttttaaccctcagtaacgaacctaacggattaagtagaccgcctggggactatgctcgcaagagtgaaactcaaaggaattgacgggggtccgcacaagcggtggagcatgtggtttaattcgatgatacgcgaaaaacctcacctaggcttgacatggagtggaatcatgtagagatacatgagccttcgggccgcttcacaggtgctgcatggttgtcgtcagctcgtgtcgtgagatgttgggttaagtcccgcaacgagcgcaaccctcaccttatgttgccatcattcagttgggcactcgtaaggaactgccggtgacaaaccggaggaaggcggggatgacgtcaaatcctcatggcctttatgtctagggcaacacacgtgctacaatggccggtacaaagggtagccaactcgcgagggggagctaatctcaaaaatccggtcccagttcggattggagtctgcaactcgactccatgaagtcggaatcgctagtaatcgcggatcagcatgccgcggtgaatacgttcccggaccttgtacacaccgcccgtcacaccacctgagtggggagcacccgaagtggtctttgccaaccgcaaggaagcagactactaaggtgaaactcgtgaagggggtgaagtcgtaacaaggtagccgtatcggaaggtgcggctggatcacctccttt

SEQ ID NO: 1164 - DNA, 1348 bp, Leptospira licerasiae
caagtcgagcggagtagcaatacttagcggcgaacgggtgagtaacacgtgggtaatcttcctccgaatctgggataactttccgaaaggaaagctaataccggatagttctattggatcacaggatttgatagataaaggtttactgttcggagatgagcccgcggccgattagctagttggtgaggtaatggctcaccaaggcgacgatcggtagccggcctgagagggtgtccggccacaatggaactgagacacggtccatactcctacgggaggcagcagttaagaatcttgctcaatgggcgcaagcctgaagcagcgacgccgcgtgaacgaagaaggtcttcggattgtaaagttcagtaagcagggaaaaataagcagcaatgtgatgatggtacctgcctaaagcaccggctaactacgtgccagcagccgcggtaatacgtatggtgcaagcgttgttcggaatcattgggcgtaaagggtgcgtaggcggacatgtaagtcaggtgtgaaaactgggggctcaaccctcagcctgcacttgaaactatgtgtctggagtttgggagaggcaagtggaattccaggtgtagcggtgaaatgcgtagatatctggaggaacaccagtggcgaaggcgacttgctggctcaaaactgacgctgaggcacgaaagcgtgggtagtaaacgggattagataccccggtaatccacgccctaaacgttgtctaccagttgttgggggttttaaccctcagtaacgaacctaacggattaagtagaccgcctggggactatgctcgcaagagtgaaactcaaaggaattgacgggggtccgcacaagcggtggagcatgtggtttaattcgatgatacgcgaaaaacctcacctgggcttgacatggagtggaatcatatagagatatatgagccttcgggccgcttcacaggtgctgcatggttgtcgtcagctcgtgtcgtgagatgttgggttaagtcccgcaacgagcgcaacccctatcgtatgttgctaccatttagttgggcactcgtacgaaactgccggtgacaaaccggaggaaggcggggatgacgtcaaatcctcatggcctttatgtccagggccacacacgtgctacaatggccgatacagagggttgccaactcgcaagagggagctaatctctaaaagtcggtcccagttcggattggagtctgcaactcgactccatgaagtcggaatcgctagtaatcgcggatcagcatgccgcggtgaatacgttcccggaccttgtacacaccgcccgtcacaccacctgagtggggagcacccgaagtggt

SEQ ID NO: 1165 - DNA, 1510 bp, Leptotrichia buccalis
agagtttgatcctggctcaggatgaacgctgacagaatgcttaacacatgcaagtctttggcgaatctgtgcttgcacaggctagccaaggcggacgggtgagtaacgcgtaaagaacttaccctgcagacagggataacagacggaaacgactgataatacctgatacaattgccagcacgcatgtgcccggcaatgaaaagtgatgctgcaggagagctttgcgtcctattagcttgttggtgaggtaatggctcaccaaggcgatgataggtagccggcctgagagggtgaacggccacaaggggactgagatacggcccttactcctacgggaggcagcagtggggaatattggacaatgggggcaaccctgatccagcaattctgtgtgcatgaagaaggttttcggattgtaaagtgctttcagcagggaagaagaaagtgacggtacctgcagaagaagcgacggctaaatacgtgccagcagccgcggtaatacgtatgtcgcaagcgttatccggaattattgggcataaagggcatctaggcggccagacaagtctggggtgaaaacttgcggctcaaccgcaagcctgccctggaaactgtttggctagagtgctggagaggtggacggaactgcacgagtagaggtgaaattcgtagatatgtgcaggaatgccgatgatgaagatagttcactggacggtaactgacgctgaagtgcgaaagctgggggagcgaacaggattagataccctggtagtcccagccgtaaacgatgattactgggtgtgggcatgaagagtgtccgtgccgaagctaatgcgataagtaatccgcctggggagtacggccgcaaggctgaaactcaaaggaattgacggggacccgcacaagcggtggagcatgtggtttaattcgacgcaacgcgaggaaccttaccagatcttgacatcctacgaatgcctgtgagaacaggcagtgccttcgggaacgtagagacaggtggtgcatggctgtcgacagctcgtgtcgtgagatgttgggttaagtcccgcaacgagcgcaacccctatcgctagttgccatcattaagttggggactctagcgagactgcctgcgaagagcaggaggaaggtggggatgacgtcaagtcatcatgccccttatgatctgggctacacacgtgctacaatggccggtacaaagagctgcaaaacggtaacgtttagccaatctttaaagccggtccaagttcggattgaagtctgcaactcgacttcatgaagccggaatcgctagtaatcgcagatcagcaatgctgcggtgaatacgttctcgggtcttgtacacaccgcccgtcacaccacgagagttgtttgcacctgaagccgccggtccaaccgtaaggaggaaggcgtctaaggtgtggatagtgattggggtgaagtcgtaacaaggtatccgtaccggaaggtgcggatggatcacctcctttctaag

SEQ ID NO: 1166 - DNA, 1294 bp, Leptotrichia sp.
  C1
gatgaacgctgacagaatgcttaacacatgcaagtctggcgagcggcggacgggtgagtaacgcgtaaggaacttgccctgcagtcagggataacagacggaaacgactgataagacctggtaaagaaaatgctgcaggagagccttgcgtcctattagcttgttggtggggtaacggcccaccaaggcaatgataggtagccggcctgagagggtggacggccacaaggggactgagatacggcccttactcctacgggaggcagcagtggggaatattggacaatgggggcaaccctgatccagcaattctgtgtgcacgatgaaggttttcggattgtaaagtgctttcagcagggaagatgacggtacctgcagaagaagcgacggctaaatacgtgccagcagccgcggtaatacgtatgtcgcaagcgttatccggaattattgggcataaagggcatctaggcggccagataagtctggggtgaaaacttgcggctcaaccgcaagcctgccctggaaactatgtggctagagtactggagaggtggacggaactgcacgagtagaggtgaaattcgtagatatgtgcaggaatgccgatggtgaagatagttcactggacggactgacgctgaagtgcgaaagctaggggagcaaacaggattagataccctggtagtcctagctgtaaacgatgattactgggtgtgggcatgtccgtgccgaagctaatgcgataagtaatccgcctggggagtacggccgcaaggctgaaactcaaaggaatagacggggacccgcacaagcggtggagcatgtggtttaattcgacgcaacgcgaggaaccttaccagatcttgacatcgacaggtggtgcatggctgtcgacagctcgtgtcgtgagatgttgggttaagtcccgcaacgagcgcaacccctattgctagttgccatcatgggaactctagcaagactgcctgcgaagagcaggaggaaggtggggatgacgtcaagtcatcatgccccttatgatctgggctacacacgtgctacaatggccggcagagagccgcaaggcggcaacgccaagccaatctttccggtccaagttcggatgaagtctgcaactcgacttcagaagctggaatcgctagtaatcgcagatcagcaatgctgcggtgaatacgttctcgggtcttgtacacaccgcccgtcacaccacgagagttgtctgcacctgaagctgccgtccaggaaagcatctaaggtgtggatagtgattggggtg

SEQ ID NO: 1167 - DNA, 1515 bp, Leptotrichia goodfellowii
ttgaatgaagagtttgatcctggctcaggatgaacgctgacagaatgcttaacacatgcaagtcgatggggaagaattaacttgttaatttggtaaccatggcggacgggtgagtaacgcgtaaagaacttacctttcagactgggataacagagggaaacttctgataagaccggatataattaattgattgcatgagagattaatgaaaagagatgctgaaagagagctttgcgtcctattagctagttggtaaggtaacggcttaccaaggcgatgataggtagccggcctgagagggtggacggccacaaggggactgagatacggcccttactcttacgggaggcagcagtggggaatattggacaatggaggagactctgatccagcaattctgtgtgcacgaagaaggttttcggattgtaaagtgctttcagtggggaagaaggaagtgacggtacccacagaagaagcgacggctaaatacgtgccagcagccgcggtaatacgtatgtcgcgagcgttatccggaattattgggcataaagggcatctaggcggacgatcaagtcaggggtgaaaacttgcggctcaactgtaagcttgcctttgaaactgattgtctagagtattggaaaggtgggcggaactacacgagtagaggtgaaattcgtagatatgtgtaggaatgccgatgatgaagatagctcactggacgataactgacgctgaagtgcgaaagctaggggagcgaacaggattagataccctggtagtcctagctgtaaacgatgatcactgggtgtgggcaggaagactgtctgtgccgaagcaaatgcgataagtgatccgcctggggagtacgaccgcaaggttgaaactcaaaggaattgacggggacccgcacaagcggtggagcatgtggtttaattcgacgcaacgcgaggaaccttaccagatcttgacatcctacgaacatgtatgaggatacatggtgccttcgggaacgtagagacaggtggtgcatggctgtcgacagctcgtgtcgtgagatgttgggttaagtcccgcaacgagcgcaacccttatcgttagttaccatcattaagttggggactctagcgagactgcctgcgaagagcaggaggaaggtggggatgacgtcaagtcatcatgccccttatgatctgggctacacacgtgctacaatgggcagtacagagaggagcgagatagtgatatggagcgaatcttgaaagctgttctaagttcggattgaagtctgcaactcgacttcatgaagttggaatcgctagtaatcgcaaatcagcaatgttgcggtgaatacgttctcgggtcttgtacacaccgcccgtcacaccacgagagttgtttgcacctgaagttactggtctaacttaggaggaaggtacctaaggtgtgaatagtgattggggtgaagtcgtaacaaggtatccgtaccggaaggtgcggatggatcacctcctttct

SEQ ID NO: 1168 - DNA, 1507 bp, Leptotrichia hofstadii
tgaagagtttgatcctggctcaggatgaacgctgacagaatgcttaacacatgcaagtctttggcgaatctgtgcttgcacaggctagccaaggcggacgggtgagtaacgcgtaaagaacttgccctgcagacagggataacagacggaaacgactgacaacacctgatacagttgccggcacgcatgtgcctggcaatgaaaagagatgctgcgggagagctttgcgtcctattagcttgttggcggggtaacggcccaccaaggcgatgataggtagccggcctgagagggtgaacggccacaaggggactgagatacggcccttactcctacgggaggcagcagtggggaatattggacaatgggggcaaccctgatccagcaattctgtgtgcacgatgaaggttttcggattgtaaagtgctttcagcagggaagaaggaagtgacggtacctgcagaagaagcgacggctaaatacgtgccagcagccgcggtaatacgtatgtcgcaagcgttatccggaattattgggcataaagggcatctaggcggccaggcaagtctggggtgaaaacttgcggctcaaccgcaagcctgccctggaaactgcctggctagagtgctggagaggtggacggaactgcacgagtagaggtgaaattcgtagatatgtgcaggaatgccgatgatgaagatagttcactggacggcaactgacgctgaagtgcgaaagctgggggagcgaacaggattagataccctggtagtcccagccgtaaacgatgattactgggtgtgggcatgaagagtgtccgtgccgaagcaaatgcgataagtaatccgcctggggagtacggccgcaaggctgaaactcaaaggaattgacggggacccgcacaagcggtggagcatgtggtttaattcgacgcaacgcgaggaaccttaccagatcttgacatcccacgtatgcctgcgagagcgggcagtgccttcgggaacgtggagacaggtggtgcatggctgtcgacagctcgtgtcgtgagatgttgggttaagtcccgcaacgagcgcaacccctatcgccagttgccatcattaagttggggactctggcgagactgcctgcgaagagcaggaggaaggtggggatgacgtcaagtcatcatgccccttatgatctgggctacacacgtgctacaatggccggtacagagagctgcgaagcggcaacgcccagcgaatcttcaaagccggtccaagttcggattgaagtctgcaactcgacttcatgaagctggaatcgctagtaatcgcagatcagcaatgctgcggtgaatacgttctcgggtcttgtacacaccgcccgtcacaccacgagagttgtctgcacctgaagctgccggtctaaccgcaaggaggaaggcatctaaggtgtggacagtgattggggtgaagtcgtaacaaggtatccgtaccggaaggtgcggatggatcacctcctt

SEQ ID NO: 1169 - DNA, 1485 bp, Leptotrichia shahii
gagtttgatyctggctcaggatgaacgctgacagaatgcttaacacatgcaagtctttggcgaagctgcgcttgcgcagacgagccaaggcggacgggtgagtaacgcgtaaggaacttgccctgcagacagggataacagacggaaacgactgacaagacctgatacagttgccggcacgcatgtgcctggcgatgaaaggagacgctgcaggagagccttgcgtcctattagcttgttggcggggtaatggcccaccaaggcgatgataggtagccggcctgagagggtggacggccacaaggggactgagatacggcccttactcctacgggaggcagcagtggggaatattggacaatgggggcaaccctgatccagcaattctgtgtgcacgaagaaggttttcggattgtaaagtgctttcagcagggaagaagaaagtgacggtacctgcagaagaagcgacggctaaatacgtgccagcagccgcggtaatacgtatgtcgcgagcgttatccggaattattgggcataaagggcatctaggcggccctgtaagtctagggtgaaaacctgcggctcaaccgcaggcctgccccggaaactacagggctagagtgctggagaggtggacggaactgcacgagtagaggtgaaattcgtagatatgtgcaggaatgccgatgatgaagatagttcactggacggcaactgacgctgaagtgcgaaagctaggggagcaaacaggattagataccctggtagtcctagctgtaaacgatgattactgggtgtgggcatgaagagtgtccgtgccgaagctaatgcgataagtaatccgcctggggagtacggccgcaaggctgaaactcaaaggaattgacggggacccgcacaagcggtggagcatgtggtttaattcgacgcaacgcgaggaaccttaccagatcttgacatcctgcgaaggcctgcgagagcaggccgtgccttcgggaacgcagagacaggtggtgcatggctgtcgacagctcgtgtcgtgagatgttgggttaagtcccgcaacgagcgcaacccctatcgctagttgccatcattaggttggggactctagcgagactgcctgcgaagagcaggaggaaggcggggatgacgtcaagtcatcatgccccttatgatctgggctacacacgtgctacaatggccggtacaaagagctgccaggcggcaacgccaagcgaatctttaaagccggtccaagttcggattgaagcctgcaactcggcttcatgaagctggaatcgctagtaatcgcagatcagcaatgctgcggtgaatacgttctcgggtcttgtacacaccgccgtcacaccacgagagttgtctgcacctgaagccgccggtccaaccgaaaggaggaaggcgtctaaggtgtggacagtgattggggtgaagtcgtaacaaggtatccgtaccggaaggtgc

SEQ ID NO: 1170 - DNA, 1506 bp, Leptotrichia sp.
  neutropenicPatient
tggagagtttgatcctggctcaggatgaacgctgacagaatgcttaacacatgcaagtcattggcgaagctgcgcttgcgcagtctagccaaggcggacgggtgagtaacgcgtaaggaacttgccctgcagacagggataacagacggaaacgactgataacacctggtattgtcaggctggcgcatgccggcctgatgaaaggagacgctgcaggagagccttgcgtcctattagctagttggtggggtaacggcccaccaaggcgatgataggtagccggcctgagagggtgaacggccacaaggggactgagatacggcccttactcctacgggaggcagcagtggggaatattggacaatgggggcaaccctgatccagcaattctgtgtgcacgaagaaggttttcggattgtaaagtgctttcagcagggaagaagaaagtgacggtacctgcagaagaagcgacggctaaatacgtgccagcagccgcggtaatacgtatgtcgcaagcgttatccggaattattgggcataaagggcatctaggccgccctgtaagtctagggtgaaaacctgcggctcaaccgcaggcctgccccggaaactacagggctagagtatcggagaggtggacggaactgcacgagtagaggtgaaattcgtagatatgtgcaggaatgccgatgatgaagatagttcactggacggtaactgacgctgaagtgcgaaagctaggggagcaaacaggattagataccctggtagtcctagctgtaaacgatgattactgggtgtgggcatgaagagtgtccgtgccgaagcaaatgcgataagtaatccgcctggggagtacggccgcaaggctgaaactcaaaggaattgacggggacccgcacaagcggtggagcatgtggtttaattcgacgcaacgcgaggaaccttaccagatcttgacatcctgcgaatgcccgtgagaacgggcagtgccttcgggaacgcagagacaggtggtgcatggctgtcgacagctcgtgtcgtgagatgttgggttaagtcccgcaacgagcgcaacccctatcgttagttgccatcattaagttggggactctagcgagactgcctgcgaagagcaggaggaaggtggggatgacgtcaagtcatcatgccccttatgatctgggctacacacgtgctacaatggccggtacagagagcagccaggcggcaacgccgagcgaatctttaaagccggtccaagttcggattgaagcctgcaactcggcttcatgaagctggaatcgctagtaatcgcagatcagcaatgctgcggtgaatacgttctcgggtcttgtacacaccgcccgtcacaccacgagagttgtctgcacctgaagctgctggtccaaccgcaaggaggaaggcatctaaggtgtggatagtgattggggtgaagtcgtaacaaggtatccgtaccggaaggtgcggytggatcacctcctt

SEQ ID NO: 1171 - DNA, 1363 bp, Leptotrichia sp.
  oral clone GT018
gagtttgattctggctcaggatgaacgctgacagaatgcttaacacatgcaagtctggcgagcggcggacgggtgagtaacgcgtaaggaacttgccctgcagtcagggataacagacggaaacgactgataagacctggtaaagaaaatgctgcaggagagccttgcgtcctattagcttgttggtggggtaacggcccaccaaggcgatgataggtagccggcctgagagggtggacggccacaaggggactgagatacggcccttactcctacgggaggcagcagtggggaatattggacaatgggggcaaccctgatccagcaattctgtgtgcacgatgaaggttttcggattgtaaagtgctttcagcagggaagatgacggtacctgcagaagaagcgacggctaactacgtgccagcagccgcggtaatacgtatgtcgcaagcgttatccggaattattgggcataaagggcatctaggcggccagataagtctggggtgaaaacttgcggctcaaccgcaagcctgccctggaaactatgtggctagagtactggagaggtggacggaactgcacgagtagaggtgaaattcgtagatatgtgcaggaatgccgatgatgaagatagttcactggacggactgacgctgaagtgcgaaagctaggggagcaaacaggattagataccctggtagtcctagctgtaaacgatgattactgggtgtgggcatgtccgtgccgaagctaatgcgataagtaatccgcctggggagtacggccgcaaggctgaaactcaaaggaattgacggggacccgcacaagcggtggagcatgtggtttaattcgacgcaacgcgaggaaccttaccagatcttgacatcgacaggtggtgcatggctgtcgacagctcgtgtcgtgagatgttgggttaagtcccgcaacgagcgcaacccctattgctagttgccatcatgggaactctagcaagactgcctgcgaagagcaggaggaaggtggggatgacgtcaagtcatcatgccccttatgatctgggctacacacgtgctacaatggctggcagagagatgcgacgcagcaatgccaagccaacctctccagtccaagttcggatgaagcctgcaactcggcttcagaagttggaatcgctagtaatcgcggatcagcaatgccgcggtgaatacgttctcgggccttgtacacaccgcccgtcacaccacgagagttgtctgcacctgaagctgccgtctaagaaggcatctaaggtgtggacagtgattggggtgaagtcgtaacaaggtatccgtaccggaaggtgcggctggatcacctcctt

SEQ ID NO: 1172 - DNA, 1362 bp, Leptotrichia sp.
  oral clone GT020
gagtttgatcctggctcaggatgaacgctgacagaatgcttaacacatgcaagtctttgcaaggcggacgggtgagtaacgcgtaaagaacttgccctgcagtctgggataacagacggaaacgactgataaaacctgatatagaaaatgctgcaggagagctttgcgtcctattagcttgttggtggggtaatggcccaccaaggcaatgataggtagccggcctgagagggtgaccggccacaaggggactgagatacggcccttactcctacgggaggcagcagtggggaatattggacaatgggggcaaccctgatccagcaattctgtgtgcacgaagaaggttttcggattgtaaagtgctttcagcagggaagatgactgtacctgcagaagaagcgacggctaaatacgtgccagcagccgcggtaatacgtatgtcgcaagcgttatccggaattattgggcataaagggcatctaggcggccagataagtctggggtgaaaacttgcggctcaaccgcaagcctgccctggaaactatatggctagagtactggagaggtggacggaactgcacgagtagaggtgaaattcgtagatatgtgcaggaatgccgatgatgaagatagttcactggacggactgacgctgaagtgcgaaagctaggggagcaaacaggattagataccctggtagtcctagctgtaaacgatgattactgggtgtgggcatgtctgtgccgaagctaatgcgataagtaatccgcctggggagtacggccgcaaggctgaaactcaaaggaattgacggggacccgcacaagcggtggagcatgtggtttaattcgacgcaacgcgaggaaccttaccagatcttgacatcgacaggtggtgcatggctgtcgacagctcgtgtcgtgagatgttgggttaagtcccgcaacgagcgcaacccctatcgttagttgccatcatgggaactctagcgagactgcctgcgaagagcaggaggaaggtggggatgacgtcaagtcatcatgccccttatgatctgggctacacacgtgctacaatggccggcaaaaagctgcaaaacggtaacgtttagccaatctttccggtccaagttcggatgaagtctgcaactcgacttcagaagctggaatcgctagtaatcgcagatcagcaatgctgcggtgaatacgttctcgggtcttgtacacaccgcccgtcacaccacgagagttgtctgcacctgaagctgccgtctaagaaggtatctaaggtgtggatagtgattggggtgaagtcgtaacaaggtatccgtaccggaaggtgcggctggatcacctcctt

SEQ ID NO: 1173 - DNA, 1363 bp, Leptotrichia sp.
  oral clone HE012
gagtttgattctggctcaggatgaacgctgacagaatgcttaacacatgcaagtctggcgagcggcggacgggtgagtaacgcgtaaagaacttgccctgcagacagggataacagacggaaacgactgataacacctgatacagaaaatgctgcgggagagctttgcgtcctattagcttgttggtgaggtaacggctcaccaaggcgatgataggtagccggcctgagagggtgaacggccacaaggggactgagatacggcccttactcctacgggaggcagcagtggggaatattggacaatgggggcaaccctgatccagcaattctgtgtgcacgaagaaggttttcggattgtaaagtgctttcagcagggaagatgacggtacctgcagaagaagcgacggctaattacgtgccagcagccgcggtaatacgtatgtcgcaagcgttatccggaattattgggcataaagggcatctaggcggccagacaagtctggggtgaaaacttgcggctcaaccgcaagcctgccctggaaactgtttggctagagtgctggagaggtggacggaactgcacgagtagaggtgaaattcgtagatatgtgcaggaataccgatgatgaagatagttcactggacggactgacgctgaagtgcgaaagctaggggagcgaacaggattagataccctggtagtcctagctgtaaacgatgattactgggtgtggacatgtccgtgccgaagcaaatgcgataattaatccgcctggggagtacggccgcaaggctgaaactcaaaggaattgacggggacccgcacaagcggtggagcatgtggtttaattcgacgcaacgcgaggaaccttaccagatcttgacatcgacaggtggtgcatggctgtcgacagctcgtgtcgtgagatgttgggttaagtcccgcaacgagcgcaacccctatcgttagttaccatcatggggactctagcgagactgcctgcgaagagcaggaggaaggtggggatgacgtcaagtcatcatgccccttatgatctgggctacacacgtgctacaatggccggcagagagctgcgaagcggcaacgcccagcgaatctttccggtccaagttcggatgaagtctgcaactcgacttcagaagctggaatcgctagtaatcgcagatcagcaatgctgcggtgaatacgttctcgggtcttgtacacaccgcccgtcacaccacgagagttgtttgcacctgaagctgccgtctaggaaggcatctaatgtgtggatagtgattggggtgaagtcgtaacaaggtatccgtaccggaaggtgcggttggaacacctcctt

SEQ ID NO: 1174 - DNA, 1362 bp, Leptotrichia sp.
  oral clone IK040
gagtttgatcctggctcaggatgaacgctgacagaatgcttaacacatgcaagtcgatggatggcggacgggtgagtaacgcgtaaagaacttgccggatggaccgggataacagctggaaacggctggcaagaccggatactgaaaatgccgtccgagagctttgcgtcctattagctggttggtaaggtgacggcttaccaaggcgatgataggtagccggcctgagagggtggacggccacaaggggactgagatacggcccttactcctacgggaggcagcagtggggaatattggacaatgggggcaaccctgatccagcaattctgtgtgcacgaagaaggttttcggatcgtaaagtgctttcagcagggaggatgactgtacctgcagaagaagcgacggctaaatacgtgccagcagccgcggtaatacgtatgtcgcgagcgttatccggaattattgggcataaagggcatctaggcggccgggtaagtccggggtgaaaactgctggctcaaccagcagcctgccttggaaactacccggcttgagtgctggagaggtggacggaactgcacgagtagaggtgaaattcgtagatatgtgcaggaatgccgatgatgaagatagttcactggacggactgacgctgaagtgcgaaagctaggggagcgaacaggattagataccctggtagtcctagctgtaaacgatgattactgggtgtgggcatgtccgtgccgaagctaatgcgataagtaatccgcctggggagtacggccgcaaggctgaaactcaaaggaattgacggggacccgcacaagcggtggagcatgtggtttaattcgacgcaacgcgaggaaccttaccagatcttgacatcgacaggtggtgcatggctgtcgacagctcgtgtcgtgagatgttgggttaagtcccgcaacgagcgcaacccctatcgctagttgccatcatggggactctagcgagactgcctgcgaagagcaggaggaaggtggggatgacgtcaagtcatcatgccccttatgatctgggctacacacgtgctacaatggctggcagagagatgcgacgcagcaatgccaagccaacctctccagtccaagttcggatgaagcctgcaactcggcttcagaagttggaatcgctagtaatcgcggatcagcaatgccgcggtgaatacgttctcgggtcttgtacacaccgcccgtcacaccacgagagttgtctgcacctgaagctgccgtctaagaaggcatctaaggtgtggacagtgattggggtgaagtcgtaacaaggtatccgtaccggaaggtgcggctggaacacctcctt

SEQ ID NO: 1175 - DNA, 1293 bp, Leptotrichia sp.
  oral clone P2PB_51 P1
gatgaacgctgacagaatgcttaacacatgcaagtcgatggatggcggacgggtgagtaacgcgtaaggaacttacctgcgggactgggataacggagggaaacttctgacaagaccggataaagaaagcgcctgcggagagtcttgcgtcctattagctagttggttgggtaacggctgaccaaggcgaagataggtagccggcctgagagggtggacggccacaaggggactgagatacggcccttactcctacgggaggcagcagtggggaatattggacaatgggggcaaccctgatccagcaattctgtgtgcacgaagaaggttttcggattgtaaagtgctttcagcagggaagatgacggtacctgcagaagaagcgacggctaaatacgtgccagcagccgcggtaatacgtatgtcgcgagcgttatccggaattattgggcataaagggcatctaggcggcctaacaagtcaggggtgaaaacctgcggctcaaccgcaggcctgcctttgaaactgtaaggctggagtaccggagaggtggacggaactgcacgagtagaggtgaaattcgtagatatgtgcaggaatgccgatgatgaagatagtccactggacggactgacgctgaagtgcgaaagccgggggagcgaacaggattagataccctggtagtcccggccgtaaacgatgattactgggtgtgggcatgtctgtgccgaagcgaatgcgataagtaatccgcctggggagtacggccgcaaggctggaactcaaaggaattgacggggacccgcacaagcggtggagcatgtggtttaattcgacgcaacgcgaggaaccttaccagatcttgacatcgacaggtggtgcatggctgtcgacagctcgtgtcgtgagatgttgggttaagtcccgcaacgagcgcaaccctttttgctagttaccatcatggggactctagcgagactgcctgcgaagagcaggaggaaggtggggatgacgtcaagtcatcatgccccttatgatctgggctacacacgtgctacaatgggctgcagagaggagcgaggtggtgacacggagcgaatcttgcagttcgaagttcggatgaagtctgcaactcgacttcagaagttggaatcgctagtaatcgcggatcagcaatgccgcggtgaatacgttctcgggtcttgtacacaccgcccgtcacaccacgagagttgtctgcacctgaagttactgtctaggaaggtacctaaggtgtggatagtgattggggtg

SEQ ID NO: 1176 - DNA, 1432 bp, Leptotrichia sp.
  oral taxon 223
gatgaacgctgacagaatgcttaacacatgcaagtctttggcgaatctgcgcttgcccaggctagccaaggcggacgggtgagtagcgcgtaaagaacttgccctgcagacagggataacagacggaaacgactgacaacacctgatacggttgccggcacgcatgtgccaggcaatgaaaagcgatgctgcaggagagctttgcgtcctattagcttgttggtgaggtaacggctcaccaaggcgacgataggtagccggcctgagagggtgaacggccacaaggggactgagatacggcccttactcctacgggaggcagcagtggggaatattggacaatgggggcaaccctgatccagcaattctgtgtgcacgaagaaggctttcgggctgtaaagtgctttcagcagagaagaagcaagtgacggtacctgcagaagaagcgacggctaaatacgtgccagcagccgcggtaatacgtatgccgcaagcgttatccggaattattgggcataaagggcatctaggcggccaggcaagtctggggtgaaaacctgcggctcaaccgcaggcctgccctggaaactgcgtggctagagtgctggagaggtggacggaactgcacgagtagaggtgaaattcgtagatatgtgcaggaatgccgatgatgaagatagttcactggacggcaactgacgctgaagtgcgaaagccgggggagcgaacaggattagataccctggtagtcccggccgtaaacgatgattactgggtgtgggcatgaagagtgtccgtgccgaagctaatgcgataagtaatccgcctggggagtacggccgcaaggctgaaactcaaaggaattgacggggacccgcacaagcggtggagcatgtggtttaattcgacgcaacgcgaggaaccttaccagatcttgacatcctgcggatgcccgtgagagcgggcagtgccctcgggaacgcagagacaggtggtgcatggctgtcgacagctcgtgtcgtgagatgttgggttaagtcccgcaacgagcgcaacccctatcgccagttgccatcattaggttggggactctggcgagactgcctgcgaagagcaggaggaaggtggggatgacgtcaagtcatcatgccccttatgatctgggctacacacgtgctaccatggccggtacagagagctgcgaggcggcgacgccaagcgaacctgcaaagccggtccaagttcggattgaagcctgcaactcggcttcatgaagctggaatcgctagtaatcgcagatcagcaatgctgcggtgaatacgttctcgggtcttgtacacaccgcccgtcacaccacgagagctgtctgcacctgaagccgccggtccaaccgcaagggggaaggcgtctaaggtgtggacagtgattgggg

SEQ ID NO: 1177 - DNA, 1450 bp, Leuconostoc carnosum
cgcggcgtgcctaatacatgcaagtcgaacgcacagcgaaaggtgcttgcacctttcaagtgagtggcgaacgggtgagtaacacgtggacaacctgcctcaaggctggggataacatttggaaacagatgctaataccgaataaaacttagtatcgcatgataccaggttaaaaggcgctacggcgtcacctagagatggatccgcggtgcattagttagttggtggggtaaaggcctaccaagacaatgatgcatagccgagttgagagactgatcggccacattgggactgagacacggcccaaactcctacgggaggctgcagtagggaatcttccacaatgggcgaaagcctgatggagcaacgccgcgtgtgtgatgaaggctttcgggtcgtaaagcactgttgtatgggaagaaaagttaaggtagggaatgaccttagcctgacggtaccataccagaaagggacggctaaatacgtgccagcagccgcggtaatacgtatgtcccgagcgttatccggatttattgggcgtaaagcgagcgcagacggttggttaagtctgatgtgaaagcccggagctcaactccggaaaggcattggaaactggttaacttgagtgcagtagaggtaagtggaactccatgtgtagcggtggaatgcgtagatatatggaagaacaccagcggcgaaggcggcttactggactgtaactgacgttgaggctcgaaagtgtgggtagcaaacaggattagataccctggtagtccacaccgtaaacgatgaacactaggtgttaggaggtttccgcctcttagtgccgaagctaacgcattaagtgttccgcctggggagtacgaccgcaaggttgaaactcaaaggaattgacggggacccgcacaagcggtggagcatgtggtttaattcgaagcaacgcgaagaaccttaccaggtcttgacatcctttgaagcttttagaaatagaagtgttctcttcggagacaaagtgacaggtggtgcatggtcgtcgtcagctcgtgtcgtgagatgttgggttaagtcccgcaacgagcgcaacccttattgttagttgccagcattcagatgggcactctagcgagactgccggtgacaaaccggaggaaggcggggacgacgtcagatcatcatgccccttatgacctgggctacacacgtgctacaatggcgtatacaacgagttgccaacctgcgaaggtgagctaatctcttaaagtacgtctcagttcggactgcagtctgcaactcgactgcacgaagtcggaatcgctagtaatcgcggatcagcacgccgcggtgaatacgttcccgggtcttgtacacaccgcccgtcacaccatggaagtttgtaatgcccaaagccggtggcctaaccgtaaggagggaaccgtctaaggcaggacag

SEQ ID NO: 1178 - DNA, 1576 bp, Leuconostoc citreum
gaattcactagtgattagagtttgattaatggctcaggatgaacgctggcggcgtgcctaatacatgcaagtcgaacgcgcagcgagaggtgcttgcacctttcaagcgagtggcgaacgggtgagtaacacgtggataacctgcctcaaggctggggataacatttggaaacagatgctaataccgaataaaacttagtatcgcatgatatcaagttaaaaggcgccacggcgtcacctagagatggatccgcggtgcattagttagttggtggggtaaaggcttaccaagacgatgatgcatagccgagttgagagactgatcggccacattgggactgagacacggcccaaactcctacgggaggctgcagtagggaatcttccacaatgggcgcaagcctgatggagcaacgccgcgtgtgtgatgaaggctttcgggtcgtaaagcactgttgtatgggaagaaatgctaaaatagggaatgattttagtttgacggtaccataccagaaagggacggctaaatacgtgccagcagccgcggtaatacgtatgtcccgagcgttatccggatttattgggcgtaaagcgagcgcagacggttgattaagtctgatgtgaaagcccggagctcaactccggaatggcattggaaactggttaacttgagtgttgtagaggtaagtggaactccatgtgtagcggtggaatgcgtagatatatggaagaacaccagtggcgaaggcggcttactggacaacaactgacgttgaggctcgaaagtgtgggtagcaaacaggattagataaccctggtagtccacaccgtaaacgatgaatactaggtgttaggaggtttccgcctcttagtgccgaagctaacgcattaagtattccgcctggggagtacgaccgcaaggttgaaactcaaaggaattgacggggacccgcacaagcggtggagcatgtggtttaattcgaagcaacgcgaagaaccttaccaggtcttgacatcctttgaagcttttagagatagaagtgttctcttcggagacaaagtgacaggtggtgcatggtcgtcgtcagctcgtgtcgtgagatgttgggttaagtcccgcaacgagcgcaacccttattgttagttgccagcattcagttgggcactctagcgagactgccggtgacaaaccggaggaaggcggggacgacgtcagatcatcatgccccttatgacctgggctacacacgtgctacaatggcgtatacaacgagttgccaacctgcgaaggtgagctaatctcttaaagtacgtctcagttcagactgcagtctgcaactcgactgcacgaagtcggaatcgctagtaatcgcggatcagcacgccgcggtgaatacgttcccgggtcttgtacacaccgcccgtcacaccatgggagtttgtaatgcccaaagccggtggcctaaccttcgggagggagccgtctaaggcaggacagatgactggggtgaagtcgtaacaaggtaaccgtaaatcgaatttcccgcggccgccatggcggccggagctgratcgc

SEQ ID NO: 1179 - DNA, 1554 bp, Leuconostoc gasicomitatum
tttaaattgagagtttgatcctggctcaggatgaacgctggcggcgtgcctaatacatgcaagtcgaacgcacagcgaaaggtgcttgcacctttcaagtgagtggcgaacgggtgagtaacacgtggataacctacctcaaggttggggataacatttggaaacagatgctaataccgaataaaacttagtatcgcatgataccaggttaaaaggcgctacggcgtcacctagagatggatccgcggtgcattagttagttggtggggtaaaggcttaccaagacaatgatgcatagccgagttgagagactgatcggccacattgggactgagacacggcccaaactcctacgggaggctgcagtagggaatcttccacaatgggcgaaagcctgatggagcaacgccgcgtgtgtgatgaaggctttcgggtcgtaaagcactgttgtatgggaagaacagctagagtagggaatgactttagtttgacggtaccataccagaaagggacggctaaatacgtgccagcagccgcggtaatacgtatgtcccgagcgttatccggatttattgggcgtaaagcgagcgcagacggttaattaagtctgatgtgaaagcccggagctcaactccggaaaggcattggaaactggttaacttgagtgcagtagaggtaagtggaactccatgtgtagcggtggaatgcgtagatatatggaagaacaccagcggcgaaggcggcttactggactgtaactgacgttgaggctcgaaagtgtgggtagcaaacaggattagataccctggtagtccacaccgtaaacgatgaacactaggtgttaggaggtttccgcctcttagtgccgaagctaacgcattaagtgttccgcctggggagtacgaccgcaaggttgaaactcaaaggaattgacggggacccgcacaagcggtggagcatgtggtttaattcgaagcaacgcgaagaaccttaccaggtcttgacatcctttgaagcttttagagatagaagtgttctcttcggagacaaagtgacaggtggtgcatggtcgtcgtcagctcgtgtcgtgagatgttgggttaagtcccgcaacgagcgcaacccttattgttagttgccagcattcagatgggcactctagcgagactgccggtgacaaaccggaggaaggcggggacgacgtcagatcatcatgccccttatgacctgggctacacacgtgctacaatggcgtatacaacgagttgccaacctgtgaaggtgagctaatctcttaaagtacgtctcagttcggactgcagtctgcaactcgactgcacgaagtcggaatcgctagtaatcgcggatcagcacgccgcggtgaatacgttcccgggtcttgtacacaccgcccgtcacaccatgggagtttgtaatgcccaaagccggtggcctaaccgtaaggagggaaccgtctaaggcaggacagatgactggggtgaagtcgtaacaaggtagccgtaggagaacctgcggctggatcacctcctttct

SEQ ID NO: 1180 - DNA, 1474 bp, Leuconostoc inhae
ctggcggcgtgcctaatacatgcaagtcgaacgcacagcgaaaggtgcttgcacctttcaagtgagtggcgaacgggtgagtaacacgtggataacctacctcaaggttggggataacatttggaaacagatgctaataccgaatgagacttcttgttgcatgacaggaagttaaaaggcgctacggcgtcgcctagagatggatccgcggtgcattagttagttggtggggtaaaggcctaccaagacaatgatgcatagccgagttgagagactgatcggccacattgggactgagacacggcccaaactcctacgggaggctgcagtagggaatcttccacaatgggcgaaagcctgatggagcaacgccgcgtgtgtgatgaaggctttcgggtcgtaaagcactgttgtatgggaagaacagctagagtagggaatgactttagtttgacggtaccataccagaaagggacggctaaatacgtgccagcagccgcggtaatacgtatgtcccgagcgttatccggatttattgggcgtaaagcgagcgcagacggttgattaagtctgatgtgaaagcccggagctcaactccggaaaggcattggaaactggtcaacttgagtgcagtagaggtaagtggaactccatgtgtagcggtggaatgcgtagatatatggaagaacaccagcggcgaaggcggcttactggactgtaactgacgttgaggctcgaaagtgtgggtagcaaacaggattagataccctggtagtccacaccgtaaacgatgaacactaggtgttaggaggtttccgcctcttagtgccgaagctaacgcattaagtgttccgcctggggagtacgaccgcaagttgaaactcaaaggaattgacggggacccgcacaagcggtggagcatgtggtttaattcgaagcaacgcgaagaaccttaccaggtcttgacatcctttgaagcttttagagatagaagtgttctcttcggagacaaagtgacaggtggtgcatggtcgtcgtcagctcgtgtcgtgagatgttgggttaagtcccgcaacgagcgcaacccttattgttagttgccagcattcagatgggcactctagcgagactgccggtgacaaaccggaggaaggcggggacgacgtcagatcatcatgccccttatgacctgggctacacacgtgctacaatggcgtatacaacgagttgccaacctgtgaaggtgagctaatctcttaaagtacgtctcagttcggactgcagtctgcaactcgactgcacgaagtcggaatcgctagtaatcgcggatcagcacgccgcggtgaatacgttcccgggtcttgtacacaccgcccgtcacaccatgggagtttgtaatgcccaaagccggtggcctaaccgtaaggagggaaccgtctaaggcaggacagatgactggggtgaagtcgtaaca

SEQ ID NO: 1181 - DNA, 1558 bp, Leuconostoc kimchii
ttaaattgagagtttgatcctggctcaggatgaacgctggcggcgtgcctaatacatgcaagtcgaacgcgcagcgagaggtgcttgcacctttcaagcgagtggcgaacgggtgagtaacacgtggataacctgcctcaaggctggggataacatttggaaacagatgctaataccgaataaaacttagtatcgcatgatataaagttaaaaggcgctacggcgtcacctagagatggatccgcggtgcattagttagttggtgaggtaaaggctcaccaagacaatgatgcatagccgagttgagagactgatcggccacattgggactgagacacggcccaaactcctacgggaggctgcagtagggaatcttccacaatgggcgcaagcctgatggagcaacgccgcgtgtgtgatgaaggctttcgggtcgtaaagcactgttgtatgggaagaacagctagaatagggaatgattttagtgtgacggtaccataccagaaagggacggctaaatacgtgccagcagccgcggtaatacgtatgtcccgagcgttatccggatttattgggcgtaaagcgagcgcagacggttgtttaagtctgatgtgaaagcccggagctcaactccggaaaggcattggaaactggacaacttgagtgcagtagaggtaagtggaactccatgtgtagcggtggaatgcgtagatatatggaagaacaccagcggcgaaggcggcttactggactgtaactgacgttgaggctcgaaagtgtgggtagcaaacaggattagataccctggtagtccacaccgtaaacgatgaacactaggtgttaggaggtttccgcctcttagtgccgaagctaacgcattaagtgttccgcctggggagtacgaccgcaaggttgaaactcaaaggaattgacggggacccgcacaagcggtggagcatgtggtttaattcgaagcaacgcgaagaaccttaccaggtcttgacatcctttgaagcttttagagatagaagtgttctcttcggagacaaagtgacaggtggtgcatggtcgtcgtcagctcgtgtcgtgagatgttgggttaagtcccgcaacgagcgcaacccttattgttagttgccagcattcagatgggcactctagcgagactgccggtgacaaaccggaggaaggcggggacgacgtcagatcatcatgccccttatgacctgggctacacacgtgctacaatggcgtatacaacgagttgccaacctgcgaaggtgagctaatctcttaaagtacgtctcagttcggactgcagtctgcaactcgactgcacgaagtcggaatcgctagtaatcgcggatcagcacgccgcggtgaatacgttcccgggtcttgtacacaccgcccgtcacaccatgggagtttgtaatgcccaaagccggtggcctaaccgtaaggagggaaccgtctaaggcaggacagatgactggggtgaagtcgtaacaaggtagccgtaggagaacctgcggctggatcacctcctttctaagga

SEQ ID NO: 1182 - DNA, 1451 bp, Leuconostoc lactis
ggcggcgtgcctaatacatgcaagtcgaacgcgcagcgaaaggtgcttgcacctttcaagcgagtggcgaacgggtgagtaacacgtggataacctgcctcaaggctggggataacatttggaaacagatgctaataccgaataaaacttagtatcgcatgatacaaagttgaaaggcgctacggcgtcacctagagatgggtccgcggtgcattagttagttggtggggtaaaggcctaccaagacaatgatgcatagccgagttgagagactgatcggccacattgggactgagacacggcccaaactcctacgggaggctgcagtagggaatcttccacaatgggcgaaagcctgatggagcaacgccgcgtgtgtgatgaaggctttagggtcgtaaagcactgttgtatgggaagaaatgctagaatagggaatgattctagttcgacggtaccataccagaaagggacggctaaatacgtgccagcagccgcggtaatacgtatgtcccgagcgttatccggatttattgggcgtaaagcgagcgcagacggttgattaagtctgatgtgaaagcccggagctcaactccggaatggcattggaaactggttaacttgagtgttgtagaggtaagtggaactccatgtgtagcggtggaatgcgtagatatatggaagaacaccagtggcgaaggcggcttactggacaacaactgacgttgaggctcgaaagtgtgggtagcaaacaggattagataccctggtagtccacaccgtaaacgatgaatactaggtgttaggaggtttccgcctcttagtgccgaagctaacgcattaagtattccgcctggggagtacgaccgcaaggttgaaactcaaaggaattgacggggacccgcacaagcggtggagcatgtggtttaattcgaagcaacgcgaagaaccttaccaggtcttgacatcctttgaagcttctagagatagaagtgttctcttcggagacaaagtgacaggtggtgcatggtcgtcgtcagctcgtgtcgtgagatgttgggttaagtcccgcaacgagcgcaacccttattgttagttgccagcattcagttgggcactctagcgagactgccggtgacaaaccggaggaaggcggggacgacgtcagatcatcatgccccttatgacctgggctacacacgtgctacaatggcgtatacaacgagttgccaacccgcgagggtgagctaatctcttaaagtacgtctcagttcggactgcagtctgcaactcgactgcacgaagtcggaatcgctagtaatcgcggatcagcacgccgcggtgaatacgttcccgggtcttgtacacaccgcccgtcacaccatgggagtttgtaatgcccaaagccggtggcctaaccttatggagggagccgtctaaggcaggacaga

SEQ ID NO: 1183 - DNA, 1555 bp, Leuconostoc mesenteroides
ttcaaattgagagtttgatcctggctcaggatgaacgctggcggcgtgcctaatacatgcaagtcgaacgcatagcgaaaggtgcttgcacctttcaagtgagtggcgaacgggtgagtaacacgtggacaacctgcctcaaggctggggataacatttggaaacagatgctaataccgaataaaacttagtgtcgcatgacacaaagttaaaaggcgcttcggcgtcacctagagatggatccgcggtgcattagttagttggtggggtaaaggcctaccaagacaatgatgcatagccgagttgagagactgatcggccacattgggactgagacacggcccaaactcctacgggaggctgcagtagggaatcttccacaatgggcgaaagcctgatggagcaacgccgcgtgtgtgatgaaggctttcgggtcgtaaagcactgttgtatgggaagaacagctagaataggaaatgattttagtttgacggtaccataccagaaagggacggctaaatacgtgccagcagccgcggtaatacgtatgtcccgagcgttatccggatttattgggcgtaaagcgagcgcagacggtttattaagtctgatgtgaaagcccggagctcaactccggaatggcattggaaactggttaacttgagtgcagtagaggtaagtggaactccatgtgtagcggtggaatgcgtagatatatggaagaacaccagtggcgaaggcggcttactggactgcaactgacgttgaggctcgaaagtgtgggtagcaaacaggattagataccctggtagtccacaccgtaaacgatgaacactaggtgttaggaggtttccgcctcttagtgccgaagctaacgcattaagtgttccgcctggggagtacgaccgcaaggttgaaactcaaaggaattgacggggacccgcacaagcggtggagcatgtggtttaattcgaagcaacgcgaagaaccttaccaggtcttgacatcctttgaagcttttagagatagaagtgttctcttcggagacaaagtgacaggtggtgcatggtcgtcgtcagctcgtgtcgtgagatgttgggttaagtcccgcaacgagcgcaacccttattgttagttgccagcattcagatgggcactctagcgagactgccggtgataaaccggaggaaggcggggacgacgtcagatcatcatgccccttatgacctgggctacacacgtgctacaatggcgtatacaacgagttgccaacccgcgagggtgagctaatctcttaaagtacgtctcagttcggattgtagtctgcaactcgactacatgaagtcggaatcgctagtaatcgcggatcagcacgccgcggtgaatacgttcccgggtcttgtacacaccgcccgtcacaccatgggagtttgtaatgcccaaagccggtggcctaaccttttaggaaggagccgtctaaggcaggacagatgactggggtgaagtcgtaacaaggtagccgtaggagaacctgcggctggatcacctcctttct

SEQ ID NO: 1184 - DNA, 1448 bp, Leuconostoc pseudomesenteroides
gcggcgtgcctaatacatgcaagtcgaacgcacagcgaaaggtgcttgcacctttcaagtgagtggcgaacgggtgagtaacacgtggacaacctgcctcaaggctggggataacatttggaaacagatgctaataccgaataaaactcagtgtcgcatgacacaaagttaaaaggcgctttggcgtcacctagagatggatccgcggtgcattagttagttggtggggtaaaggcctaccaagacaatgatgcatagccgagttgagagactgatcggccacattgggactgagacacggcccaaactcctacgggaggctgcagtagggaatcttccacaatgggcgaaagcctgatggagcaacgccgcgtgtgtgatgaaggctttcgggtcgtaaagcactgttgtatgggaagaacagctagaatagggaatgattttagtttgacggtaccataccagaaagggacggctaaatacgtgccagcagccgcggtaatacgtatgtcccgagcgttatccggatttattgggcgtaaagcgagcgcagacggttaattaagtctgatgtgaaagcccggagctcaactccggaatggcattggaaactggttaacttgagtgcagtagaggtaagtggaactccatgtgtagcggtggaatgcgtagatatatggaagaacaccagtggcgaaggcggcttactggactgtaactgacgttgaggctcgaaagtgtgggtagcaaacaggattagataccctggtagtccacaccgtaaacgatgaacactaggtgttaggaggtttccgcctcttagtgccgaagctaacgcattaagtgttccgcctggggagtacgaccgcaaggttgaaactcaaaggaattgacggggacccgcacaagcggtggagcatgtggtttaattcgaagcaacgcgaagaaccttaccaggtcttgacatcctttgaagcttttagagatagaagtgttctcttcggagacaaagtgacaggtggtgcatggtcgtcgtcagctcgtgtcgtgagatgttgggttaagtcccgcaacgagcgcaacccttattgttagttgccagcattcagatgggcactctagcgagactgccggtgacaaaccggaggaaggcggggacgacgtcagatcatcatgccccttatgacctgggctacacacgtgctacaatggcgtatacaacgagttgccaacccgcgagggtgagctaatctcttaaagtacgtctcagttcggattgtagtctgcaactcgactacatgaagtcggaatcgctagtaatcgcggatcagcacgccgcggtgaatacgttcccgggtcttgtacacaccgcccgtcacaccatgggagtttgtaatgcccaaagccggtggcctaaccttttagggggagccgtctaaggcaggaca

SEQ ID NO: 1185 - DNA, 1549 bp, Listeria grayi
gagagtttgatcctggctcaggacgaacgctggcggcgtgcctaatacatgcaagtcgaacgaatgaccttaggagcttgctcctttggtcgttagtggcggacgggtgagtaacacgtgggcaacctgcctgtaagattgggataactccgggaaaccggagctaataccgaataataatcagctccgcatggagcgggtttgaaaggcggcttcggctgtcacttacagatgggcccgcggtgcattagctagttggtggggtaaaggcctaccaaggcgacgatgcatcgccgacctgagagggtgatcggccacactgggactgagacacggcccagactcctccgggaggcagcagtagggaatcttccgcaatggacgaaagtctgacggagcaacgccgcgtgtgtgaagaaggttttcggatcgtaaagcactgttgttagagaagaacaaggataagagtaactgcttgtcccttgacggtatctaaccagaaagccacggctaactacgtgccagcagccgcggtaatacgtaggtggcaagcgttgtccggaattattgggcgtaaagcgcgcgcaggcggtttcttaagtctgatgtgaaagcccccggcttaaccggggagggtcattggaaactgggagacttagagtgcagaagaggagagtggaattccatgtgtagcggtgaaatgccgagatatatggaggaacaccagtggcgaaggcgactctctggtctgtaactgacgctgaggcgcgaaagcgtggggagcaaacaggattagataccctggtagtccacgccgtaaacgatgagtgctaagtgttagggggtttccgccccttagtgctgcagctaacgcattaagcactccgcctggggagtacgaccgcaaggttgaaactcaaaggaattgacgggggcccgcacaagcggtggagcatgtggtttaattcgaagcaacgcgaagaaccttaccaggtcttgacatcctttgaccactctggagacagagctttcccttcggggacaaagtgacaggtggtgcatggttgtcgtcagctcgtgtcgtgagatgttgggttaagtcccgcaacgagcgcaacccttgattttagttgccagcatttagttgggcactctaaagtgactgacggtgcaagccggaggaaggtggggatgacgtcaaatcatcatgccccttatgacctgggctacacacgtgctacaatggatgatacaaagggtcgcgaagccgcgaggtgaagctaatcccataaaatcattctcagttcggattgtaggctgcaactcgcctacatgaagccggaatcgctagtaatcgcggatcagcatgccgcggtgaatacgttcccgggccttgtacacaccgcccgtcacaccacgagagtttgtaacacccgaagtcggtagggtaacctttatggagccagccgccgaaggtgggacagataattggggtgaagtcgtaacaaggtagccgtatcggaaggtgcggctggatcacctcctttct

SEQ ID NO: 1186 - DNA, 1514 bp, Listeria innocua
agagtttgatcctggctcaggacgaacgctggcggcgtgcctaatacatgcaagtcgaacgaacggaggaagagcttgctcttccaatgttagtggcggacgggtgagtaacacgtgggcaacctgcccgtaagttggggataactccgggaaaccggggctaataccgaatgatagagtgtgacgcatgtcacactcttgaaagatggtttcggctatcgcttacagatgggcccgcggtgcattagctagttggtagggtaaaggcctaccaaggcaacgatgcatagccgacctgagagggtgatcggccacactgggactgagacacggcccagactcctacgggaggcagcagtagggaatcttccgcaatggacgaaagtctgacggagcaacgccgcgtgtatgaagaaggttttcggatcgtaaagtactgttgttagagaagaacaaggataagagtaactgcttgtcccttgacggtatctaaccagaaagccacggctaactacgtgccagcagccgcggtaatacgtaggtggcaagcgttgtccggatttattgggcgtaaagcgcgcgcaggcggtcttttaagtctgatgtgaaagcccccggcttaaccggggagggtcattggaaactggaagactggagtgcagaagaggagagtggaattccccgtgtatcgctgaaatgcgtagatatgtggaggaacaccagtggcgaaggcgactctctggtctgtaactgacgctgaggcgcgaaagcgtggggagcaaacaggattagataccctggtagtccacgccgtaaacgatgagtgctaagtgttagggggtttccgccccttagtgctgcagctaacgcattaagcactccgcctggggagtacgaccgcaaggttgaaactcaaaggaattgacgggggcccgcacaagcggtggagcatgtggtttaattcgaagcaacgcgaagaaccttaccaggtcttgacatcctttgaccactctggagacagagctttcccttcggggacaaagtgacaggtggtgcatggttgtcgtcagctcgtgtcgtgagatgttgggttaagtcccgcaacgagcgcaacccttgattttagttgccagcatttagttgggcactctaaagtgactgccggtgcaagccggaggaaggtggggatgacgtcaaatcatcatgccccttatgacctgggctacacacgtgctacaatggatggtacaaagggtcgcgaagccgcgaggtggagccaatcccataaaaccattctcagttcggattgtaggctgcaactcgcctacatggagccggaatcgctagtaatcgcggatcagcatgccgcggtgaatacgttcccgggccttgtacacaccgcccgtcacaccacgagagtttgtaacacccgaagtcggtagggtaacctttatggagccagccgccgaaggtgggacagataattggggtgaagtcgtaacaaggtaaccgta

SEQ ID NO: 1187 - DNA, 1487 bp, Listeria ivanovii
  modified_base (251)..(251): a, c, t, g, unknown or other
  modified_base (533)..(533): a, c, t, g, unknown or other
  modified_base (573)..(573): a, c, t, g, unknown or other
  modified_base (593)..(593): a, c, t, g, unknown or other
  modified_base (602)..(602): a, c, t, g, unknown or other
  modified_base (621)..(621): a, c, t, g, unknown or other
  modified_base (629)..(630): a, c, t, g, unknown or other
  modified_base (654)..(654): a, c, t, g, unknown or other
  modified_base (742)..(742): a, c, t, g, unknown or other
  modified_base (829)..(829): a, c, t, g, unknown or other
  modified_base (853)..(853): a, c, t, g, unknown or other
  modified_base (887)..(887): a, c, t, g, unknown or other
  modified_base (968)..(968): a, c, t, g, unknown or other
  modified_base (983)..(983): a, c, t, g, unknown or other
  modified_base (1025)..(1025): a, c, t, g, unknown or other
  modified_base (1052)..(1052): a, c, t, g, unknown or other
  modified_base (1057)..(1057): a, c, t, g, unknown or other
  modified_base (1060)..(1060): a, c, t, g, unknown or other
  modified_base (1091)..(1091): a, c, t, g, unknown or other
  modified_base (1171)..(1171): a, c, t, g, unknown or other
  modified_base (1193)..(1193): a, c, t, g, unknown or other
  modified_base (1325)..(1325): a, c, t, g, unknown or other
  modified_base (1371)..(1371): a, c, t, g, unknown or other
  modified_base (1401)..(1401): a, c, t, g, unknown or other
  modified_base (1444)..(1444): a, c, t, g, unknown or other
gagagtttgatcctggctcaggacgaacgctggcggcgtgcctaatacatgcaagtcgaacgaacggaggaagagcttgctcttccaatgttagtggcggacgggtgagtaacacgtgggcaacctgcctgtaagttggggataactccgggaaaccggggctaataccgaatgataagtagtgacgcatgtcatcactttgaaagatggtttcgctatcgcttacagatgggcccgcggtgcattagctngttggtagggtaaaggcctaccaaggcaacgatgcatagccgacctgagagggtgatcggccacactgggactgagacacggcccagactcctacgggaggcagcagtagggaatcttccgcaatggacgaaagtctgacggagcaacgccgcgtgtatgaagaaggttttcggatcgtaaagtactgttgttagagaagaacaaggataagagtaactgcttgtcccttgacggtatctaaccagaaagccacggctaactacgtgccagcagccgcggtnatacgtaggtggcaagcgttgtccggatttattgggcgtnaagcgcgcgcaggcggtctnttaagtctnatgtgaaagcccccggctnaaccgggnngggtcattggaaactggaagactngagtgcagaagaggagagtggaattccacgtgtagcggtgaaatgcgtagatatgtggaggaacaccagtggcgaaggcgactctctngtctgtaactgacgctgaggcgcgaaagcgtggggagcaaacaggattagataccctggtagtccacgccgtaaacgatgagtgctnagtgttagggggtttccgcccctnagtgctgcagctaacgcattaagcactccgcctngggagtacgaccgcaaggttgaaactcaaaggaattgacgggggccgcacaagcggtggagcatgtggtttaattcgaagnaacgcgaagaacctnaccaggtcttgacatcctttgaccactctggagacagagctntccttcggggacaaagtgacaggtggngcatngtngtcgtcagctcgtgtcgtgagatgttgggtnaagtcccgcaacgagcgcaacccttgattttagttgccagcatttagttgggcactctaaagtgactgccggtgcaagcnggaggaaggtggggatgacgtnaaatcatcatgccccttatgacctgggctacacacgtgctacaatggatggtacaaagggtcgcgaagccgcgaggtggagccaatcccataaaaccattctcagttcggattgtaggctgcaactcgcctncatgaagccggaatcgctagtaatcgcggatcagcatgccgcggtnaatacgttcccgggccttgtacacaccgcncgtcacaccacgagagtttgtaacacccgaagtcggtagggtnaccttttaggagccagccgccgaaggtgggacagatgattggg

SEQ ID NO: 1188 - DNA, 1556 bp, Listeria monocytogenes
attttaaagagagtttgatcctggctcaggacgaacgctggcggcgtgcctaatacatgcaagtcgaacgaacggaggaagagcttgctcttccaaagttagtggcggacgggtgagtaacacgtgggcaacctgcctgtaagttggggataactccgggaaaccggggctaataccgaatgatagaatgtggcgcatgccacgcttttgaaagatggtttcggctatcgcttacagatgggcccgcggtgcattagctagttggtagggtaatggcctaccaaggcaacgatgcatagccgacctgagagggtgatcggccacactgggactgagacacggcccagactcctacgggaggcagcagtagggaatcttccgcaatggacgaaagtctgacggagcaacgccgcgtgtatgaagaaggttttcggatcgtaaagtactgttgttagagaagaacaaggataagagtaactgcttgtcccttgacggtatctaaccagaaagccacggctaactacgtgccagcagccgcggtaatacgtaggtggcaagcgttgtccggatttattgggcgtaaagcgcgcgcaggcggtcttttaagtctgatgtgaaagcccccggcttaaccggggagggtcattggaaactggaagactggagtgcagaagaggagagtggaattccacgtgtagcggtgaaatgcgtagatatgtggaggaacaccagtggcgaaggcgactctctggtctgtaactgacgctgaggcgcgaaagcgtggggagcaaacaggattagataccctggtagtccacgccgtaaacgatgagtgctaagtgttagggggtttccgccccttagtgctgcagctaacgcattaagcactccgcctggggagtacgaccgcaaggttgaaactcaaaggaattgacgggggcccgcacaagcggtggagcatgtggtttaattcgaagcaacgcgaagaaccttaccaggtcttgacatcctttgaccactctggagacagagctttcccttcggggacaaagtgacaggtggtgcatggttgtcgtcagctcgtgtcgtgagatgttgggttaagtcccgcaacgagcgcaacccttgattttagttgccagcatttagttgggcactctaaagtgactgccggtgcaagccggaggaaggtggggatgacgtcaaatcatcatgccccttatgacctgggctacacacgtgctacaatggatagtacaaagggtcgcgaagccgcgaggtggagctaatcccataaaactattctcagttcggattgtaggctgcaactcgcctacatgaagccggaatcgctagtaatcgtggatcagcatgccacggtgaatacgttcccgggccttgtacacaccgcccgtcacaccacgagagtttgtaacacccgaagtcggtagggtaacctttatggagccagccgccgaaggtgggacagataattggggtgaagtcgtaacaaggtagccgtatcggaaggtgcggctggatcacctcctttctaa

SEQ ID NO: 1189 - DNA, 1555 bp, Listeria welshimeri
tattttaaagagagtttgatcctggctcaggacgaacgctggcggcgtgcctaatacatgcaagtcgaacgaacggaggaagagcttgctcttccaaagttagtggcggacgggtgagtaacacgtgggcaacctgcctgtaagttggggataactccgggaaaccggggctaataccgaataataagtggtggcgcatgccacggctttgaaagatggtttcggctatcgcttacagatgggcccgcggtgcattagctagttggtagggtaatggcctaccaaggcaacgatgcatagccgacctgagagggtgatcggccacactgggactgagacacggcccagactcctacgggaggcagcagtagggaatcttccgcaatggacgaaagtctgacggagcaacgccgcgtgtatgaagaaggttttcggatcgtaaagtactgttgttagagaagaacaaggataagagtaactgcttgtcccttgacggtatctaaccagaaagccacggctaactacgtgccagcagccgcggtaatacgtaggtggcaagcgttgtccggatttattgggcgtaaagcgcgcgcaggcggtcttttaagtctgatgtgaaagcccccggcttaaccggggagggtcattggaaactggaagactggagtgcagaagaggagagtggaattccacgtgtagcggtgaaatgcgtagatatgtggaggaacaccagtggcgaaggcgactctctggtctgtaactgacgctgaggcgcgaaagcgtggggagcaaacaggattagataccctggtagtccacgccgtaaacgatgagtgctaagtgttagggggtttccgccccttagtgctgcagctaacgcattaagcactccgcctggggagtacgaccgcaaggttgaaactcaaaggaattgacgggggcccgcacaagcggtggagcatgtggtttaattcgaagcaacgcgaagaaccttaccaggtcttgacatcctttgaccactctggagacagagctttcccttcggggacaaagtgacaggtggtgcatggttgtcgtcagctcgtgtcgtgagatgttgggttaagtcccgcaacgagcgcaacccttaattttagttgccagcatttagttgggcactctaaagtgactgccggtgcaagccggaggaaggtggggatgacgtcaaatcatcatgccccttatgacctgggctacacacgtgctacaatggatggtacaaagggtcgcgaagccgcgaggtggagccaatcccataaaaccattctcagttcggattgtaggctgcaactcgcctacatgaagccggaatcgctagtaatcgtggatcagcatgccacggtgaatacgttcccgggccttgtacacaccgcccgtcacaccacgagagtttgtaacacccgaagtcggtagggtaacctttatggagccagccgccgaaggtgggacagataattggggtgaagtcgtaacaaggtagccgtatcggaaggtgcggctggatcacctcctttct

SEQ ID NO: 1190 - DNA, 1247 bp, Luteococcus sanguinis
aacgggtgagtaacacgtgagtaacctgccccaaactctgggataacagtcggaaacggctgctaataccggatatggaaaggcggtttgggatggactcgcggcctatcagcttgttggtgaggtagtggctcaccaaggcttcgacgggtagccggcctgagagggcgaccggccacattgggactgagatacggcccaaactcctacgggaggcagcagtggggaatattgcacaatgggcgaaagcctgatgcagcaacgccgcgtgcgggatgacggccttcgggttgtaaaccgctttcagcgcagacgatgacggtatgcgcagaagaagcaccggccaactacgtgccagcagccgcggtgatacgtagggtgcgagcgttgtccggaattattgggcgtaaagagcttgtaggcggtttgttgcgtcagaagtgaaaactcagggcttaaccctgagcctgcttctgatacgggcagactagaggaagttaggggagaacggaattcctggtggagcggtggaatgcgcagatatcaggaggaacaccggtggcgaaggcggttctctgggactcctgacgctgagaagcgaaagcgtggggagcaaacaggcttagataccctggtagtccacgccgtaaacggtgggtactaggtgtgggtcgatccgtgccgcagctaacgcattaagtaccccgcctggggagtacggccgcaaggctaaaactcaaaggaattgacggggccccgcacaagcggcggagcatgcggattaattcgatgcaacgcgaagaaccttacctgggtttgacatgcacaggtggtgcatggctgtcgtcagctcgtgtcgtgagatgttgggttaagtcccgcaacgagcgcaaccctcgtccaatgttgccagcggccggggactcattggagaccgccggggtcaactcggaggaaggtggggatgacgtcaagtcatcatgccccttatgtccagggcttcacgcatgctacaatggccggcaaagggctgcgaacctgcaagggtgagcgaatcccaaccggtctcagttcggatggggtctgcaactcgaccccagaagtcggagtcgctagtaatcgcagatcagcaacgctgcggtgaatacgttcccggggcttgtacacaccgcccgtcaagtcatgaaagtcggtaacacccgaagccggtgcctagggagccgtcgaaggtgggaccggtaattagg

SEQ ID NO: 1191 - DNA, 1438 bp, Lutispora thermophila
gacgaacgctggcggcgtgcctaacacatgcaagtcgaacggagatggtgggatagcttgctattttatcatcttagtggcggacgggtgagtaacacgtgggcaacctgccctaaagagggggataacaccgagaaatcggtgctaataccgcatgaaattagagtttcgcatgaagctttaatcaaaggagcaatccgctttaggatgggcccgcgtctgattagctagttggtgaggtaacggctcaccaaggcgacgatcagtagccgatctgagaggatgaccggccacactggaactgagacacggtccagactcctacgggaggcagcagtggggaatattgcacaatgggggaaaccctgatgcagcaacgccgcgtggaggaagaaggtcttcggattgtaaactcctgtcttctgggacgaaatatgacggtaccagaggaggaagccacggctaactacgtgccagcagccgcggtaatacgtaggtggcgagcgttgtccggaattactgggcgtaaagggcgcgtaggcggcctgttaagtcagatgtgaaaaccccgggctcaacctggggagtgcatttgaaactgatgggctagagtgtcggagagggaagcggaattcctagtgtagcggtgaaatgcgtagatattaggaggaacaccagtggcgaaggcggctttctggacgataactgacgctgaggcgcgaaagcgtggggagcaaacaggattagataccctggtagtccacgctgtaaacgatggatactaggtgtgggaggtatcgaccccttccgtgccgcagtaaacgcaataagtatcccgcctggggagtacggccgcaaggttgaaactcaaaggaattgacgggggcccgcacaagcagcggagcatgtggtttaattcgaagcaacgcgaagaaccttaccagagcttgacatctcctgcatagtccgtaatgggatgaagtccttcgggacaggaagacaggtggtgcatggttgtcgtcagctcgtgtcgtgagatgttgggttaagtcccgcaacgagcgcaacccttatacttagttgccatcattaagttgggcactctaagtagactgccggagacaattcggaggaaggtggggatgacgtcaaatcatcatgccccttatgttctgggctacacacgtgctacaatgggtataacaacgggaagcaagccagtgatggtaagcaaatccctaaaaagtactcccagttcagattgttctctgaaactcgagaacatgaagtcggagttgctagtaatcgcgaatcagcatgtcgcggtgaatacgttcccgggccttgtacacaccgcccgtcacaccatgggagttggaagcacccgaagccggtgacttaaccgcaaggagagagccgtcgaaggtgaagccaatga

SEQ ID NO: 1192 - DNA, 1356 bp, Lysinibacillus fusiformis
ggggaaaccggggctaataccgaataatctgtttcacctcatggtgaaacactgaaagacggtttcggctgtcgctataggatgggcccgcggcgcattagctagttggtgaggtaacggctcaccaaggcgacgatgcgtagccgacctgagagggtgatcggccacactgggactgagacacggcccagactcctacgggaggcagcagtagggaatcttccacaatgggcgaaagcctgatggagcaacgccgcgtgagtgaagaaggatttcggttcgtaaaactctgttgtaagggaagaacaagtacagtagtaactggctgtaccttgacggtaccttattagaaagccacggctaactacgtgccagcagccgcggtaatacgtaggtggcaagcgttgtccggaattattgggcgtaaagcgcgcgcaggtggtttcttaagtctgatgtgaaagcccacggctcaaccgtggagggtcattggaaactgggagacttgagtgcagaagaggatagtggaattccaagtgtagcggtgaaatgcgtagagatttggaggaacaccagtggcgaaggcgactatctggtctgtaactgacactgaggcgcgaaagcgtggggagcaaacaggattagataccctggtagtccacgccgtaaacgatgagtgctaagtgttagggggtttccgccccttagtgctgcagctaacgcattaagcactccgcctggggagtacggtcgcaagactgaaactcaaaggaattgacgggggcccgcacaagcggtggagcatgtggtttaattcgaagcaacgcgaagaaccttaccaggtcttgacatcccgttgaccactgtagagatatggtttccccttcgggggcaacggtgacaggtggtgcatggttgtcgtcagctcgtgtcgtgagatgttgggttaagtcccgcaacgagcgcaacccttgatcttagttgccatcatttagttgggcactctaaggtgactgccggtgacaaaccggaggaaggtggggatgacgtcaaatcatcatgccccttatgacctgggctacacacgtgctacaatggacgatacaaacggttgccaactcgcgagagggagctaatccgataaagtcgttctcagttcggattgtaggctgcaactcgcctacatgaagccggaatcgctagtaatcgcggatcagcatgccgcggtgaatacgttcccgggccttgtacacaccgcccgtcacaccacgagagtttgtaacacccgaagtcggtgaggtaaccttttggagccagccgccgaaggtgggatagatgattggggtgaagtcgtaa

SEQ ID NO: 1193 - DNA, 1541 bp, Lysinibacillus sphaericus
agagtttgatcctggctcaggacgaacgctggcggcgtgcctaatacatgcaagtcgagcgaacagagaaggagcttgctcctttgacgttagcggcggacgggtgagtaacacgtgggcaacctaccttatagtttgggataactccgggaaaccggggctaataccgaataatctatttcacctcatggtgaattattgaaagacggtttcggctgtcgctataggatgggcccgcggcgcattagctagttggtgaggtaacggctcaccaaggcgacgatgcgtagccgacctgagagggtgatcggccacactgggactgagacacggcccagactcctacgggaggcagcagtagggaatcttccacaatgggcgaaagcctgatggagcaacgccgcgtgagtgaagaaggatttcggttcgtaaaactctgttgtaagggaagaacaagtacagtagtaactggctgtaccttgacggtaccttattagaaagccacggctaactacgtgccagcagccgcggtaatacgtaggtggcaagcgttgtccggaattattgggcgtaaagcgcgcgcaggtggtttcttaagtctgatgtgaaagcccacggctcaaccgtggagggtcattggaaactgggagacttgagtgcagaagaggatagtggaattccaagtgtagcggtgaaatgcgtagagatttggaggaacaccagtggcgaaggcgactatctggtctgtaactgacactgaggcgcgaaagcgtggggagcaaacaggattagataccctggtagtccacgccgtaaacgatgagtgctaagtgttagggggtttccgccccttagtgctgcagctaacgcattaagcactccgcctggggagtacggtcgcaagactgaaactcaaaggaattgacgggggcccgcacaagcggtggagcatgtggtttaattcgaagcaacgcgaagaaccttaccaggtcttgacatcccgttgacactgtaagatatggtttccccttcgggggcacggtgacaggtggtgcatggattgtcgtcagctcgtgtcgtgagatgttgggttaagtcccgcaacgagcgcaaccttgatcttagttgccatcatttagttgggcactctaaggtgactgccggtgacaaaccggaggaaggtggggatgacgtcaaatcatcatgccccttatgacctgggctacacacgtgctacaatggacgatacaaacggttgccaactcgcgagagggagctaatccgataaagtcgttctcagttcggattgtaggctgcaactcgcctacatgaagccggaatcgctagtaatcgcggatcagcatgccgcggtgaatacgttcccgggccttgtacacaccgtccgtcacaccacgagagtttgtaacacccgaagtcggtgaggtaaccttttggagccagccgccgaaggtgggatagatgattggggtgaagtcgtaacaaggtagccgtatcggaaggtgcggctggatcacctcctt

SEQ ID NO: 1194 - DNA, 1547 bp, Macrococcus caseolyticus
agagtttgatcctggctcaggatgaacgctggcggcgtgcctaatacatgcaagtcgagcgaacggacgagagtgcttgcactctctgatgttagcggcggacgggtgagtaacacgtgggtaacctacctataagactgggataacttcgggaaaccggagctaataccggataatatttagcttcgcatgaagcaatagtgaaagacggttctgctgtcacttatagatggacccgcggtgtattagctagttggtgaggtaacggctcaccaaggcaacgatacatagccgacctgagagggtgatcggccacactgggactgagacacggcccagactcctacgggaggcagcagtagggaatcttccgcaatggacgaaagtctgacggagcaacgccgcgtgagtgaagaaggttttcggatcgtaaaactctgttgtaagggaagaacaagtacgttagtaactgaacgtaccttgacggtaccttaccagaaagccacggctaactacgtgccagcagccgcggtaatacgtaggtggcaagcgttatccggaattattgggcgtaaagcgcgcgtaggcggtctcttaagtctgatgtgaaagcccccggctcaaccggggagggtcattggaaactgggagacttgagtgcagaagaggagagtggaattccatgtgtagcggtgaaatgcgcagagatatggaggaacaccagtggcgaaggcggctctctggtctgtaactgacgctgaggtgcgaaagcgtggggatcaaacaggattagataccctggtagtccacgccgtaaacgatgagtgctaagtgttggggggtttccgcccctcagtgctgcagctaacgcattaagcactccgcctggggagtacggtcgcaagactgaaactcaaaggaattgacggggacccgcacaagcggtggagcatgtggtttaattcgaagcaacgcgaagaaccttaccaaatcttgacatcctttgacaactctagagatagagctttccccttcgggggacaaagtgacaggtggtgcatggttgtcgtcagctcgtgtcgtgagatgttgggttaagtcccgcaacgagcgcaacccttatctttagttgccatcattaggttgggcactctagagagactgccggtgacaaaccggaggaaggtggggatgacgtcaaatcatcatgccccttatgatttgggctacacacgtgctacaatggatggtacaaagggcagcaaaaccgcgaggtcaagcaaatcccataaaaccattctcagttcggattgtagtctgcaactcgactacatgaagctggaatcgctagtaatcgtagatcagcatgctacggtgaatacgttcccgggtcttgtacacaccgcccgtcacaccacgagagtttgtaacacccgaagccggtggagtaaccttttaggagctagccgtcgaaggtgggacagatgattggggtgaagtcgtaacaaggtagccgtatcggaaggtgcggctggatcacctccttt

SEQ ID NO: 1195 - DNA, 1516 bp, Mannheimia haemolytica
agagtttgatcatggctcagattgaacgctggcggcaggcttaacacatgcaagtcgaacggtagcacataggagtttgctccttgggtgacgagtggcggacgggtgagtaatgcttgggaatctggcttatggagggggataactactggaaacggtagctaataccgcgtaatgtcttaggactaaagggtgggaccatttggccacctgccataagatgagcccaagtgggattaggtagttggtgaggtaaaggctcaccaagcccgcgatctctagctggtctgagaggatgaccagccacactggaactgagacacggtccagactcctacgggaggcagcagtggggaatattgcacaatggggggaaccctgatgcagccatgccgcgtgaatgaagaaggccttcgggttgtaaagttctttcggtgacgaggaaggcgattgttttaatagaacagtcgattgacgttaatcacagaagaagcaccggctaactccgtgccagcagccgcggtaatacggggggtgcgagcgttaatcggaataactgggcgtaaagggcacgcaggcggttgtttaagtgaggtgtgaaagccccgggcttaacctgggaattgcatttcagactgaacaactagagtactttagggaggggtagaattccacgtgtagcggtgaaatgcgtagagatgtggaggaataccgaaggcgaaggcagccccttggaaatgtactgacgctcatgtgcgaaagcgtggggagcaaacaggattagataccctggtagtccacgccgtaaacgctgtcgatttggggattggggtttaactctggtgcccgtagctaacgtgataaatcgaccgcctggggagtacggccgcaaggttaaaactcaaatgaattgacgggggcccgcacaagcggtggagcatgtggtttaattcgatgcaacgcgaagaaccttacctactcttgacatccatggaatcttgtagagatatgagagtgccttcgggaaccatgagacaggtgctgcatggctgtcgtcagctcgtgttgtgaaatgttgggttaagtcccgcaacgagcgcaacccttatcctttgttgccagcgattaggtcgggaactcaaaggagactgccggtgataaaccggaggaaggtggggatgacgtcaagtcatcatggcccttacgagtagggctacacacgtgctacaatggcgtatacagagggcggcgagccagcgatggggagcgaatctcagaaagtacgtctaagtccggattggagtctgcaactcgactccatgaagtcggaatcgctagtaatcgcaaatcagaatgttgcggtgaatacgttcccgggccttgtacacaccgcccgtcacaccatgggagtgggttgtaccagaagtagatagcttaaccgaaaggggggcgtttaccacggtatgattcatgactggggtgaagtcgtaacaaggtaaccgtaggggaacctgcg

SEQ ID NO: 1196 - DNA, 1300 bp, Marvinbryantia formatexigens
tggcggcgtgcttaacacatgcaagtcgagcgagcggcggacgggtgagtaacgcgtggataacctgccttatacagggggataacagccagaaatggctgctaataccgcataagaaaaagtggtataagatgggtccgcgttggattaggcagttggcggggtaaaggcccaccaaaccgacgatccatagccggcctgagagggtggacggccacattgggactgagacacggcccagactcctacgggaggcagcagtggggaatattgcacaatgggggaaaccctgatgcagcgacgccgcgtgggtgaagaagtatttcggtatgtaaagccctatcagcagggaagatgacggtacctgaccaagaagccccggctaactacgtgccagcagccgcggtaatacgtagggggcaagcgttatccggatttactgggtgtaaagggagcgtagacggccatgcaagtctggtgtgaaaggcgggggctcaacccccggactgcattggaaactgtatggcttgagtgccggagaggtaagcggaattcctggtgtagcggtgaaatgcgtagatatcaggaggaacaccagtggcgaaggcggcttactggacggactgacgttgaggctcgaaagcgtggggagcaaacaggattagataccctggtagtccacgccgtaaacgatgaataccaggtgtcggggcttcggtgccgcagcaaacgcactaagtattccacctggggagtacgttcgcaagaatgaaactcaaaggaattgacggggacccgcacaagcggtggagcatgtggtttaattcgaagcaacgcgaagaaccttaccaggtcttgacatcgacaggtggtgcatggttgtcgtcagctcgtgtcgtgagatgttgggttaagtcccgcaacgagcgcaacccctgttcccagtagccagcatatgggcactctggggagactgccagggataacctggaggaaggcggggatgacgtcaaatcatcatgccccttatgatctgggctacacacgtgctacaatggcgtgcagagggaagcgaacccgcgagggggagcaaatcccagaacgtcccagttcggatgtagtctgcaacccggctacagaagctggaatcgctagtaatcgcggatcagcatgccgcggtgaatacgttcccgggtcttgtacacaccgcccgtcacaccatgggagtcggaaatgcccgaagtcagtacccagggagctgccgaaggcggggccggtaactggggtgaagtcgtaacaa

SEQ ID NO: 1197 - DNA, 1450 bp, Massilia sp.
  CCUG 43427A
acgctggcggcatgctttacacatgcaagtcgaacggtaacagggagcttgctccgctgacgagtggcgaacgggtgagtaatatatcggaacgtacccagaagtgggggataacgtagcgaaagttacgctaataccgcatacgatccacggatgaaagtaggggaccttcgggccttatgcttttggagcggccgatatctgattagctagttggtagggtaaaggcctaccaaggcgacgatcagtagctggtctgagaggacgaccagccacactggaactgagacacggtccagactcctacgggaggcagcagtggggaattttggacaatgggcgcaagcctgatccagcaatgccgcgtgagtgaagaaggccttcgggttgtaaagctcttttgtcagggaagaaacggtagaggctaatatcctttgctaatgacggtacctgaagaataagcaccggctaactacgtgccagcagccgcggtaatacgtagggtgcaagcgttaatcggaattactgggcgtaaagcgtgcgcaggcggttttgtaagtctgacgtgaaatccccgggctcaacctgggaattgcgttggagactgcaaggctagaatctggcagaggggggtagaattccacgtgtagcagtgaaatgcgtagagatgtggaggaacaccgatggcgaaggcagccccctgggtcaagattgacgctcatgcacsaaagcgtggggagcaaacaggattagataccctggtagtccacgccctaaacgatgtctactagttgtcgggttttaattaacttggtaacgcagctaacgcgtgaagtagaccgcctggggagtacggtcgcaagattaaaactcaaaggaattgacggggacccgcacaagcggtggatgatgtggattaattcgatgcaacgcgaaaaaccttacctacccttgacatgtacggaatgccgaagagatttggcagtgctcgaaagagaaccgtaacacaggtgctgcatggctgtcgtcagctcgtgtcgtgagatgttgggttaagtcccgcaacgagcgcaacccttgtcattagttgctacattcagttgagcactctaatgagactgccggtgacaaaccggaggaaggtggggatgacgtcaagtcctcatggcccttatgggtagggcttcacacgtcatacaatggtacatacagagggccgccaacccgcgagggggagctaatcccagaaagtgtatcgtagtccggatcgtagtctgcaactcgactacgtgaagttggaatcgctagtaatcgcggatcagcatgccgcggtgaatacgttcccgggtcttgtacacaccgcccgtcacaccatgggagcgggttttaccagaagtaggtagcttaaccgcaaggagggcgcttaccacggtaggattcgtgactgggg

SEQ ID NO: 1198 - DNA, 1342 bp, Megamonas funiformis
ctttgacataagcttccgcttgaagatgagcttgcgtctgattagctagttggtgagggtaaaggcccaccaaggcgacgatcagtagccggtctgagaggatgaacggccacattgggactgagacacggcccagactcctacgggaggcagcagtggggaatcttccgcaatgggcgaaagcctgacggagcaacgccgcgtgaacgatgaaggtcttaggatcgtaaagttctgttgttagggacgaaggataaggattataatacagtctttgtttgacggtacctaacgaggaagccacggctaactacgtgccagcagccgcggtaatacgtaggcggcaagcgttgtccggaattattgggcgtaaagggagcgcaggcgggaaactaagcggatcttaaaagtgcggggctcaaccccgtgatggggtccgaactggttttcttgagtgcaggagaggaaagcggaattcccagtgtagcggtgaaatgcgtagatattgggaagaacaccagtggcgaaggcggctttctggactgtaactgacgctgaggctcgaaagctagggtagcgaacgggattagataccccggtagtcctagccgtaaacgatggatactaggtgtgggaggtatcgactccttccgtgccggagttaacgcaataagtatcccgcctggggagtacggccgcaaggttgaaactcaaaggaattgacgggggcccgcacaagcggtggagtatgtggtttaattcgacgcaacgcgaagaaccttaccaagacttgacattgattgaaagacttagagataagttccttctcttcggagaacaagaaaacaggtggtgcatggctgtcgtcagctcgtgtcgtgagatgttgggttaagtcccgcaacgagcgcaacccctatactatgttgccagcatttcggatgggaactcatagtagactgccgcggacaacgcggaggaaggcggggatgacgtcaagtcatcatgccccttacgtcttgggctacacacgtactacaatgggatgaacagagggaagcgaaatcgcgaggtggagcggatccctaaaagcatctctcagttcggattgtaggctgaaactcgcctacatgaagtcggaatcgctagtaatcgcaggtcagcatactgcggtgaatacgttcccgggccttgtacacaccgcccgtcacaccacgaaagtcattcacacccgaagccggctaagggcctatggtaccgaccgtctaaggtgggggcgatgattggggtgaagtcgtaacaaggtagccgtatcggaaggtgcggctggatcacctcctta

SEQ ID NO: 1199 - DNA, 1518 bp, Megamonas hypermegale
cctggctcaggacgaacgctggcggcgtgcttaacacatgcaagtcgaacggggtgtttatttcggtaaacaccaagtggcgaacgggtgagtaacgcgtaagcaatctaccttcaagatggggacaacacttcgaaaggggtgctaataccgaatgaatgagagatgaccgcatggatatttctctaaaggaggcctctgaaaatgcttccgcttgaagatgagcttgcgtctgattagctagttggtgagggtaaaggcccaccaaggcgacgatcagtagccggtctgagaggatgaacggccacattgggactgagacacggcccagactcctacgggaggcagcagtggggaatcttccgcaatgggcgaaagcctgacggagcaacgccgcgtgaacgaagaaggtcttaggatcgtaaagttctgttgttaggggcgaagggcaacattttgaataagggtgttgtttgacggtacttaacgaggaagccacggctaactacgtgccagcagccgcggtaatacgtaggcggcaagcgttgtccggaattattgggcgtaaagggagcgcaggcgggaagttaagcggactttaaaagtgcggggctcaaccccgtgagggggtccgaactgactttcttgagtgcaggagagggaagcggaattcctagtgtagcggtgaaatgcgtagatattaggaagaacaccagtggcgaaggcggctttctggactgtaactgacgctgaggctcgaaagctagggtagcgaacgggattagataccccggtagtcctagccgtaaacgatggatactaggtgtgggaggtatcgaccccttccgtgccggagttaacgcaataagtatcccgcctggggagtacggccgcaaggttgaaactcaaaggaattgacgggggcccgcacaagcggtggagtatgtggtttaattcgacgcaacgcgaagaaccttaccaagacttgacatcgactgacgtagttagagataagtatttttacttcggtaaacaggaagacaggtggtgcatggctgtcgtcagctcgtgtcgtgagatgttgggttaagtcccgcaacgagcgcaacccctatactatgttgccagcacgtaaaggtgggaactcatagtagactgccgcggacaacgcggaggaaggcggggatgacgtcaagtcatcatgccccttacgtcttgggctacacacgtactacaatgggatgaacagagggaagcgaagtcgcgaggcagagcggaaccctaaaagcatctctcagttcggattgcaggctgaaactcgcctgcatgaagtcggaatcgctagtaatcgcaggtcagcatactgcggtgaatacgttcccgggccttgtacacaccgcccgtcacaccacgaaagtcattcacacccgaagccggctaagggccgaaaggaaccgaccgtcgaaggtgggggcgatgattggggtgaagtcgtaacaaggtagccgtatcggaagg

SEQ ID NO: 1200 - DNA, 1530 bp, Megasphaera elsdenii
  modified_base (895)..(895): a, c, t, g, unknown or other
agagtttgatcctggctcaggacgaacgctggcggcgtgcttaacacatgcaagtcgaacgagaagagatgagaagcttgcttcttatcgattcgagtggcaaacgggtgagtaacgcgtaagcaacctgcccttcagatggggacaacagctggaaacggctgctaataccgaatacgttctttttgtcgcatggcagagagaagaaagggaggctcttcggagctttcgctgaaggaggggcttgcgtctgattagctagttggaggggtaacggcccaccaaggcgacgatcagtagccggtctgagaggatgaacggccacattgggactgagacacggcccagactcctacgggaggcagcagtggggaatcttccgcaatggacgaaagtctgacggagcaacgccgcgtgaacgatgacggccttcgggttgtaaagttctgttatacgggacgaatggcgtacgacggtcaatacccgtcgtaagtgacggtaccgtaagagaaagccacggctaactacgtgccagcagccgcggtaatacgtaggtggcaagcgttgtccggaattattgggcgtaaagggcgcgcaggcggcgtcgtaagtcggtcttaaaagtgcggggcttaaccccgtgaggggaccgaaactgcgatgctagagtatcggagaggaaagcggaattcctagtgtagcggtgaaatgcgtagatattaggaggaacaccagtggcgaaagcggctttctggacgacaactgacgctgaggcgcgaaagccaggggagcaaacgggattagataccccggtagtcctggcggtaaacgatggatactaggtgtaggaggtatcgaccccttctgtgccggagttaacgcaataagtatcccngcctggggagtacggccgcaaaggctgaaactcaaaggaattgacgggggcccgcacaagcggtggagtatgtggtttaattcgacgcacgcgaagaaccttaccaagccttgacattgattgctatgggtagagatacccagttcctcttcggaggacaagaaaacaggtggtgcacggctgtcgtcagctcgtgtcgtgagatgttgggttaagtcccgcaacgagcgcaacccctatcttctgttaccagcgagttaagtcggggactcaggagagactgccgcagacaatgcggaggaaggcggggatgacgtcaagtcatcatgccccttatggcttgggctacacacgtactacaatggctcttaatagagggaagcgaaggagcgatccggagcaaaccccaaaaacagagtcccagttcggattgcaggctgcaactcgcctgcatgaagcaggaatcgctagtaatcgcaggtcagcatactgcggtgaatacgttcccgggccttgtacacaccgcccgtcacaccacgaaagtcattcacacccgaagccggtgaggtaaccttttggagccagccgtcgaaggtgggggcgatgattggggtgaagtcgtaacaaggtaaccg

SEQ ID NO: 1201 - DNA, 1328 bp, Megasphaera sp.
  C1
gacgaacgctggcggcgtgcttaacacatgcaagtcgaacgagtggcaaacgggtgagtaacgcgtaaacaacctgccctacggatggggacaacagctggaaacggctgctaataccgaatacggaaagtcgccggaggaggggtttgcgtctgattagctagttggaggggtaacggcccaccaaggcgacgatcagtagccggtctgagaggatgaacggccacattggaactgagacacggtccagactcctacgggaggcagcagtggggaatcttccgcaatgggcgaaagcctgacggagcaacgccgcgtgagtgaagacggccttcgggttgtaaagctctgttatacgggacgatgacggtaccgtaagagaaagccacggctaactacgtgccagcagccgcggtaatacgtaggtggcaagcgttgtccggaattattgggcgtaaagggcgcgcaggcggcttcttaagtctgtcttaaaagtgcggggcttaaccccgtgatgggatggaaactgggaagctagagtatcggagaggaaagcggaattcctagtgtagcggtgaaatgcgtagatattaggaggaacaccagtggcgaaagcggctttctggacgaactgacgctgaggcgcgaaagccaggggagcgaacgggattagataccccggtggtcctggccgtaaacgatgggtactaggtgtaggagcttctgtgccggagttaacgcaataagtaccccgcctggggagtacggccgcaaggttgaaactcaaaggaattgacgggggcccgcacaagcggtggagtatgtggtttaattcgacgcaacgcgaagaaccttaccaagccttgacattaacaggtggtgcacggctgtcgtcagctcgtgtcgtgagatgttgggttaagtcccgcaacgagcgcaacccctatcttctgttaccagcacgtggggactcaggagagactgccgcagacaatgcgggggaaggcggggatgacgtcaagtcatcatgccccttatggcttgggctacacacgtactacaatggctcttagagggaggcgaaggagcgatccggagcaaaccccaagagtctcagttcggatgtaggctgcaactcgcctacagaagcaggaatcgctagtaatcgcaggtcagcatactgcggtgaatacgttcccgggccttgtacacaccgcccgtcacaccacgaaagtcattcacacccgaagccggtaggtagccagccgtcgaaggtgggggcgatgattggggtgaagtcgtaacaaggtagccgtatcggaaggtgc

SEQ ID NO: 1202 - DNA, 1567 bp, Megasphaera sp.
  type_1
tggagagtttgatcctggctcaggacgaacgctggcggcgtgcttaacacatgcaagtcgaacgagaggacatgggaagcttgcttcctatgaaatcgagtggcaaacgggtgagtaacgcgtaaacaacctgcccttcggatggggataacagccggaaacggctgctaataccgaatacgatcttttcgtcgcatgacggaaagaagaaaggatggcctctatacaaagctatcgccgaaggaggggtttgcgtctgattagctggttggaggggtaacggcccaacaaggcgatgatcagtagccggtctgagaggatgaacggccacattgggactgagacacggcccagactcctacgggaggcagcagtggggaatcttccgcaatggacgaaagtctgacggagcaacgccgcgtgagtgaagaaggtcttcggattgtaaaagctctgttatacgggacgaaaaagacggatgccaacagtatccgtccgtgacggtaccgtaagagaaagccacggctaactacgtgccagcagccgcggtaatacgtaggtggcaagcgttgtccggaattattgggcgtaaagggcgcgcaggcggttcggtaagtctgtcttaaaagtgcggggcttaaccccgtgaggggacggaaactgtcgaacttgagtgtcggagaggaaagcggaattcctagtgtagcggtgaaatgcgtagatattaggaggaacaccggtggcgaaagcggctttctggacgacaactgacgctgaggcgcgaaagcgtggggagcaaacaggattagataccctggtagtccacgccgtaaacgatggatactaggtgtaggaggtatcgaccccttctgtgccgtagttaacgctataagtatcccgcctggggagtacggccgcaaggttgaaactcaaaggaattgacgggggcccgcacaagcggtggagtatgtggtttaattcgacgcaacgcgaagaaccttaccaagccttgacattgatcgcaattttcagagatgagaagttcctcttcggaggacgagaaaacaggtggtgcacggctgtcgtcagctcgtgtcgtgagatgttgggttaagtcccgcaacgagcgcaacccctatcttctgttaccagcacgtaagggtggggactcaggagagactgccgcagacaatgcggaggaaggcggggatgacgtcaagtcatcatgccccttatggcttgggctacacacgtactacaatggctctaaatagagggaagcgaaggagcgatccggagcaaaacccaaaaacagagtcccagttcggattgcaggctgcaactcgcctgcatgaagcaggaatcgctagtaatcgcaggtcagcatactgcggtgaatacgttcccgggccttgtacacaccgcccgtcacaccacgaaagtcattcacacccgaagccggtgaggtaaccgcaaggagccagccgtcgaaggtgggggcgatgattggggtgaagtcgtaacaaggtagccgtatcggaaggtgcggctggatcacctcctttct

SEQ ID NO: 1203 - DNA, 1554 bp, Megasphaera micronuciformis
tggagagtttgatcctggctcaggacgaacgctggcggcgtgcttaacacatgcaagtcgaacgagagcgtagagaaagcttgctttttctacaatctagtggcaaacgggtgagtaacgcgtaaacaacctgccctacggatggggacaacagctggaaacggctgctaataccgaatacgttccgaaagtcgcatgactgtcggaagaaaggatggcctctatttataagctatcgccggaggaggggtttgcgtctgattagctagttggaggggtaacggcccaccaaggcgacgatcagtagccggtctgagaggatgaacggccacattggaactgagacacggtccagactcctacgggaggcagcagtggggaatcttccgcaatgggcgaaagcctgacggagcaacgccgcgtgagtgaagacggccttcgggttgtaaagctctgttatacgggacgaataatcttgtggttaatacccataagaagtgacggtaccgtaagagaaagccacggctaactacgtgccagcagccgcggtaatacgtaggtggcaagcgttgtccggaattattgggcgtaaagggcgcgcaggcggcttcttaagtctgtcttaaaagtgcggggcttaaccccgtgatgggatggaaactgggaagctcagagtatcggagaggaaagcggaattcctagtgtagcggtgaaatgcgtagatattaggaggaacaccagtggcgaaagcggctttctggacgaaaactgacgctgaggcgcgaaagccaggggagcgaacgggattagataccccggtagtcctggccgtaaacgatgggtactaggtgtaggaggtatcgaccccttctgtgccggagttaacgcaataagtaccccgcctggggagtacggccgcaaggttgaaactcaaaggaattgacgggggcccgcacaagcggtggagtatgtggtttaattcgacgcaacgcgaagaaccttaccaagccttgacattgatcgcaaggagtagagatactctgttcttcttcggaagacgagaaaacaggtggtgcacggctgtcgtcagctcgtgtcgtgagatgttgggttaagtcccgcaacgagcgcaacccctatcttctgttaccagcacgtaacggtggggactcaggagagactgccgcagacaatgcggaggaaggcggggatgacgtcaagtcatcatgccccttatggcttgggctacacacgtactacaatggctcttaatagagggaggcgaaggagcgatccggagcaaaccccaaaaacagagtctcagttcggattgtaggctgcaactcgcctacatgaagcaggaatcgctagtaatcgcaggtcagcatactgcggtgaatacgttcccgggccttgtacacaccgcccgtcacaccacgaaagtcattcacacccgaagccggtgaggtaaccgcaaggagccagccgtcgaaggtgggggcgatgattggggtgaagtcgtaacaaggtagccgtatcggaaggtgcggctgg

SEQ ID NO: 1204 - DNA, 1419 bp, Megasphaera sp.
  BLPYG-07
atcctagagtttgatcatggctcaaggacgaacgctggcggcgtgcttaacaacatgcaagtcgaacgagaagagatgagaagcttgcttcttattgattcgagtggcaaacgggtgagtaacgcgtaagcaacctgccctctagatggggacaacagctggaaacggctgctaataccgaatacgttctttctgtcgcatggcagaaggaagaaagggaggctcttcggagctttcgctggaggaggggcttgcgtctgattagctagttggaggggtaacggcccaccaaggcgacgatcagtagccggtctgagaggatgaacgccacatggacacctgagacacggcccagactcctacgggaggcagcagtggggaatcttccgcaatggacgaaagtctgacggagcaacgccgcgtgaacgatgacggccttcgggttgtaaagttctgttatacgggacgaatggtacgacggtcaatacccgtcgtaagtgacggtaccgtaagagaaagccacggctaactacggtgccagcagccgcgcgtaatacgtaggtggcaagcgttgtcggattattgggcgtaagggcgcgcaggcggcgtcgtaagtcggtcttaaaagtgcggggcttaaccccgtgaggggaccgaaactgcgatgctagagtatcggagaggaaagcggaattcctagtgtagcggtgaaatgcgtagatattaggaggaacaccagtggcgaaagcggctttctggacgacaactgacgctgaggcgcgaaagccaggggagcaaacgggattagataccccggtagtcctggccgtaaacgtggatactggtgtaggaggtatcgaccccttctgtgccggagttaacgcaataagtatcccgcctggggagtacggccgcaaggctgaaactcaaaaggaattgacgggggcccgcacaagcggtggagtatgtggtttaattcgacgcaacgcgaagaaccttaccaagccttgacattgattgctaagggtagagataccctgttcctcttcggaggacaagaaaacaggtggtgcacggctgtcgtcagctcgtgtcgtgagatgttgggttaagtcccgcaacgagcgcaacccctatcttctgttaccagcgggttaagtcggggactcaggagagactgccgcagacaatgcggaggaaggcggggatgacgtcaagtcatcatgccccttatggcttgggctacacacgtactacaatggctcttaatagagggaagcgaaggagcgatccggagcaaaccccaaaaacagagtcccagttcggattgcaggctgcaacccgcctgcatgaagcaggaatcgctagtaatcgcaggtcagcaaaatacggtgaatacgttcccgggccttgtacaca

SEQ ID NO: 1205 - DNA, 1566 bp, Megasphaera sp.
  UPII 199-6
tggagagtttgatcctggctcaggacgaacgctggcggcgtgcttaacacatgcaagtcgaacgagaggacatgggaagcttgcttcctatgaaatcgagtggcaaacgggtgagtaacgcgtaaacaacctgcccttcggatggggataacagccggaaacggctgctaataccgaatacgatcttttcgtcgcatgacggaaagaagaaaggatggcctctatacaaagctatcgccgaaggaggggtttgcgtctgattagctggttggaggggtaacggcccaacaaggcgatgatcagtagccggtctgagaggatgaacggccacattgggactgagacacggcccagactcctacgggaggcagcagtggggaatcttccgcaatggacgaaagtctgacggagcaacgccgcgtgagtgaagaaggtcttcggattgtaaagctctgttatacgggacgaaaaagacggatgccaacagtatccgtccgtgacggtaccgtaagagaaagccacggctaactacgtgccagcagccgcggtaatacgtaggtggcaagcgttgtccggaattattgggcgtaaagggcgcgcaggcggttcggtaagtctgtcttaaaagtgcggggcttaaccccgtgaggggacggaaactgtcgaacttgagtgtcggagaggaaagcggaattcctagtgtagcggtgaaatgcgtagatattaggaggaacaccggtggcgaaagcggctttctggacgacaactgacgctgaggcgcgaaagcgtggggagcaaacaggattagataccctggtagtccacgccgtaaacgatggatactaggtgtaggaggtatcgaccccttctgtgccgtagttaacgctataagtatcccgcctggggagtacggccgcaaggttgaaactcaaaggaattgacgggggcccgcacaagcggtggagtatgtggtttaattcgacgcaacgcgaagaaccttaccaagccttgacattgatcgcaattttcagagatgagaagttcctcttcggaggacgagaaaacaggtggtgcacggctgtcgtcagctcgtgtcgtgagatgttgggttaagtcccgcaacgagcgcaacccctatcttctgttaccagcacgtaagggtggggactcaggagagactgccgcagacaatgcggaggaaggcggggatgacgtcaagtcatcatgccccttatggcttgggctacacacgtactacaatggctctaaatagagggaagcgaaggagcgatccggagcaaaacccaaaaacagagtcccagttcggattgcaggctgcaactcgcctgcatgaagcaggaatcgctagtaatcgcaggtcagcatactgcggtgaatacgttcccgggccttgtacacaccgcccgtcacaccacgaaagtcattcacacccgaagccggtgaggtaaccgcaaggagccagccgtcgaaggtgggggcgatgattggggtgaagtcgtaacaaggtagccgtatcggaaggtgcggctggatcacctcctttct

SEQ ID NO: 1206 - DNA, 1496 bp, Metallosphaera sedula
attccggttgatcctgccggacccgatcgctataggggtagggctaagccatgggagtcgtacgctctcgggaagagggcgtggcggacggctgagtaacacgtggctaacctgcccttgggatctggataaccccgggaaactggggctaatccggagcgggcaagggaatctggaatgatctcttgcctaaaagcctctcggctgatcccgtcgagaggcgcccaaggatggggctgcggcccatcaggctgttgggggagtaaaggtcccccaaaccgataacgggtaggggccgtgggagcgggagcccccagttgggcactgagacaagggcccaggccctacggggcgcaccaggcgcggaacgtccccaatgcgggaaaccgtgagggcgttacccctagtgccctcgcaagagggcttttctccactccagaaaggtggaggaataagcggggggcaagactggtgtcagccgccgcggtaataccagccccgcgagtgatcgggacgtttattgggcttaaagcgcccgtagccggcctgtaaagtcaccgtttaaagacccgggctcaactcggggaacggcggtgatacttacaggctagggggcgggagaggtcggaggtactcccggagtaggggcgaaatcctcagatcccgggaggaccaccagtggcgaaagcgtccggctagaacgcgcccgacggtgaggggcgaaagccggggtagcaaataggattagataccctagtagtcccggctgtagacgatgcaggctaggtgtcgcgtaggctttgtgcctgcgcggtgccgcaggaaaactggtaagcccgccgcctggggagtacggccgcaaggctgaaacttaaaggaattggcgggggagcaccacaaggggtggaacctgcggctcaattggagtcaacgcctggaatctcaccgggggagaccgcaggatgacggccaggctaacgaccttgccagactcgcggagaggaggtgcatggccgtcgccagctcgtgttgtgaaatgtccggttaagtccggcaacgagcgagacccccacttctagttggtaaccgtctctccggagacggtccacactagaaggactgccggtgttaaaccggaggaaggagggggccacggcaggtcagcatgccccgaaacttccgggccgcacgcgggttacaatggcagggacagcgggatccgaccccgagaggggaaggcaatcccgcaaaccctgcctcagttgggatcgagggctgaaactcgccctcgtgaacgaggaatccctagtaaccgcgggtcaacaacccgcggtgaatacgtccctgctccttgcacacaccgcccgtcgctccacccgagtggaggggaagtgaggcctcttgcccctcggggtgggaggtcgagcttctcctccgcgaggggggagaagtcgtaacaaggtagccgtaggggaacctgcggctggatcacctca

SEQ ID NO: 1207 - DNA, 1376 bp, Methanobacterium formicicum
  modified_base (619)..(619): a, c, t, g, unknown or other
gattaagccatgcaagtcgaacgatccttcggggtcgtggcgtacggctcagtaacacgtggataacctaaccttaggactgggataaccctgggaaactggggataataccggatatgtagggctgcctggaatggttccctattgaaatgttccgacgcctaaggatggatctgcggcagattaggtagttggcggggtaaatgcccaccaagccagtaatctgtacgggttgtgagagcaagagcccggagatggaacctgagacaaggttccaggccctacggggcgcagcaggcgcgaaacctccgcaatgcacgaaagtgcgacgggggaaacccaagtgccactcttaacggggtggcttttcttaagtgtaaaaagcttttggaataagagctgggcaagaccggtgccagccgccgcggtaacaccggcagctcaagtggtggccgtttttattgggcctaaagcgttcgtagccggcttgataagtctctggtgaaatctcacggcttaaccgtgagaattgctggagatactattaggcttgaggccgggagaggttagcggtactcccggggtaggggtgaaatcctataatcccgggaggaccacntgtggcgaaggcggctaactggaacgggcctgacggtgagtaacgaaagccaggggcgcgaaccggattagatacccgggtagtcctggccgtaaacgatgtggacttggtgttgggatggctccgagctgccccagtgccgaagggaagctgttaagtccaccgcctgggaagtacggtcgcaagactgaaacttaaaggaattggcgggggagcaccacaacgcgtggagcctgcggtttaattggattcaacgccggacatctcaccaggggcgacagcagaatgatagccaggttgatgaccttgcttgacaagctgagaggaggtgcatggccgccgtcagctcgtaccgtgaggcgtcctgttaagtcaggcaacgagcgagacccacgcccttagttaccagcggatccttcgggatgccgggcacactaaggggaccgccagtgataaactggaggaaggagtggacgacggtaggtccgtatgccccgaatcccctgggctacacgcgggctacaatggttaggacaatgggttccgacactgaaaggtggaggtaatctcctaaacctggccttagttcggattgagggctgtaactcgccctcatgaagctggaatgcgtagtaatcgcgtgtcataaccgcgcggtgaatacgtccctgctccttgcacacaccgcccgtcacgccacccaaaaagggtttggatgaggccatagtctttggttatggtcgaatctaggttcttt

SEQ ID NO: 1208 - DNA, 1359 bp, Methanobrevibacter acididurans
  modified_base (988)..(988): a, c, t, g, unknown or other
gatttctgtttgatcctggcagaagctactgctattgggattcgattaagccatgcaagtcgaaagaatttatattcttggcgtacggctcagtaacacgtggataacctacccttaggactgggataactctgggaaactggagataatactggatagatgatttttcctgtaattggtattttgttgaaatgttttttcgcctaaggatgggtctgcggccgattaggtagttggtgaggtaatggcttaccaagccgtttatcggtacgggttgtgagagcaagagcccggagatggaacctgagacaaggttccaggccctacggggcgcagcaggcgctaaacctccgcaatgtgagcaatcgcgacggggggatcccaagtgccattcttaacgggatggcttttcttaagtgtaaagagcttttggaataagagctgggcaagaccggtgccagccgccgcggtaacacccggcagctctagtggtagctgtttttattgggcctaaagcgttcgtagccggtttaataagtctttggtgaaatcctgttttttaactatgggaattgctgaggatactgttaggcttgaggtcgggagaggttagcggtactcccagggtaggggtgaaatcctgtaatcctgggaggaccacctgtggcgaaggcggctaactggaacgaacctgacggtgagggacgaaagctaggggcgcgaaccggattagatacccgggtagtcctagccgtaaacgatgcggactgggtgttgggatggctttgagctgtttcggtgccgaagggaagctgttaagtccgccgcctgggaagtacggtcgcaagactgaaacttaaaggaattggcgggggagcaccacaacgcgtggagcctgcggtttaattggattcaacgccggagatctcaccaggggcgacagcagtatgatggccaggttgatggccttgcttgacaagctgaagangaggtgcatggcccgccgtcagctcgtaccgtgaggagtcctgttaagtcaggcaacgagcgagaccccacgctcttagttaccagcgggatccttttttggatgccgggcacactaaggggaccgccagtgataaactggaggaaggagtggacgacggtaggtccgtatgccccgaatcccctgggctacacgcgggctacaatggctgagacaatgggttacgacgctgaaaagcggagttaatcctctaaacttagtcgtagttcggattgagggctgtaactcgccctcatgaagctggaatgcgtagtaatcgcgtgtcacaatcgcgcggtgaatacgtccctgctccttgcacacaccgcccg

SEQ ID NO: 1209 - DNA, 1268 bp, Methanobrevibacter arboriphilus
gctcagtaacacgtggataacctacccttaggactgggataaccctgggaaactggggctaatactggatagatggtttttttcctgtaatggtatttcgtctaaatgttttttttcgcctaaggatgggtctgcggccgattaggttgttggttaggtaatggcttaccaagccgtttatcggtacgggttgtgagagcaagagcccggagatggaacctgagacaaggttccaggccctacggggcgcagcaggcgcgaaacctccgcaatgtgagaaatcgcgacggggggaccccaagtgccattcttaacgggatggcttttcttaagtgtaaaaagcttttggaataagagctgggcaagaccggtgccagccgccgcggtaacaccggcagctctagtggtggccagttttattgggcctaaagcgttcgtagccggtttattaagtctctggtgaaatcccgtagcttaactatgggaattgctggagatactagtagacttgaggtcgggagaggttagaggtactcccagggtaggggtgaaatcctgtaatcctgggaggaccacctgtggcgaaggcgtctaactggaacgaacctgacggtgagggacgaaagctaggggcgcgaaccggattagatacccgggtagtcctagccgtaaacgatgcggacttggtgttagaatggctttgagccgctctagtgccgaagggaagctgttaagtccgtcgcctgggaagtacggtcgcaagactgaaacttaaaggaattggcgggggagcaccacaacgcgtggagcctgcggtttaattggattcaacgccggacatctcaccaggggcgacagcagtatgatggccaggttgatggccttgcttgacaagctgagaggaggtgcatggccgccgtcagctcgtaccgtgaggcgtcctgttaagtcaggcaacgagcgagacccacgcccttagttaccagcggatccttttttttggatgccgggcacactaaggggaccgccagtgataaattggaggaaggagtggacgacggtaggtccgtatgccccgaatcccctgggcaacacgcgggctacaatggctgagacaatgggttccgacattgaaaagtggaggtaatcctctaaacttagtcgtagttcggattgagggctgtaactcgccctcatgaagctggaatgcgtagtaatcgcgtgtcataatcgcgcggtgaatacgtccctgctccttgcacacaccg

SEQ ID NO: 1210 - DNA, 1364 bp, Methanobrevibacter curvatus
  modified_base (1272)..(1272): a, c, t, g, unknown or other
  modified_base (1289)..(1289): a, c, t, g, unknown or other
atttatttcgtggcgtacggctcagtaacacgtggataacctacccttaggactaggataaccctgggaaactggggctaatactggataggtgatttttcctgcaatggtatttcatttaaatgttcttatgttcgcctaaggatgggtctgcggccgattaggttgttggtggggtaatggcttaccaagccgattatcggtacgggttgtgagagcaagagcccggagatggaacctgagacaaggttccaggccctacggggcgcagcaggcgcgaaacctccgcaatgtgagcaatcgcgacggggggatcccaagtgccattcttaaaagggatggcttttcataagtgtaaaaagcttttggaataagagctggcaagaccggtgccagccgccgcggtaacaccggcagctctagtggtagccatttttattgggcctaaagcgttcgtagccggtttaataagtctttggtgaaagcctacagcttagctgtgggaattgctggagatactattagacttgaggtcgggagaggttagaggtactcccagggtaggggtgaaatcctgtaatcctgggaggaccacctgtggcgaaggcgtctaactggaacgaacctgacggtgagggacgagagctaggggcgcgagccggattagatacccgggcagtcctagccgtaaacgatgtggacttggtgttgggatggctttgagctgtttcagtgccgaagggaagctgttaagtccaccgcctgggaagtacggtcgcaagactgaaacttaaaggaattggcgggggagcaccacaacgcgtggagcctgcggtttaattggattctacgccggacatctcaccaggggcgacagcagtatgatggccaggttgatggtcttgcttgacaagctgagaggaggtgcatggccgccgtcagctcgtaccgtgaggcgtcctgttaagtcaggcaacgagcgagacccacgcccttagttaccagcggatccttcgggatgccgggcacactaaggggaccgccagtgataaactggaggaaggagtggacgacggtaggtccgtatgccccgaatcccctgggcaacacgcgggctacaatggctaagacaatgagttccgccactggaaagtgaaggtaatctcctaaacttagtcgtagtacggattgagggctgtaactcgccctcatgaagctggaatgcgtagtaatcgcgtgtcataatcgcgcggtgaatacgtccctgctccntgcacacaccgcccgtnacaccacccaaaaagggctgggatgaggctttgatcttaggttaaattcgaatctcggttttttgaggagggtga

SEQ ID NO: 1211 - DNA, 1314 bp, Methanobrevibacter cuticularis
  modified_base (431)..(431): a, c, t, g, unknown or other
  modified_base (966)..(966): a, c, t, g, unknown or other
aggctactgctattggggttcgaataagccatgcaagtcgaacgaatttatattcgtggcatacggctcagtaacacgtggataacctacccttaggactagaataaccctgggaaactggggctaatactggatagatgatttttcctgcaatggtatttcgtttaaatgttttttcgcctaaggatgggtctgcggccgaataggtagttggttaggtaatggcttaccaagccgcttatcggtacgggttgtgagagcaagagcccggagatggaacctgagacaaggttccaggccctacggggcgcagcaggcgcgaaacctccgcaatgtgagaaatcgcgacggggggaccccaagtgccattcttaacgggatggcatttgtgaggtgtaaaaagcttcaagaataagagctgggcaagaccnggtgccagccgccgcggtaacaccggcagctctagtggtagccatttttattgggcctaaagcgttcgtagccggtttaataagtctctggtgaaatcctgtagcttaactattggaattgctggagatactattagacttgaggtcgggagaggttagaggtactcccagggtaggggtgaaatcctgtaatcctgggaggaccacctgtggcgaaggcgtctaactggaacgaacctgacggtgagggacgaaagctaggggcgcgaaccgggttagatacccgggtagtcctagccgtaagcgatgcggacttggtgttggaatggctttgagccgctccagtgccgaagggaagctgttaagtccgccgcctgggaagtacggtcgcaagactgaaacttaaaggaattggcgggggagcactcaacgcgtggagcctgcggtttaattggattcaacgccggacatctcaccaggggcgacagcagtatgatggccaggttgatggccttgcttgacaagctgagaggangtgcatggccgccgtcagctcgtaccgtgaggcgtcctgttaagtcgggcaacgagcgagacccacgcccttagttaccagcggatccttttggatgccgggcacactaaggggaccgccagtgataaactggaggaaggagtggacgacggtaggtccgtatgccccgaatcccctgggcaacacgcgggctacaatggctaagacaatgggttccgacactggaaagtggaggtaatcctctaaacttagtcgtagttcggattgagggctgtaacccgcccccatgaagctggaatgcgtagtaatcgcgtgtcataatcgcgcggtgaatacgtccctgctcct

SEQ ID NO: 1212 - DNA, 1363 bp, Methanobrevibacter filiformis
  modified_base (1017)..(1017): a, c, t, g, unknown or other
aatttatattcgtggcgtacggctcagtaacacgtggataacctacccttaggaccaggataactctggaaactggagctaatactggataggcgatttttcctgcaattggtatttcgtttaaatgttttttcgcctgaggatgggtctgcgttcgattagattgttggtaaggtaatggcttaccaagtcgattatcggtacgggttgtgagagcaagagcctggagatggaacctgagacaaggttccaggccctacggggcgcagcaggcgcgaaacctccgcaatgtgagaaatcgcgacggggggaccccaagwgccattcttaacgggatggcttttcttaagtgtaaaaagcttttggaataagagctgggcaagaccgggccagccgccgcggtaacaccggcagctctagtggtagccatttttattgggcctaaagcgttcgtagctggtttaataagtctttggtgaaatcctatagcttaactgtgggaattgctggggatactattagacttgaggtcgggagaggttagcggtactctcagggtaggggtgaaatcctgtaatcctgagaggaccacctgtggcgaaggcggctaactggaacgaacctgacggtgagggacgaaagccaggggcgcgaaccggattagatacccgggtagtcctggccgtaaacgatgcggacttggtgttaggatggtcttgagccgttctagtgccgaagggaagctgttaagtccgccgcctgggaagtacggtcgcaagactgaaacttaaaggaattggcgggggagcaccacaacgcgtggagcctgcggtttaattggattcaacgccggacatctcaccaggggcgacagccgtatgatagccaggttgatgatcttgcttgacaagctgagaggaggtgcatggccgccgtcagctcgtaccgtgaggcgtcctgttaagtcaggcaacgagcgagacccacgcccttagttaccaacagatcctttattgnatgctgggcacactaaggggaccgccagtgataaactggaggaaggagtggacgacggtaggtccgtatgccccgaatcccctgggcaacacgcgggctacaatggctaagacaatgggttccgacattgaaaagtggaggtaatcccctaaacttggtcgtagttcggattgagggctgtaactcgccctcatgaagctggaatgcgtagtaatcgcgtgtcataatcgcgcggtgaatacgtccctgctccttgcgcacaccgcccgtcacaccacccaaaaagggcttggatgaggctttaatctttggttaaattcgaatctaggttttttgaggagggtga

SEQ ID NO: 1213 - DNA, 1328 bp, Methanobrevibacter gottschalkii
tgctactgctattgggattcgattaagccatgcaagtcgaacgagtttaggctcgtggcgtacggctcagtaacacgtggataacctacccttaggactgggataaccttgggaaactgaggataatactggataggcaatttttcctgtaatggttttttgtttaaatgttttttcgcctaaggatgggtctgcggccgattaggtagttggttaggtaatggcttaccaagcctttgatcggtacgggttgtgggagcaagagcccggagatggaacctgagacaaggttccaggccctacggggtgcagcaggcgcgaaacctccgcaatgtgagaaatcgcgacggggggatcccaagtgctattcttaacgggatagcttttctttagtgtaaagagcttttggaataagagctgggcaagaccggtgccagccgccgcggtaacaccggcagctctagtggtagcagtttttattgggcctaaagcgtccgtagccggtttaataagtctctggtgaaatcctgtagcttaactatgggaattgctggagatactattggacttgagaccgggagaggttagaggtactcccagggtagaggtgaaattctgtaatcctgggaggaccgcctgttgcgaaggcgtctgactggaacggttctgccggtgagggacgaaagttaggggcgcgaaccggattagatacccgggtagtcctaactgtaaacgatgcggacttggtgttggggtggctttgagctgcttcagtgccgaagggaagctgttaagtccgccgcctgggaagtacggtcgcgagactgatacttaraagaattggcgggggagcaccacaacacgtggagcctgcggtttaattggattcaacgccggacatctcaccagaggcgacagctgtatgatagccaggttgatgactttgcttgactagctgagaggaggtgcatggccgccgtcagctcgtaccgtgaggcgtcctgttaagtcaggcaacgagcgagacccacgcccttagttaccagcttgtcctttttttggatgatagggcacactaaggggaccgcctatgataaataggaggaaggagtggacgacggtaggtccgtatgccccgaatcctctgggcaacacgcgggctacaatggctgggacaatgggttccgacaccgaaaggtggaggtaatcctctaaacttagtcgtagttcggattgaggactgtaactcgttctcatgaagctggaatgcgtagtaatcgcgtatcactattgcgcggtgaatacgtcccttggtccttgcacacacc

SEQ ID NO: 1214 - DNA, 1262 bp, Methanobrevibacter millerae
gctcagtaacacgtggataacctacccttaggaccgggataaccttgggaaactgaggataatactggataggcaattattcctggaatggttttttgtttaaatgttttttcgcctaaggatgggtctgcggccgattaggtagttggttaggtaacggcttaccaagccattgatcggtacgggttgtgagagcaagagcccggagatggaacctgagacaaggttccaggccctacggggtgcagcaggcgcgaaacctccgcaatgtgagaaatcgcgacggggggatcccaagtgccattcttaacgggatggcttttcattagtgtaaagagcttttggaataagggctgggcaagaccggtgccagccgccgcggtaacaccggcagctctagtggtagcagtttttattgggcctaaagcgtccgtagccggtttaataagtctctggtgaaatcctgtagcttaactgtgggaattgctggagatactattagacttgagaccgggagaggttagaggtactcccagggtagaggtgaaattctgtaatcctgggaggaccgcctgttgcgaaggcgtctaactggaacggttctgacggtgagggacgaaagttaggggcgcgaaccggattagatacccgggtagtcctaaccgtaaacgatgcggacttggtgttggggtggctttgagctgctccagtgccgaagggaagctgttaagtccgccgcctgggaagtacggtcgcaagactgaaacttaaaggaattggcgggggagcaccacaacgcgtggagcctgcggtttaattggattcaacgccggacatctcaccagaggcgacagctgtatgatggccaagctgatgactttgcttgactagctgagaggaggtgcatggccgccgtcagctcgtaccgtgaggcgtcctgttaagtcaggcaacgagcgagacccacgcccttagttaccagcggatccttttttggatgccgggcacactaaggggaccgcctatgataaataggaggaaggagtggacgacggtaggtccgtatgccccgaatcctctgggcaacacgcgggctacaatggctgagacaatgggttccgacaccgaaaggtggaggtaatcctctaaacttagtcgtagttcggattgaggactgtaactcgttctcatgaagctggaatgcgtagtaatcgcgtatcactattgcgcggtgaatacgttcctgctccttgcacacaccg

SEQ ID NO: 1215 - DNA, 1266 bp, Methanobrevibacter olleyae
tgctcagtaacacgtggataacctacccttaggactgggataaccctgggaaactggggctaataccggatagatgatttttttcctgtaatggtgttttgtttaaatgtttttttttcgcctaaggatgggtctgcggcagattaggtagttggttgggtaatggcttaccaagcctatgatctgtacgggttgtgagagcaagagcccggagatggaacctgagacaaggttccaggccctacggggcgcagcaggcgcgaaacctccgcaatgtgagaaatcgcgacggggggatcccaagtgccattcttaacgggatggcttttcttaagtgtaaaaagcttttggaataagagctgggcaagaccggtgccagccgccgcggtaacaccggcagctctagtggtagctgtttttattgggcctaaagcgttcgtagccggtttggtaagtcactggtgaaatcctgtagcttaactatgggaattgctggtgatactgttgaacttgaggtcgggagaggttagcggtactcccagggtagaggtgaaattctgtaatcctgggaggaccacctgtggcgaaggcggctaactggaacgaacctgacggtgagggacgaaagctaggggcgcgaaccggattagatacccgggtagtcctagccgtaaacgatgcggacttggtgttgggatggctttgagccgctccggtgccgaagggaagctgttaagtccgccgcctgggaagtacggtcgcaagactgaaacttaaaggaattggcgggggagcaccacaacgcgtggagcctgcggtttaattggattcaacgccggacatctcaccaggagcgacagctgtatgattaccaggctgatgaccttgtttgactagctgagaggaggtgcatggccgccgtcagctcgtaccgtgaggcgtcctgttaagtcaggcaacgagcgagaccacgcccttagttaccatcagattctttggaatgctgggcacactaaggggaccgccagtgataaattggaggaaggagtggacgacggtaggtccgtatgccccgaatcccctgggctacacgcgggctacaatggctgggacaatgggttccgacgccgaaaggtggaggtaatcttttaaacctagtcgtagttcggattgagggctgtaactcgccctcatgaagctggaatgcgtagtaatcgcgtgtcacaatcgcgcggtgaatacgtccctgctccttgcacacaccga

SEQ ID NO: 1216 - DNA, 1475 bp, Methanobrevibacter oralis
ccggttgatcctgccagatgctactgcyattgggattcgattaagccatgcaagtcgaacgagtttagactcgtggcgtacggctcagtaacacgtggataacctacccttaggactgggataaccctgggaaactggggataatactggataggcaattagtcctgtaatggttttttgtttaaatgttttttcgcctaaggatgggtctgcggccgattaggtagttggttaggtaatggcttaccaagccgttgatcggtacgggttgtgagagcaagagcccggagatggaacctgagacaaggttccaggccctacggggcgcagcaggcgcgaaacctccgcaatgtgagaaatcgcgacggggggatcccaagtgccattcttaacgggatggcttttcattagtgtaaagagcttttggaataagagctgggcaagaccggtgccagccgccgcggtaacaccggcagttctagtggtagcagttattattgggcctaaagcgtccgtagccggtttaataagtctctggtgaaatcctgtagcttaactatgggaattgctggagatactattagacttgagatcgggagaggttagaggtactcccagggtagaggtgaaattctgtaatcctgggaggaccgcctgttgcgaaggcgtctaactggaacgattctgacggtgagggacgaaagttaggggcgcgaaccggattagatacccgggtagtcctaactgtaaacgatgcggacttggtgttgggatggctttgagctgtctcagtgccgaagggaagctgttaagtccgccgcctgggaagtacggtcgcaagactgaaacttaaaggaattggcgggggagcaccacaacgcgtggagcctgcggtttaattggattcaacgccggacatctcaccagaggcgacagctgtatgatagccaggttgatgactttgcttgactagctgagaggaggtgcatggccgccgtcagctcgtaccgtgaggcgtcctgttaagtcaggcaacgagcgagacccacgcccttagttaccagcggattcttttttttgaagccgggcacactagggggaccgcctatgataaataggaggaaggagtggacgacggtaggtccgtatgccccgaatccacagggyaacacgcgggctacaatggctgagacaatgggttccgacaccgaaaggtggaggtaatcctctaaacttagtcgtagtccggattgaggactgtaactcgttctcatgaagctggaatgcgtagtaatcgcgtgtcacaatcgcgcggtgaatacgtccctgctccttgcacacaccgcccgtcacgccacccaaaaagggattggatgaggatgtaatgttttttgttatattcgaatctagtttttttaaggagggcgaagtcgtaacaaggtacggctaggggaacctgcggctggatcacctcc

SEQ ID NO: 1217 - DNA, 1260 bp, Methanobrevibacter ruminantium
gctcagtaacacgtggataacctacccttaggactgggataaccctgggaaactggggctaataccggatagataatttttcctggaatggtattttgtttaaatgttttttcgcctaaggatgggtctgcggcagattaggtagttggttaggtaatggcttaccaagcctatgatctgtacgggttgtgagagcaagagcccggagatggaacctgagacaaggttccaggccctacggggcgcagcaggcgcgaaacctccgcaatgtgagaaatcgcgacggggggatcccaagtgccattcttaacgggatggcttttcttaagtgtaaaaagcttttggaataagagctgggcaagaccggtgccagccgccgcggtaacaccggcagctctagtggtagctacttttattgggcctaaagcgttcgtagccggtttgataagtcactggtgaaatcctatagcttaactgtgggaattgctggtgatactgttgaacttgaggtcgggagaggttagcggtactcccagggtagaggtgaaattctgtaatcctgggaggaccacctgtggcgaaggcggctaactggaacgaacctgacggtgagggacgaaagccaggggcgcgaaccggattagatacccgggtagtcctggccgtaaacgatgcggacttggtgttgggatggctttgagccgctccggtgccgaagggaagctgttaagtccgccgcctgggaagtacggtcgcaagactgaaacttaaaggaattggcgggggagcaccacaacgcgtggagcctgcggtttaattggattcaacgccggacatctcaccaggagcgacagctgtatgattaccaggctgatgaccttgtttgactagctgagaggaggtgcatggccgccgtcagctcgtaccgtgaggcgtcctgttaagtcaggcaacgagcgagacccacgcccttagttaccatcagattctccggaatgctgggcacactaaggggaccgccagtgataaactggaggaaggagtggacgacggtaggtccgtatgccccgaatcccctgggctacacgcgggctacaatggctgggacaatgggttccgacgccgaaaggcgaaggcaatcttttaaacctagtcgtagttcggattgagggctgtaactcgccctcatgaagctggaatgcgtagtaatcgcgtgtcacaatcgcgcggtgaatacgtccctgctccttgcacacaccg

SEQ ID NO: 1218 - DNA, 1485 bp, Methanobrevibacter smithii
ttcaattctgtttgatcctggcagatgctactgctattgggattcgattaagccatgcaagtcgaacgagtttaggctcgtggcgtacggctcagtaacacgtggataacctacccttaggactgggataaccctgggaaactggggataatactggataggcaattattcctgtaatggttttttgtttaaatgttttttcgcctaaggatgggtctgcggccgattaggtagttggttaggtaatggcttaccaagcctttgatcggtacgggttgtgagagcaagagcccggagatggaacctgagacaaggttccaggccctacggggtgcagcaggcgcgaaacctccgcaatgtgagaaatcgcgacggggggatcccaagtgccattcttaacgggatggcttttcattagtgtaaagagcttttggaataagagctgggcaagaccggtgccagccgccgcggtaacaccggcagctctagtggtagcagtttttattgggcctaaagcgtccgtagccggtttaataagtctctggtgaaatcctgcagcttaactgtgggaattgctggagatactattagacttgagatcgggagaggttagaggtactcccagggtagaggtgaaattctgtaatcctgggaggaccgcctgttgcgaaggcgtctgactggaacgattctgacggtgagggacgaaagctaggggcgcgaaccggattagatacccgggtagtcctagctgtaaacgatgcggacttggtgttggggtggctttgagctgtcccagtgccgaagggaagctgttaagtccgccgcctgggaagtacggtcgcaagactgaaacttaaaggaattggcgggggagcaccacaacgcgtggagcctgcggtttaattggattcaacgccggacatctcaccagaggcgacagctgtatgatagccaggttgatgactttgcttgactagctgagaggaggtgcatggccgccgtcagctcgtaccgtgaggcgtcctgttaagtcaggcaacgagcgagacccacgctcttagttaccagcggatccttttttggatgccgggcacactaaggggaccgcctatgataaataggaggaaggagtggacgacggtaggtccgtatgccccgaatcctctgggcaacacgcgggctacaatggctgagacaatgggttccgacgccgaaaggcggaggtaatcctctaaacttagtcgtagttcggattgaggactgtaactcgttctcatgaagctggaatgcgtagtaatcgcgtgtcacaatcgcgcggtgaatacgtccctgctccttgcacacaccgcccgtcacgccacccaaaaagggattggatgaggatgtaatgttttgttatattcgaatctagtttttttaaggagggcgaagtcgtaacaaggtagccgtaggggaacctgcggctggatcacctccttacac

SEQ ID NO: 1219 - DNA, 1268 bp, Methanobrevibacter thaueri
  modified_base (6)..(8): a, c, t, g, unknown or other
  modified_base (607)..(607): a, c, t, g, unknown or other
  modified_base (610)..(611): a, c, t, g, unknown or other
  modified_base (868)..(868): a, c, t, g, unknown or other
  modified_base (1124)..(1124): a, c, t, g, unknown or other
  modified_base (1255)..(1255): a, c, t, g, unknown or other
  modified_base (1258)..(1258): a, c, t, g, unknown or other
aagccnnncaagtcgaacgaatttagattcgtggcgtacggctcagtaacacgtggataacctacccttaggaccgggataaccttgggaaactgaggataatactggataggcaatttttcctgtaatggttttttgtttaaatgttttttcgcctaaggatgggtctgcggccgattaggtagttggttaggtaatggcttaccaagccgttgatcrgaacgggttgtgagagcaagagcccggagatggaacctgagacaaggttccaggccctacggggcgcagcaggcgcgaaacctccgcaatgtgagaaatcgcgacggggggatcccaagtgccattcttaacgggatggcttttcattagtgtaaagagcttttggaataagagctgggcaagaccggtgccagccgccgcggtaacaccggcagctctagtggtaacaatttttattgggcctaaagcgtccgtagccggtttaataagtctctggtgaaatcctgtagcttaactgtgggaattgctggagatactattagacttgagaccgggagaggttagaggtactcccagggtagaggtgaaattctgtaatcctgggagnacnncctgttgcgaaggcgtctaactggaacggttctgacggtgagggacgaaagttaggggcgcgaaccggattagatacccgggtagtcctaactgtaaacgatgcggacttggtgttggggtggctttgagctgctccagtgccgaagggaagctgttaagtccgccgcctgggaagtacggtcgcaagactgaaacttaaaggaattggcgggggagcaccacaacgcgtggagcctgcggtttaattggattcaangccggacatctcaccagaggcgacagctgtatgatagccaggytgatgactttgcttgactagctgagaggaggtgcatggccgccgtcagctcgtaccgtgaggcgtcccgttaagtcaggcaacgagcgagacccacgcccttagttaccagcttatcccctcggggatgatgggcacactaaggggaccgcctatgataaataggaggaaggagtggacgacggtaggtccgtatgccccgaatcctctgggnaacacgcgggctacaatggctgagacaatgggttccgacaccgaaaggtggaggtaatcctctaaacttagtcgtagttcggattgaggactgtaactcgttctcatgaagctggaatgcgtagtaatcgngtntcaccattgc

SEQ ID NO: 1220 - DNA, 1335 bp, Methanobrevibacter woesei
  modified_base (32)..(32): a, c, t, g, unknown or other
tgctactgctattgggattcgattaagccatncaagttgaacgaatttagattcgtggcgtacggctcagtaacacgtggataacctacccttaggactgggataactctgggaaactggggataataccggataggcaatttttcctgtaatggttttttgtttaaatgttttttttcgcctaaggatgggtctgcggcagattaggtagttggttaggtaatggcttaccaagccgttgatctgtacgggttgtgagagcaagagcccggagatggaacctgagacaaggttccaggccctacggggcgcagcaggcgcgaaacctccgcaatgtgagaaatcgcgacggggggatcccaagtgccattcttaacgggatggcttttcattagtgtaaagagcttttggaataagagctgggcaagaccgttgccaaccgccgcggtaacaccgtcagctctagtggtagcagtttttattgggcctaaagcgtccgtagccggtttattaagtctctggtgaaatcctgtagcttaactgtgggaattgctggagatactagtagacttgagatcgggagaggttagaggtactcccagggtagaggtgaaattctgtaatcctgggaggaccgcctgtggcgaaggcgtctagctggaacgattctgccggtgagggacgaaagctaggggcgcgaaccggattagatacccgggtagtcctagctgtaaacgatgcggacttggtgttgggatggctttgagctgctccagtgccgaagggaagctgttaagtccgccgcctgggaagtacggtcgcaagactgaaacttaaaggaattggcgggggagcaccacaacgcgtggagcctgcggtttaattggattcaacgccggacatctcaccagaggcgacagctgtatgatgaccagtttgatgagcttgtttgactagctgagaggaggtgcatggccgccgtcagctcgtaccgtgaggcgtcctgttaagtcaggcaacgagcgagacccacgcccttagttaccagcggattctagtgaatgccgggcacactagggggaccgcctgtgataaataggaggaaggagtggacgacggtaggtccgtatgccccgaatcctctgggcaacacgcgggctacaatggatgagacaatgggttccgacgccgaaaggtggaggtaatcctctaaacttattcgtagttcggattgaggactgtaactcgttctcatgaagctggaatgcgtagtaatcgcgtgtcataatcgcgcggtgaatacgtccctgctccttggacacaccgcccgtcacg

SEQ ID NO: 1221 - DNA, 1366 bp, Methanobrevibacter wolinii
  modified_base (27)..(27): a, c, t, g, unknown or other
agctactgctattgggattcgattaanccatacaagatgaacgaactttttggttcgtggcgtacggctcagtaacacgtggataacctacccttaggactgggataactccgggaaactggggataatactggataggcaatttttcctgtaatggttttttgtttaaatgttttttcgcctaaggatgggtctgcggcagattaggttgttggttgggtaatggcttaccaagcctataatctgtacgggttgtgagagcaagagcccggagatggaacctgagacaaggttccaggccctacggggcgcagcaggcgcgaaacctccgcaatgtgagaaatcgcgacggggggatcccaagtgctattcttaacggggtagcttttcttaagtgtaaagagcttttggaataagagctgggcaagaccggtgccagccgccgcggtaacaccggcagctctagtggtagctgtttttattgggcctgaagcgttcgtagccggtttgataagtctctggtgaaatcttgtagcttaactgtgggaattgctggagatactattaggcttgagatcgggagaggtcagaggtactcctggggtaggggtgaaatcctgtaatcctaggaggaccacctgtggcgaaggcgtctgactagaacgattctgacggtgaggaacgaaagctaggggcgcgaaccggattagatacccgggtagtcctagccgtaaactatgcggacttggtgtgagggtggctttgagccgtcctggtgccgaagggaagctgttaagtccgccgcctgggaagtacggtcgcaagactgaaacttaaaggaattgtcgggggagcaccacaacgcgtggagcctgcggtttaattggattcaacgccggagatctcaccagcggcgacagcagtatgattatcaggctgatgaccttatttgacaagctgagaggaggtgcatggccgccgtcatctcgtgccgtgaggcgtcctgttaagtcaggcaacgagcgagacccacgctcttagttaccagcatgttactttggtaatgatggggacactaaggggaccgccagtgataaattggaggaaggagtggacgacggtaggtccgtatgccccgaatccgctgggctacacgcgggctacaatggcagagacaatgggttccgacgctgaaaagcggtggtaatcttttaaactttgtcgtagttcggattgagggctgtaactcgtcctcatgaagctggaatgcgtagtaatcgcgtgtcataatcgcgcggtgaatacgtccctgctccttggacacaccgaccgtcacgccacccaaaaagggcttggttgaggcttt

SEQ ID NO: 1222 - DNA, 1261 bp, Methanosphaera stadtmanae
gctcagtaacacgtggataacttacccttaggaccgggataactttgggaaactgaagataatactggatattaggttatgcctggaatggtttacctttgaaatgtatttttcgcctaaggatagatctgcggctgattaggtcgttggtggggtaatggcccaccaagccgatgatcggtacgggttgtgagagcaagagcccggagatggaacctgagacaaggttccagaccctacggggtgcagcaggcgcgaaacctccgcaatgtacgcaagtgcgacggggggatcccaagtgttattcttaacagaataacttttcattagtgtaaaaagcttttagaataagagctgggcaagaccggtgccagccgccgcggtaacaccggcagctcaagtggtagctgtttttattgggcctaaagcgttcgtagccggtttgataagtctttggtgaaagcttgtagcttaactataagaattgctgaagatactgtcagacttgaagtcgggagaggttagaggtactaccggggtaggggtgaaatcctataatcctgggaggaccacctgtggcgaaggcgtctaactggaacgatcttgacggtgagtaacgaaagccaggggcgcgaaccggattagatacccgggtagtcctggccgtaaacgatgtggacttggtgttggaatggcctcgagttgttccggtgccgaagggaagctgttaagtccaccgcctgggaagtacggtcgcaagactgaaacttaaaggaattggcgggggagcaccacaacgcgtggagcctgcggtttaattggattcaacgccggacatctcaccaggagcgacagcagaatgataatcaggttgatgaccttatttgactagctgagaggaggtgcatggccgccgtcagctcgtactgtgaagcgtcctgttaagtcaggcaacgagcgagacccacgcccttagttaccaacacaatctctggattggtgggcacactagggggaccgccagtgataaactggaggaaggagtggacgacggtaggtccgtatgccccgaatctcctgggctacacgcgggctacaatggctatggcaatgggtttctgcactgaaaagtgatggtaatctcctaaacatagtcttagttcggattgagggctgtaactcgccctcatgaagctggaatgcgtagtaatcgcatgtcacaaccgtgcggtgaatacgtccctgctccttgcacacaccg

SEQ ID NO: 1223 - DNA, 1347 bp, Methylobacterium extorquens
ccttagagtttgatcctggctcagagcgaactcttgcggcaggcttaacacatgcaagtcgaacgggcttcttcggaagtcagtggcagacgggtgagtaacacgtgggaacgtgcccttcggttcggaataactcagggaaacttgagctaataccggatacgcccttttggggaaaggttgactgccgaaggatcggcccgcgtctgattagcttgttggtggggtaacggcctaccaaggcgacgatcagtagctggtctgagaggatgatcagccacactgggactgagacacggcccagactcctacgggaggcagcagtggggaatattggacaatgggcgcaagcctgatccagccatgccgcgtgagtgatgaaggccttagggttgtaaagctcttttgtccgggacgataatgacggtaccggaagaataagccccggctaacttcgtgccagcagccgcggtaatacgaagggggctagcgttgctcggaatcactgggcgtaaagggcgcgtaggcggccgattaagtcgggggtgaaagcctgtggctcaaccacagaattgccttcgatactggttggcttgagaccggaagaggacagcggaactgcgagtgtagaggtgaaattcgtagatattcgcaagaacaccagtggcgaaggcggctgtctggtccggttctgacgctgaggcgcgaaagcgtggggagcaaacaggattagataccctggtagtccacgccgtaaacgatgaatgccagccgttggcctgcttgcaggtcagtggcgccgctaacgcattaagcattccgcctggggagtacggtcgcaagattaaaactcaaaggaattgacgggggcccgcacaagcggtggagcatgtggtttaattcgaagcaacgcgcagaaccttaccatcccttgacatggcatgttaccccgagagatcggggatcctcttcggaggcgtgcacacaggtgctgcatggctgtcgtcagctcgtgtcgtgagatgttgggttaagtcccgcaacgagcgcaacccacgtccttagttgccatcattcagttgggcactctagggagactgccggtgataagccgcgaggaaggtgtggatgacgtcaagtcctcatggcccttacgggatgggctacacacgtgctacaatggcggtgacagagggacgcgaaaccgcgaggttgagcaaatccccaaaagccgtctcagttcggattgcactctgcaactcgggtgcatgaaggcggaatcgctagtaatcgtggatcagcacgccacggtgaatacgttcccgggccttgcaaaaaccgcccgtc

SEQ ID NO: 1224 - DNA, 1335 bp, Methylobacterium podarium
tgagtttgatcatggctcagagcgaacgctggcggcaggcttaacacatgcaagtcgaacgagtggcagacgggtgagtaacacgtgggaacgtgcccttcggttcggaataactcagggaaacttgagctaataccggatacggaaagctgccgaaggatcggcccgcgtctgattagcttgttggtggggtaacggcctaccaaggcgacgatcagtagctggtctgagaggatgatcagccacactgggactgagacacggcccagactcctacgggaggcagcagtggggaatattggacaatgggcgcaagcctgatccagccatgccgcgtgagtgatgaaggccttagggttgtaaagctcttttgtccgggacgatgacggtaccggaagaataagccccggctaacttcgtgccagcagccgcggtaatacgaagggggctagcgttgctcggaatcactgggcgtaaagggcgcgtaggcggccgattaagtcgggggtgaaagcctgtggctcaaccacagaattgccttcgatactggttggcttgagaccggaagaggacagcggaactgcgagtgtagaggtgaaattcgtagatattcgcaagaacaccagtggcgaaggcggctgtctggtccgtctgacgctgaggcgcgaaagcgtggggagcaaacaggattagataccctggtagtccacgccgtaaacgatgaatgccagccgttggtcggtcagtggcgccgctaacgcattaagcattccgcctggggagtacggtcgcaagattaaaactcaaaggaattgacgggggcccgcacaagcggtggagcatgtggtttaattcgaagcaacgcgcagaaccttaccatcccttgccatgcacaggtgctgcatggctgtcgtcagctcgtgtcgtgagatgttgggttaagtcccgcaacgagcgcaacccacgtccttagttgccatcatgggcactctagggagactgccggtgataagccggaggaaggtgtggatgacgtcaagtcctcatggcccttacgggatgggctacacacgtgctacaatggcggtcagagggaggcgaaggggcgacctggagcaaatcccggccgtctcagttcggatgcactctgcaactcgggtgcagaaggcggaatcgctagtaatcgtggatcagcacgccacggtgaatacgttcccgggccttgtacacaccgcccgtcacaccatgggagttggtcttacccgacggcgctcgccaggcaggcgaccacggtagggtcagcgactggggtgaagtcgtaacaaggtaaccgta

SEQ ID NO: 1225 - DNA, 1516 bp, Methylobacterium radiotolerans
agagtttgatcctggctcaggctggaacacctcctcagagtttgatcatggctcagagcgaacgctggcggcaggcttaacacatgcaagtcgagcgggcccttcggggtcagcggcggacgggtgagtaacgcgtgggaacgtgccttctggttcggaataaccctgggaaactagggctaataccggatacgccctttttggggaaaggtttactgccggaagatcggcccgcgtctgattagcttgttggtggggtaacggcctaccaaggcgacgatcagtagctggtctgagaggatgatcagccacactgggactgagacacggcccagactcctacgggaggcagcagtggggaatattggacaatgggcgcaagcctgatccagccatgccgcgtgagtgatgaaggccttagggttgtaaagctcttttatccgggacgataatgacggtaccggaggaataagccccggctaacttcgtgccagcagccgcggtaatacgaagggggctagcgttgctcggaatcactgggcgtaaagggcgcgtaggcggcgttttaagtcgggggtgaaagcctgtggctcaaccacagaatggccttcgatactgggacgcttgagtatggtagaggttggtggaactgcgagtgtagaggtgaaattcgtagatattcgcaagaacaccggtggcgaaggcggccaactggaccattactgacgctgaggcgcgaaagcgtggggagcaaacaggattagataccctggtagtccacgccgtaaacgatgaatgccagctgttggggtgcttgcaccgcagtagcgcagctaacgctttgagcattccgcctggggagtacggtcgcaagattaaaactcaaaggaattgacgggggcccgcacaagcggtggagcatgtggtttaattcgaagcaacgcgcagaaccttaccatcctttgacatggcgtgttacccagagagatttggggtccacttcggtggcgcgcacacaggtgctgcatggctgtcgtcagctcgtgtcgtgagatgttgggttaagtcccgcaacgagcgcaacccacgtccttagttgccatcattcagttgggcactctagggagactgccggtgataagccgcgaggaaggtgtggatgacgtcaagtcctcatggcccttacgggatgggctacacacgtgctacaatggcggtgacagtgggaggcgaaggagcgatctggagcaaatccccaaaagccgtctcagttcggattgcactctgcaactcgagtgcatgaaggcggaatcgctagtaatcgtggatcagcatgccacggtgaatacgttcccgggccttgtacacaccgcccgtcacaccatgggagttggtcttacccgacggcgctgcgccaaccgcgaggaggcaggcgaccacggtagggtcagcgactggggtgaagtcgtaacaaggtagccgtaggggaacctgcggctggatcacctccttagag

SEQ ID NO: 1226 - DNA, 1334 bp, Methylobacterium sp.
  1sub
gagtttgatcctggctcagagcgaacgctggcggcaggcttaacacatgcaagtcgaacgagtggcagacgggtgagtaacacgtgggaacgtgcccttcggttcggaataactcagggaaacttgagctaataccggatacggaaagctgccgaaggatcggcccgcgtctgattagcttgttggtggggtaacggcctaccaaggcgacgatcagtagctggtctgagaggatgatcagccacactgggactgagacacggcccagactcctacgggaggcagcagtggggaatattggacaatgggcgcaagcctgatccagccatgccgcgtgagtgatgaaggccttagggttgtaaagctcttttgtccgggacgatgacggtaccggaagaataagccccggctaacttcgtgccagcagccgcggtaatacgaagggggctagcgttgctcggaatcactgggcgtaaagggcgcgtaggcggccgattaagtcgggggtgaaagcctgtggctcaaccacagaattgccttcgatactggttggcttgagaccggaaggggacagcggaactgcgagtgtagaggtgaaattcgtagatattcgcaagaacaccagtggcgaaggcggctgtctggtccgtctgacgctgaggcgcgaaagcgtggggagcaaacgggattagataccctggtagtccacgccgtaaacgatgaatgccagccgctggccggtcagtggcgccgctaacgcattaagcattccgcctggggagtacggtcgcaagattaaaactcaaaggaattgacgggggcccgcacaagcggtggagcatgtggtttaattcgaagcaacgcgcagaaccttaccatcccttgacatgcacaggtgctgcatggctgtcgtcagctcgtgtcgtgagatgttgggttaagtcccgcaacgagcgcaacccacgtccttagttgccatcatgggcactctagggagactgccggtgataagccggaggaaggtgtggatgacgtcaagtcctcatggcccttacgggatgggctacacacgtgctacaatggcggtcagtgggacgcgaaaccgcgaggttgagcaaatccccgccgtctcagttcggatgcactctgcaactcgggtgcagaaggcggaatcgctagtaatcgtggatcagcacgccacggtgaatacgttcccgggccttgtacacaccgcccgtcacaccatgggagttggtcttacccgacggcgctcgccaggcaggcgaccacggtagggtcagcgactggggtgaagtcgtaacaaggtaaccgta

SEQ ID NO: 1227 - DNA, 1334 bp, Methylobacterium sp.
  MM4
gagtttgatcatggctcagagcgaacgctggcggcaggcttaacacatgcaagtcgaacgagtggcagacgggtgagtaacacgtgggaacgtgcccttcggttcggaataactcagggaaacttgagctaataccggatacggaaagctgccgaaggatcggcccgcgtctgattagcttgttggtggggtaacggcctaccaaggcgacgatcagtagctggtctgagaggatgatcagccacactgggactgagacacggcccagactcctacgggaggcagcagtggggaatattggacaatgggcgcaagcctgatccagccatgccgcgtgagtgatgaaggccttagggttgtaaagctcttttgtccgggacgatgacggtaccggaagaataagccccggctaacttcgtgccagcagccgcggtaatacgaagggggctagcgttgctcggaatcactgggcgtaaagggcgcgtaggcggccgattaagtcgggggtgaaagcctgtggctcaaccacagaattgccttcgatactggttggcttgagaccggaagaggacagcggaactgcgagtgtagaggtgaaattcgtagatattcgcaagaacaccagtggcgaaggcggctgtctggtccgtctgacgctgaggcgcgaaagcgtggggagcaaacaggattagataccctggtagtccacgccgtaaacgatgaatgccagccgttggccggtcagtggcgccgctaacgcattaagcattccgcctggggagtacggtcgcaagattaaaactcaaaggaattgacgggggcccgcacaagcggtggagcatgtggtttaattcgaagcaacgcgcagaaccttaccatcccttgacatgcacaggtgctgcatggctgtcgtcagctcgtgtcgtgagatgttgggttaagtcccgcaacgagcgcaacccacgtccttagttgccatcatgggcactctagggagactgccggtgataagccggaggaaggtgtggatgacgtcaagtcctcatggcccttacgggatgggctacacacgtgctacaatggcggtcagtgggacgcgaaaccgcgaggttgagcgaatccccgccgtctcagttcggatgcactctgcaactcgggtgcagaaggcggaatcgctagtaatcgtggatcagcacgccacggtgaatacgttcccgggccttgtacacaccgcccgtcacaccatgggagttggtcttacccgacggcgctcgccaggcaggcgaccacggtagggtcagcgactggggtgaagtcgtaacaaggtaaccgta

SEQ ID NO: 1228 - DNA, 1475 bp, Methylocella silvestris
agagtttgatcctggctcagaacgaacgctggcggcaggcctaacacatgcaagtcgaacgctgtagcaatacagagtggcagacgggtgagtaacacgtgggaacatacccttcggttcggaacaactcagggaaacttgagctaataccggatacgccctttgggggaaagatttatcgccgaaggattggcccgcgtctgattagctagttggcggggtaatggcccaccaaggcgacgatcagtagctggtctgagaggatgatcagccacattgggactgagacacggcccaaactcctacgggaggcagcagtggggaatattggacaatgggcgcaagcctgatccagccatgccgcgtgagtgatgaaggccttagggttgtaaagctcttttacctgggaagataatgacggtaccaggagaataagccccggctaacttcgtgccagcagccgcggtaatacgaagggggctagcgttgttcggatttactgggcgtaaagcgcacgtaggcggatctttaagtcaggggtgaaatcccggggctcaacctcggaactgcctttgatactggggatctcgagtccgggagaggtgagcggaactgcgagtgtagaggtgaaattcgtagatattcgcaagaacaccagtggcgaaggcggctcactggcccggtactgacgctgaggtgcgaaagcgtggggagcaaacaggattagataccctggtagtccacgccgtaaacgatggatgctagccgttaggcagcttgctgcttagtggcgcagttaacgctttaagcatcccgcctggggagtacggtcgcaagattaaaactcaaaggaattgacgggggcccgcacaagcggtggagcatgtggtttaattcgaagcaacgcgcagaaccttaccagctcttgacatgtccggtttggtttccagagatggattccttcagttaggctggccggaacacaggtgctgcatggctgtcgtcagctcgtgtcgtgagatgttgggttaagtcccgcaacgagcgcaaccctcgcccttagttgccatcatttagttgggcactctagggggactgccggtgataagccgagaggaaggtggggatgacgtcaagtcctcatggcccttacgggctgggctacacacgtgctacaatggcggtgacagtgggatgctaaggggcgacccctcgcaaatctcaaaaagccgtctcagttcggattgcgctctgcaactcgagcgcatgaaggtggaatcgctagtaatcgtagatcagaacgctacggtgaatacgttcccgggccttgtacacaccgcccgtcacaccatgggagttggttctacccgaaggcgttttcttaaccgcaaggagagaggcgaccacggtagggtcagcgactggggtgaagtcgtaacaaggtagccgtaggggaacctgcggctggatcacct

SEQ ID NO: 1229 - DNA, 1351 bp, Methylophilus sp.
  ECd5
  modified_base (77)..(77): a, c, t, g, unknown or other
  modified_base (1012)..(1012): a, c, t, g, unknown or other
tggcggaatgctttacacatgcaagtcgaacggcagcacgggagcttgctcctggtggcgagtggcgaacgggtgantaatatatcggaacgtatccaataatgggggataactaatcgaaaggttggctaataccgcatacgccctacgggggaaagctagggaccttcgggcctggcgttaatggagcggccgatatctgattagctagttggtgaggtaaaagctcaccaaggcgacgatcagtagctggtctgagaggacgaccagccacactggaactgagacacggtccagactcctacgggaggcagcagtggggaattttggacaatgggcgcaagcctgatccagccattccgcgtgagtgaagaaggccttcgggttgtaaagctctttcgcaagggaagaaagattatcctctaacataggatgattatgacggtaccttgataagaagcaccggctaactacgtgccagcagccgcggtaatacgtagggtgcgagcgttaatcggaattactgggcgtaaagcgtgcgcaggctgttttgtaagtcagatgtgaaatccctgagctcaacttaggaactgcgtttgaaactacaagactagaatatgtcagaggggggtagaattccacgtgtagcagtgaaatgcgtagagatgtggaggaataccaatggcgaaggcagccccctgggataatattgacgctcatgcacgaaagcgtggggagcaaccaggattagatacctggtagtccacgccctaaacgatgtttactagttgttggtggagtaaaatccatgagtaacgcagctaacgcgtgaagtagaccgcctggggagtacggtcgcaagattaaaactcaaaggaattgacgggggcccgcacaagcggtggattatgtggattaattcgatgcaacgcgaaaaaccttacctggccttgacatgccactaacgaagcagagatgcattaggtgctcgaaagagaaagtggacacaggngctgcatggctgtcgtcagctcgtgtcgtgagatgttgggttaagtcccgcaacgagcgcaacccttgccaataattgccatcatttagttgggcactttattgggactgccggtgacaaaccggaggaaggtggggatgacgtcaagtcctcatggcccttatggccagggcttcacacgtaatacaatggtcggtacagagagttgccaacccgcgagggggagccaatctcagaaagccgatcgtagtccggattgcaggctgcaactcgcctgcatgaagtcggaatcgctagtaatcgcggatcagcatgtcgcggtgaatacgttcccgggcc

SEQ ID NO: 1230 - DNA, 1472 bp, Microbacterium chocolatum
  modified_base (176)..(179): a, c, t, g, unknown or other
tgcttacaacatgcaagtcgaacggtgaagccaagattgcttggtggatcagtggcgaacgggtgagtaacacgtgagcakcctgccctgaactctgggataagcgctggaaacggcgtctaatactggatatgagctgcggaggcatcttcgtggttggaaagatttttcggttnnnnatgggctcgcggcctatcagcttgttggtgaggtaatggctcaccaaggcgtcgacgggtagccggcctgagagggtgaccggccacactgggactgagacacggcccagactctacgggaggcagcagtggggaatattgcacaatgggcggaagcttgatgcagcaacgccgcgtgagggatgacggcttcgggttgtaaacctcttttagcagggaagaagcgaaagtgacggtacctgcagaaaaagcgccggctaactacgtgccagcagccgcggtaatacgtagggcgcaaccgttatccggaattattgggcgtaaagagctcgtaggcggtttgtcgcgtctgctgtgaaatcccgaggctcaacctcgggtgtgcagtgggtacgggcagactagagtgcggtaggggagattggaattcctggtgtagcggtggaatgcgcagatatcaggaggaacaccgatggcgaaggcagatctctgggccgtaactgacgctgaggagcgaaagggtggggagcaaagaggcttagataccctggtagtccaccccgtaaacgttgggaactagttgtggggtccattcctcggattccgtgacgcagctaacgcattaagttccccgcctggggagtacggccgcaaggctaaaactcaaaggaattgacggggacccgcacaagcggcggagcatgcggattaattcgatgcaacgcgaagaaccttaccaaggcttgacatacacgagaacgctgcagaaatgtagaactctttggacactcgtgaacaggtggtgcatggttgtcgtcagctcgtgtcgtgagatgttgggttaagtcccgcaacgagcgcaaccctcgttctatgttgccagcacgtaatggtgggaactcatgggatactgccggggtcaactcggaggaaggtggggtagacgtcaaatcatcatgccccttatgtcttgggcttcacgcatgctacaatggccggtacaaagggctgcaataccgcgaggtggagcgaatcccaaaaagccggtcccagttcggattgaggtctgcaactcgacctcatgaagtcggagtcgctagtaatcgcagatcagcaacgctgcggtgaatacgttcccgggtcttgtacacaccgcccgtcaagtcatgaaagtcggtaacacctgaagccggtggcccaacccttgtggagggagccgtcgaaggtgggatcggtaattaggactaagtcgtaacaaggtagccgtaccggaaggtgcgctggatcacctcc

SEQ ID NO: 1231 - DNA, 1475 bp, Microbacterium flavescens
gatgaacgctggcggcgtgcttaacacatgcaagtcgaacggtgaagcagagcttgctctgtggatcagtggcgaacgggtgagtaacacgtgagcaacctgccccggactctgggataagcgctggaaacggcgtctaatactggatatgaatcgcgaccgcatggtcagtggttggaaagatttttcggtctgggatgggctcgcggcctatcagcttgttggtgaggtaatggctcaccaaggcgtcgacgggtagccggcctgagagggtgaccggccacactgggactgagacacggcccagactcctacgggaggcagcagtggggaatattgcacaatgggcggaagcctgatgcagcaacgccgcgtgagggacgacggccttcgggttgtaaacctcttttagcaaggaagaagcgaaagtgacggtacttgcagaaaaagcgccggctaactacgtgccagcagccgcggtaatacgtagggcgcaagcgttatccggaattattgggcgtaaagagctcgtaggcggtttgtcgcgtctgctgtgaaaacccgaggctcaacctcgggcctgcagtgggtacgggcagactagagtgcggtaggggagattggaattcctggtgtagcggtggaatgcgcagatatcaggaggaacaccgatggcgaaggcagatctctgggccgtaactgacgctgaggagcgaaagggtggggagcaaacaggcttagataccctggtagtccaccccgtaaacgttgggaactagttgtggggtccattccacggattccgtgacgcagctaacgcattaagttccccgcctggggagtacggccgcaaggctaaaactcaaaggaattgacggggacccgcacaagcggcggagcatgcggattaattcgatgcaacgcgaagaaccttaccaaggcttgacatacacgagaacgctgcagaaatgtagaactctttggacactcgtgaacaggtggtgcatggttgtcgtcagctcgtgtcgtgagatgttgggttaagtcccgcaacgagcgcaaccctcgttctatgttgccagcacgtaatggtgggaactcatgggatactgccggggtcaactcggaggaaggtggggatgacgtcaaatcatcatgccccttatgtcttgggcttcacgcatgctacaatggccggtacaaagggctgcaataccgtaaggtggagcgaatcccaaaaagccggtcccagttcggattgaggtctgcaactcgacctcatgaagtcggagtcgctagtaatcgcagatcagcaacgctgcggtgaatacgttcccgggtcttgtacacaccgcccgtcaagtcatgaaagtcggtaacacctgaagccggtggcccaacccttgtggagggagccgtcgaaggtgggatcggtaattaggactaagtcgtaacaaggtagccgtaccggaagg

SEQ ID NO: 1232 - DNA, 1317 bp, Microbacterium gubbeenense
  modified_base (71)..(71): a, c, t, g, unknown or other
  modified_base (98)..(98): a, c, t, g, unknown or other
  modified_base (132)..(132): a, c, t, g, unknown or other
  modified_base (188)..(188): a, c, t, g, unknown or other
  modified_base (197)..(197): a, c, t, g, unknown or other
acagttggaaacagctgctaataccggatacgcacgagaaccgcatggttactcgtgggaaagatttttcngttcgggaggggctcgcgtcctatcancttgttggtgaggtagtggctcaccaaggcgtcnacgggtagccggcctgagagggtgaccggccacactgggactgagacacggcccanactcctacnggaggcagcagtggggaatattgcacaatgggcgcaagcctgatgcagcaacgccgcgtgagggacgacggccttcgggttgtaaacctcttttagttgggaagaagccttcgggtgacggtaccttcagaaaaagcaccggctaactacgtgccagcagccgcggtaatacgtagggtgcaagcgttatccggaattattgggcgtaaagagctcgtaggcggtttgtcacgtctgctgtgaaaactggaggctcaacttccagcttgcagtgggtacgggcagacttgagtgcggtaggggagattggaattcctggtgtagcggtggaatgcgcagatatcaggaggaacaccgatggcgaaggcagatctctgggcccgtaactgacgctgaggagcgaaagagtggggagcaaacaggcttagataccctggtagtccactccgtaaacgttgggaactagttgtgggggcctttctacggtctccgtgacgcagctaacgcattaagttccccgcctggggagtacggccgcaaggctaaaactcaaaggaattgacggggacccgcacaagcggcggagcatgcggattaattcgatgcaacgcgaagaaccttaccaaggcttgacatataccggaaacggcttggaaacagtcgcccccttgtggtcggtatacaggtggtgcatggttgtcgtcagctcgtgtcgtgagatgttgggttaaagtcccgcaacgagcgcaaccctcgttctatgttgccagcacgttatggtgggaactcatggaatactgccggggtcaactcggaggaaggtggggatgacgtcaaatcatcatgccccttatgtcttgggcttcacgcatgctacaatggccggtacaatgggctgcgataccgtgaggtggagcgaatcccaaaaagccggtcccagttcggattgtagtctgcaactcgactacatgaagtcggagtcgctagtaatcgcagatcagcaacgctgcggtgaatacgttcccgggtcttgtacacaccgcccgtcaagtcatgaaagtcggtaacacctgaagccggtggcctaaccccttgtgggagggagctgtcgaaggtggga

SEQ ID NO: 1233 - DNA, 1479 bp, Microbacterium lacticum
tttgcaaagcgtttgtggcgtgcttaacacatgcatatcgaacggtgaaggcggagcttgctctgctggatcagtggcgaacgggtgagtaacacgtgagcaatctgcccctgactctgggataagcgctggaaacggcgtctaatactggatacgagctgcgaaggcatcttcagcagctggaaagaayttcggtcagggatgagctcgcggcctatcagcttgttggtgaggtaacggctcaccaaggcgtcgacgggtagccggcctgagagggtgaccggccacactgggactgagacacggcccagactcctacgggaggcagcagtggggaatattgcacaatgggcgaaagcctgatgcagcaacgccgcgtgagggacgacggccttcgggttgtaaacctcttttagcagggaagaagcgaaagtgacggtacctgcagaaaaagcgccggctaactacgtgccagcagccgcggtaatacgtagggcgcaagcgttatccggaattattgggcgtaaagagctcgtaggcggtttgtcgcgtctgctgtgaaaccccgaggctcaacctcgggcctgcagtgggtacgggcagactagagtgcggtagrggagattggaattcctggtgtagcggtggaatgcgcagatatcaggaggaacaccgatggcgaaggcagatctctgggccgtaactgacgctgaggagcgaaagggtggggagcaaacaggcttagataccctggtagtccaccccgtaaacgttgggaactagttgtggggtccattccacggattccgtgacgcagctaacgcattaagttccccgcctggggagtacggccgcaaggctaaaactcaaaggaattgacggggacccgcacaagcggcggagcatgcggattaattcgatgcaacgcgaagaaccttaccaaggcttgacatatacgagaacgggccagaaatggtcaactctttggacactcgtaaacaggtggtgcatggttgtcgtcagctcgtgtcgtgagatgttgggttaagtcccgcaacgagcgcaaccctcgttctatgttgccagcacgtcatggtgggaactcatggaatactgccggggtcaactcggaggaaggtgaggatgacgtcaaatcatcatgccccttatgtcttgggcttcacgcatgctacaatggccggtacaatgggctgcaataccgcaaggtggagcgaatcccaaaaagccggtcccagttcggattgaggtctgcaactcgacctcatgaagtcggagtcgctagtaatcgcagatcagcaacgctgcggtgaatacgttcccgggtcttgtacacaccgcccgtcaagtcatgaaagtcggtaacacctgaagccggtggcccaacccttgtggagggagccgtcgaaggtgggatcggtaattaggactaagtcgtaacaaggtagccgtaccggaagg

SEQ ID NO: 1234 - DNA, 1475 bp, Microbacterium oleivorans
gatgaacgctggcggcgtgcttaacacatgcaagtcgaacggtgaagcagagcttgctctgtggatcagtggcgaacgggtgagtaacacgtgagcaacctgcccctgactctgggataagcgctggaaacggcgtctaatactggatatgagctgcgaccgcatggtcagcagttggaaagatttttcggtctgggatgggctcacggcctatcagcttgttggtgaggtaatggctcaccaaggcgtcgacgggtagccggcctgagagggtgaccggccacactgggactgagacacggcccagactcctacgggaggcagcagtggggaatattgcacaatgggcgaaagcctgatgcagcaacgccgcgtgagggatgacggccttcgggttgtaaacctcttttagcagggaagaagcgaaagtgacggtacctgcagaaaaagcgccggctaactacgtgccagcagccgcggtaatacgtagggcgcaagcgttatccggaattattgggcgtaaagagctcgtaggcggtttgtcgcgtctgctgtgaaatcccgaggctcaacctcgggtctgcagtgggtacgggcagactagagtgcggtaggggagattggaattcctggtgtagcggtggaatgcgcagatatcaggaggaacaccgatggcgaaggcagatctctgggccgttactgacgctgaggagcgaaagggtggggagcaaacaggcttagataccctggtagtccaccccgtaaacgttgggaactagttgtggggtccattccacggattccgtgacgcagctaacgcattaagttccccgcctggggagtacggccgcaaggctaaaactcaaaggaattgacggggacccgcacaagcggcggagcatgcggattaattcgatgcaacgcgaagaaccttaccaaggcttgacatatacgagaacgggccagaaatggtcaactctttggacactcgtaaacaggtggtgcatggttgtcgtcagctcgtgtcgtgagatgttgggttaagtcccgcaacgagcgcaaccctcgttctatgttgccagcacgtaatggtgggaactcatgggatactgccggggtcaactcggaggaaggtggggatgacgtcaaatcatcatgccccttatgtcttgggcttcacgcatgctacaatggccggtacaaagggctgcaataccgtgaggtggagcgaatcccaaaaagccggtcccagttcggattgaggtctgcaactcgacctcatgaagtcggagtcgctagtaatcgcagatcagcaacgctgcggtgaatacgttcccgggtcttgtacacaccgcccgtcaagtcatgaaagtcggtaacacctgaagccggtggcccaacccttgtggagggagccgtcgaaggtgggattggtaattaggactaagtcgtaacaaggtagccgtaccggaagg

SEQ ID NO: 1235 - DNA, 1467 bp, Microbacterium oxydans
tggcggcgtgcttaacacatgcaagtcgaacggtgaacacggagcttgctctgtgggatcagtggcgaacgggtgagtaacacgtgagcaacctgcccctgactctgggataagcgctggaaacggcgtctaatactggatatgtgacgtgaccgcatggtctgcgtctggaaagaatttcggttggggatgggctcgcggcctatcagcttgttggtgaggtaatggctcaccaaggcgtcgacgggtagccggcctgagagggtgaccggccacactgggactgagacacggcccagactcctacgggaggcagcagtggggaatattgcacaatgggcgcaagcctgatgcagcaacgccgcgtgagggacgacggccttcgggttgtaaacctcttttagcagggaagaagcgaaagtgacggtacctgcagaaaaagcgccggctaactacgtgccagcagccgcggtaatacgtagggcgcaagcgttatccggaattattgggcgtaaagagctcgtaggcggtttgtcgcgtctgctgtgaaatccggaggctcaacctccggcctgcagtgggtacgggcagactagagtgcggtaggggagattggaattcctggtgtagcggtggaatgcgcagatatcaggaggaacaccgatggcgaaggcagatctctgggccgtaactgacgctgaggagcgaaagggtggggagcaaacaggcttagataccctggtagtccaccccgtaaacgttgggaactagttgtggggtccattccacggattccgtgacgcagctaacgcattaagttccccgcctggggagtacggccgcaaggctaaaactcaaaggaattgacggggacccgcacaagcggcggagcatgcggattaattcgatgcaacgcgaagaaccttaccaaggcttgacatatacgagaacgggccagaaatggtcaactctttggacactcgtaaacaggtggtgcatggttgtcgtcagctcgtgtcgtgagatgttgggttaagtcccgcaacgagcgcaaccctcgttctatgttgccagcacgtaatggtgggaactcatgggatactgccggggtcaactcggaggaaggtggggatgacgtcaaatcatcatgccccttatgtcttgggcttcacgcatgctacaatggccggtacaaagggctgcaataccgcgaggtggagcgaatcccaaaaagccggtcccagttcggattgaggtctgcaactcgacctcatgaagtcggagtcgctagtaatcgcagatcagcaacgctgcggtgaatacgttcccgggtcttgtacacaccgcccgtcaagtcatgaaagtcggtaacacctgaagccggtggcctaacccttgtggagggagccgtcgaaggtgggatcggtaattaggactaagtcgtaacaaggtagccgtaccggaagg

SEQ ID NO: 1236 - DNA, 1490 bp, Microbacterium paraoxydans
tagagtttgatcctggctcaggatgaacgctggcggcgtgcttaacacatgcaagtcgaacggtgaacacggagcttgctctgtgggatcagtggcgaacgggtgagtaacacgtgagcaacctgcccctgactctgggataagcgctggaaacggcgtctaatactggatatgtgacgtgaccgcatggtctgcgtttggaaagatttttcggttggggaggggctcgcggcctatcagcttgttggtgaggtaatggctcaccaaggcgtcgacgggtagccggcctgagagggtgaccggccacactgggactgagacacggcccagactcctacgggaggcagcagtggggaatattgcacaatgggcgaaagcctgatgcagcaacgccgcgtgagggatgacggccttcgggttgtaaacctcttttagcagggaagaagcgaaagtgacggtacctgcagaaaaagcgccggctaactacgtgccagcagccgcggtaatacgtagggcgcaagcgttatccggaattattgggcgtaaagagctcgtaggcggtttgtcgcgtctgctgtgaaatcccgaggctcaacctcgggcctgcagtgggtacgggcagactagagtgcggtaggggagattggaattcctggtgtagcggtggaatgcgcagatatcaggaggaacaccgatggcgaaggcagatctctgggccgtaactgacgctgaggagcgaaagggtggggagcaaacaggcttagataccctggtagtccaccccgtaaacgttgggaactagttgtggggtccattccacggattccgtgacgcagctaacgcattaagttccccgcctggggagtacggccgcaaggctaaaactcaaaggaattgacggggacccgcacaagcggcggagcatgcggattaattcgatgcaacgcgaagaaccttaccaaggcttgacatatacgagaacgggccagaaatggtcaactctttggacactcgtaaacaggtggtgcatggttgtcgtcagctcgtgtcgtgagatgttgggttaagtcccgcaacgagcgcaaccctcgttctatgttgccagcacgtaatggtgggaactcatgggatactgccggggtcaactcggaggaaggtggggatgacgtcaaatcatcatgccccttatgtcttgggcttcacgcatgctacaatggccggtacaaagggctgcaataccgtgaggtggagcgaatcccaaaaagccggtcccagttcggattgaggtctgcaactcgacctcatgaagtcggagtcgctagtaatcgcagatcagcaacgctgcggtgaatacgttcccgggtcttgtacacaccgcccgtcaagtcatgaaagtcggtaacacctgaagccggtggcctaacccttgtggagggagctgtcgaaggtgggatcggtaattaggactaagtcgtaacaaggtagccgta

SEQ ID NO: 1237 - DNA, 1474 bp, Microbacterium phyllosphaerae
gctgaacgctggcggcgtgcttaacacatgcaagtcgaacggtgaagcccagcttgctgggtggatcagtggcgaacgggtgagtaacacgtgagcaatctgcccctgactctgggataagcgctggaaacggcgtctaatactggatacgaacagcgaccgcatggtcagttgttggaaagaatttcggtcagggatgagctcgcggcctatcagcttgttggtgaggtaatggctcaccaaggcgtcgacgggtagccggcctgagagggtgaccggccacactgggactgagacacggcccagactcctacgggaggcagcagtggggaatattgcacaatgggcgcaagcctgatgcagcaacgccgcgtgagggacgacggccttcgggttgtaaacctcttttagcagggaagaagcgaaagtgacggtacctgcagaaaaagcgccggctaactacgtgccagcagccgcggtaatacgtagggcgcaagcgttatccggaattattgggcgtaaagagctcgtaggcggtttgtcgcgtctgctgtgaaatcccgaggctcaacctcgggtctgcagtgggtacgggcagactagagtgcggtaggggagattggaattcctggtgtagcggtggaatgcgcagatatcaggaggaacaccgatggcgaaggcagatctctgggccgtaactgacgctgaggagcgaaagggtggggagcaaacaggcttagataccctggtagtccaccccgtaaacgttgggaactagttgtggggtccattccacggattccgtgacgcagctaacgcattaagttccccgcctggggagtacggccgcaaggctaaaactcaaaggaattgacggggacccgcacaagcggcggagcatgcggattaattcgatgcaacgcgaagaaccttaccaaggcttgacatatacgagaacgggccagaaatggtcaactctttggacactcgtaaacaggtggtgcatggttgtcgtcagctcgtgtcgtgagatgttgggttaagtcccgcaacgagcgcaaccctcgttctatgttgccagcacgtaatggtgggaactcatgggatactgccggggtcaactcggaggaaggtggggatgacgtcaaatcatcatgccccttatgtcttgggcttcacgcatgctacaatggccggtacaaagggctgcaataccgtaaggtggagcgaatcccaaaaagccggtcccagttcggattgaggtctgcaactcgacctcatgaagtcggagtcgctagtaatcgcagatcagcaacgctgcggtgaatacgttcccgggtcttgtacacaccgcccgtcaagtcatgaaagtcggtaacacctgaagccggtggcctaacccttgtggagggagccgtcgaaggtgggatcggtaattaggactaagtcgtaacaaggtagccgtaccggaagg

SEQ ID NO: 1238 - DNA, 1460 bp, Microbacterium schleiferi
tggcggcgtgcttaacacatgcaagtcgaacggtgaagcagagcttgctctgtggatcagtggcgaacgggtgagtaacacgtgagcaatctgcccctgactctgggataagcgctggaaacggcgtctaataccggatacgagctgcgaaggcatcttcagcagctggaaagaatttcggtcagggatgagctcgcggcctatcagcttgttggtgaggtaacggctcaccaagccgtcgacgggtagccggcctgagagggtgaccggccacactgggactgagacacggcccagactcctacgggaggcagcagtggggaatattgcacaatgggcgaaagcctgatgcagcaacgccgcgtgagggacgacggccttcgggttgtaaacctcttttagcaggaaagaagcgaaagtgacggtacctgcagaaaaagcgccggctaactacgtgccagcagccgcggtaatacgtagggcgcaagcgttatccggaattattgggcgtaaagagctcgtaggcggtctgtcgcgtctgctgtgaaaacccgaggctcaacctcgggcctgcagtgggtacgggcagactagagtgcggtaggggagattggaattcctggtgtagcggtggaatgcgcagatatcaggaggaacaccgatggcgaaggcagatctctgggccgtaactgacgctgaggagcgaaagggtggggagcaaacaggcttagataccctggtagtccaccccgtaaacgttgggaactagttgtggggtccattccacggattccgtgacgcagctaacgcattaagttccccgcctggggagtacggccgcaaggctaaaactcaaaggaattgacggggacccgcacaagcggcggagcatgcggattaattcgatgcaacgcgaagaaccttaccaaggcttgacatatacgagaacgggccagaaatggtcaactctttggacactcgtaaacaggtggtgcatggttgtcgtcagctcgtgtcgtgagatgttgggttaagtcccgcaacgagcgcaaccctcgttctatgttgccagcacgtaatggtgggaactcatgggatactgccggggtcaactcggaggaaggtggggatgacgtcaaatcatcatgccccttatgtcttgggcttcacgcatgctacaatggccggtacaaagggctgcaataccgcgaggtggagcgaatcccaaaaagccggtcccagttcggattgaggtctgcaactcgacctcatgaagtcggagtcgctagtaatcgcagatcagcaacgctgcggtgaatacgttcccgggtcttgtacacaccgcccgtcaagtcatgaaagtcggtaacacctgaagccggtggcccaacccttgtggagggagccgtcgaaggtgggatcggtaattaggactaagtcgtaacaaggtagccgtaccg

SEQ ID NO: 1239 - DNA, 1475 bp, Microbacterium sp.
  768
gatgaacgctggcggcgtgcttaacacatgcaagtcgaacggtgaagcccagcttgctgggtggatcagtggcgaacgggtgagtaacacgtgagcaacctgcccctgactctgggataagcgctggaaacggcgtctaatactggatacgaaccacagtcgcatggctcgtggttggaaagattttttggttggggatgggctcgcggcctatcagcttgttggtgaggtaatggctcaccaaggcgtcgacgggtagccggcctgagagggtgaccggccacactgggactgagacacggcccagactcctacgggaggcagcagtggggaatattgcacaatgggcgcaagcctgatgcagcaacgccgcgtgagggatgacggccttcgggttgtaaacctcttttagcaaggaagaagcgaaagtgacggtacttgcagaaaaagcgccggctaactacgtgccagcagccgcggtaatacgtagggcgcaagcgttatccggaattattgggcgtaaagagctcgtaggcggtttgtcgcgtctgctgtgaaatcccgaggctcaacctcgggcctgcagtgggtacgggcagactagagtgcggtaggggagattggaattcctggtgtagcggtggaatgcgcagatatcaggaggaacaccgatggcgaaggcagatctctgggccgtaactgacgctgaggagcgaaagggtggggagcaaacaggcttagataccctggtagtccaccccgtaaacgttgggaactagttgtggggtcctttccacggattccgtgacgcagctaacgcattaagttccccgcctggggagtacggccgcaaggctaaaactcaaaggaattgacggggacccgcacaagcggcggagcatgcggattaattcgatgcaacgcgaagaaccttaccaaggcttgacatacacgagaacaccctagaaataggggactctttggacactcgtgaacaggtggtgcatggttgtcgtcagctcgtgtcgtgagatgttgggttaagtcccgcaacgagcgcaaccctcgttctatgttgccagcacgtaatggtgggaactcatgggatactgccggggtcaactcggaggaaggtggggatgacgtcaaatcatcatgccccttatgtcttgggcttcacgcatgctacaatggccggtacaaagggctgcaataccgtgaggtggagcgaatcccaaaaagccggtcccagttcggattgaggtctgcaactcgacctcatgaagtcggagtcgctagtaatcgcagatcagcaacgctgcggtgaatacgttcccgggtcttgtacacaccgcccgtcaagtcatgaaagtcggtaacacctgaagccggtggcccaacccttgtggagggagccgtcgaaggtgggatcggtaattaggactaagtcgtaacaaggtagccgtaccggaagg

SEQ ID NO: 1240 - DNA, 1474 bp, Microbacterium sp.
  oral strain C24KA
aggatgaacgctggcggcgtgcttaacacatgcaagtcgaacggtgaaggcccagcttgctgggtggatcagtggcgaacgggtgagtaacacgtgagcaatctgcccctgactctgggataagcgctggaaacggcgtctaatactggatatgaaccgtggaggcatcttcaacggttggaaagattttttggtcagggatgagctcgcggcctatcagcttgttggtgaggtaatggctcaccaaggcgtcgacgggtagccggcctgagagggtgaccggccacactgggactgagacacggcccagactcctacgggaggcagcagtggggaatattgcacaatgggcgcaagcctgatgcagcaacgccgcgtgagggacgacggccttcgggttgtaaacctcttttagcagggaagaagcgaaagtgacggtacctgcagaaaaagcgccggctaactacgtgccagcagccgcggtaatacgtagggcgcaagcgttatccggaattattgggcgtaaagagctcgtaggcggtttgtcgcgtctgctgtgaaatcccgaggctcaacctcgggtctgcagtgggtacgggcagactagagtgcggtaggggagattggaattcctggtgtagcggtggaatgcgcagatatcaggaggaacaccgatggcgaaggcagatctctgggccgtaactgacgctgaggagcgaaagggtggggagcaaacaggcttagataccctggtagtccaccccgtaaacgttgggaactagttgtggggtccattccacggattccgtgacgcagctaacgcattaagttccccgcctggggagtacggccgcaaggctaaaactcaaaggaattgacggggacccgcacaagcggcggagcatgcggattaattcgatgcaacgcgaagaaccttaccaaggcttgacatatacgagaacgctgcagaaatgtagaactctttggacactcgtaaacaggtggtgcatggttgtcgtcagctcgtgtcgtgagatgttgggttaagtcccgcaacgagcgcaaccctcgttctatgttgccagcacgtaatggtgggaactcatgggatactgccggggtcaactcggaggaaggtggggatgacgtcaaatcatcatgccccttatgtcttgggcttcacgcatgctacaatggccggtacaaagggctgcaataccgtaaggtggagcgaatcccaaaaagccggtcccagttcggattgaggtctgcaactcgacctcatgaagtcggagtcgctagtaatcgcagatcagcaacgctgcggtgaatacgttcccgggtcttgtacacaccgcccgtcaagtcatgaaagtcggtaacacctgaagccggtggcccaacccttgtggagggagccgtcgaaggtgggatcggtaattaggactaagtcgtaacaaggtagccgtaccgg

SEQ ID NO: 1241 - DNA, 1474 bp, Microbacterium testaceum
gatgaacgctggcggcgtgcttaacacatgcaagtcgaacggtgaagccaagcttgcttggtggatcagtggcgaacgggtgagtaacacgtgagcaacctgccctggactctgggataagcgctggaaacggcgtctaatactggatatgagctcctatcgcatggtgggggttggaaagatttttcggtctgggatgggctcgcggcctatcagcttgttggtgaggtaatggctcaccaaggcgtcgacgggtagccggcctgagagggtgaccggccacactgggactgagacacggcccagactcctacgggaggcagcagtggggaatattgcacaatgggcggaagcctgatgcagcaacgccgcgtgagggatgacggccttcgggttgtaaacctcttttagcagggaagaagcgagagtgacggtacctgcagaaaaagcgccggctaactacgtgccagcagccgcggtaatacgtagggcgcaagcgttatccggaattattgggcgtaaagagctcgtaggcggtttgtcgcgtctgctgtgaaatcccgaggctcaacctcgggcctgcagtgggtacgggcagactagagtgcggtaggggagattggaattcctggtgtagcggtggaatgcgcagatatcaggaggaacaccgatggcgaaggcagatctctgggccgtaactgacgctgaggagcgaaagggtggggagcaaacaggcttagataccctggtagtccaccccgtaaacgttgggaactagttgtggggaccattccacggtttccgtgacgcagctaacgcattaagttccccgcctggggagtacggccgcaaggctaaaactcaaaggaattgacggggacccgcacaagcggcggagcatgcggattaattcgatgcaacgcgaagaaccttaccaaggcttgacatatacgagaacgggccagaaatggtcaactctttggacactcgtaaacaggtggtgcatggttgtcgtcagctcgtgtcgtgagatgttgggttaagtcccgcaacgagcgcaaccctcgttctatgttgccagcacgtaatggtgggaactcatgggatactgccggggtcaactcggaggaaggtggggatgacgtcaaatcatcatgccccttatgtcttgggcttcacgcatgctacaatggccggtacaaagggctgcaataccgtgaggtggagcgaatcccaaaaagccggtcccagttcggattgaggtctgcaactcgacctcatgaagtcggagtcgctagtaatcgcagatcagcaacgctgcggtgaatacgttcccgggtcttgtacacaccgcccgtcaagtcatgaaagtcggtaacacctgaagccggtggcccaacccttgtggagggagccgtcgaaggtgggatcggtaattaggactaagtcgtaacaaggtagccgtaccggaagg

SEQ ID NO: 1242 - DNA, 1497 bp, Micrococcus antarcticus
tcagaacgaacgctggcggcgtgcttaacacatgcaagtcgaacgatgaagcccagcttgctgggtggattagtggcgaacgggtgagtaacacgtgagtaacctgcccttgactctaggataagcccgggaaactgggtctaatactggataggaacgtctaccgcatggtgggtgttggaaagaatttcggtcatggatggactcgcggcctatcagcttgttggtgaggtaatggctcaccaaggcgacgacgggtagccggcctgagagggtgaccggccacactgggactgagacacggcccagactcctacgggaggcagcagtggggaatattgcacaatgggcgaaagcctgatgcagcgacgccgcgtgagggatgacggccttcgggttgtaaacctctttcagtagggaagaagcgaaagtgacggtacctgcagaagaagcaccggctaactacgtgccagcagccgcggtaatacgtagggtgcgagcgttatccggaattattgggcgtaaagagctcgtaggcggtttgtcgcgtctgtcgtgaaagtccggggcttaaccccggatctgcggtgggtacgggcagactagagtgcagtaggggagactggaattcctggtgtagcggtggaatgcgcagatatcaggaggaacaccgatggcgaaggcaggtctctgggctgtaactgacgctgaggagcgaaagcatggggagcgaacaggattagataccctggtagtccatgccgtaaacgttgggcactaggtgtggggaacattccacgttttccgcgccgcagctaacgtattaggtgccccgcctggggagtacggccgcaaggctaaaactcaaaggaattgacgggggcccgcacaagcggcggagcatgcggattaattcgatgcaacgcgaagaaccttaccaaggcttgacatgttctcgatcgccgtagagatacggtttcccctttggggcgggttcacaggtggtgcatggttgtcgtcagctcgtgtcgtgagatgttgggttaagtcccgcaacgagcgcaaccctcgttccatgttgccagcacttcgggtggggactcatgggagactgccggggtcgactcggaggaaggtggggacgacgtcaaatcatcatgccccttatgtcttgggcttcacgcatgctacaatggccggtacaatgggttgcgatactgtgaggtggagctaatcccaaaaagccggtctcagttcggattggggtctgcaactcgaccccatgaagtcggagtcgctagtaatcgcagatcagcaacgctgcggtgaatacgttcccgggccttgtacacaccgcccgtcaagtcacgaaagtcggtaacacccgaagccggtggcctaacccttgtggagggggccgtcgaaggtgggaccagcgattgggactaagtcgtaacaaggtagccgtaccggaaggtgcggctggatcacctcctt

SEQ ID NO: 1243 - DNA, 1632 bp, Micrococcus luteus
ttacggagagtttgatcctggctcaggatgaacgctggcggcgtgcttaacacatgcaagtcgaacgatgaagcccagcttgctgggtggattagtggcgaacgggtgagtaacacgtgagtaacctgcccttaactctgggataagcctgggaaactgggtctaataccggataggagcgtccaccgcatggtgggtgttggaaagatttatcggttttggatggactcgcggcctatcagcttgttggtgaggtaatggctcaccaaggcgacgacgggtagccggcctgagagggtgaccggccacactgggactgagacacggcccagactcctacgggaggcagcagtggggaatattgcacaatgggcgaaagcctgatgcagcgacgccgcgtgagggatgacggccttcgggttgtaaacctctttcagtagggaagaagcgaaagtgacggtacctgcagaagaagcaccggctaactacgtgccagcagccgcggtaatacgtagggtgcgagcgttatccggaattattgggcgtaaagagctcgtaggcggtttgtcgcgtctgtcgtgaaagtccggggcttaaccccggatctgcggtgggtacgggcagactagagtgcagtaggggagactggaattcctggtgtagcggtggaatgcgcagatatcaggaggaacaccgatggcgaaggcaggtctctgggctgtaactgacgctgaggagcgaaagcatggggagcgaacaggattagataccctggtagtccatgccgtaaacgttgggcactaggtgtggggaccattccacggtttccgcgccgcagctaacgcattaagtgccccgcctggggagtacggccgcaaggctaaaactcaaaggaattgacgggggcccgcacaagcggcggagcatgcggattaattcgatgcaacgcgaagaaccttaccaaggcttgacatgttcccgatcgccgtagagatacgatttcccctttggggcgggttcacaggtggtgcatggttgtcgtcagctcgtgtcgtgagatgttgggttaagtcccgcaacgagcgcaaccctcgttccatgttgccagcacgtaatggtggggactcatgggagactgccggggtcaactcggaggaaggtgaggacgacgtcaaatcatcatgccccttatgtcttgggcttcacgcatgctacaatggccggtacaatgggttgcgatactgtgaggtggagctaatcccaaaaagccggtctcagttcggattggggtctgcaactcgaccccatgaagtcggagtcgctagtaatcgcagatcagcaacgctgcggtgaatacgttcccgggccttgtacacaccgcccgtcaagtcacgaaagtcggtaacacccgaagccggtggcctaacccttgtgggagggagccgtcgaaggtgggaccagcgattgggactaagtcgtaacaaggtagccgtaccggaaggtgcggctggatcacctcctttctaaggagcatcagtgcccgttgcatcaccgcgtgtgtgatggcgggttgctcatgggtggaacatcaatgaatggtgccagtggtggtgccggcagtgctcgagtacg

SEQ ID NO: 1244 - DNA, 1472 bp, Micrococcus lylae
gatcctggctcaggatgaacgctggcggcgtgcttaacacatgcaagtcgaacgatgaagctccagcttgctggggtggattagtggcgaacgggtgagtaacacgtgagtaacctgcccttgactctgggataagccttggaaacggggtctaataccggataggagcattcaccgcatggtgggtgttggaaagaatttcggtcttggatggactcgcggcccatcagcttgttggtgaggtaatggctcaccaaggcgacgacgggtagccggcctgagagggtgaccggccacactgggactgagacacggcccagactcctacgggaggcagcagtggggaatattgcacaatgggcgcaagcctgatgcagcgacgccgcgtgagggatgacggccttcgggttgtaaacctctttcagtagggaagaagcgaaagtgacggtacctgcagaagaagcaccggctaactacgtgccagcagccgcggtaatacgtagggtgcgagcgttatccggaattattgggcgtaaagagctcgtaggcggtttgtcgcgtctgccgtgaaagtccggggcttaactccggatctgcggtgggtacgggcagactagagtgcagtaggggagactggaattcctggtgtagcggtggaatgcgcagatatcaggaggaacaccgatggcgaaggcaggtctctgggctgtaactgacgctgaggagcgaaagcatggggagcgaacaggattagataccctggtagtccatgccgtaaacgtttggcactaggtgtgggggccattccacggtttccgcgccgcagctaacgcattaagtgccccgcctggggagtacggccgcaaggctaaaactcaaaggaattgacgggggcccgcacaagcggcggagcatgcggattaattcgatgcaacgcgaagaaccttaccaaggcttgacatgttctcgttcgccgtagagatacggtttcccctttggggcgggttcacaggtggtgcatggttgtcgtcagctcgtgtcgtgagatgttgggttaagtcccgcaacgagcgcaacccctgttctatgttgccagcacgtgatggtggggactcatgggagactgccggggtcaactcggaggaaggtggggacgacgtcaaatcatcatgccccttatgtcttgggcttcacgcatgctacaatggccggtacaatgggttgcgatactgtgaggtggagctaatcccaaaaagccggtctcagttcggattggggtctgcaactcgaccccatgaagttggagtcgctagtaatcgcagatcagcaacgctgcggtgaatacgttcccgggccttgtacacaccgcccgtcaagtcacgaaagtcggtaacacccgaagccggtggcctaacccttgtggaaggagccgtcgaaggtgggactggcgattgggactaagtcgtaacaag

SEQ ID NO: 1245 - DNA, 1469 bp, Micrococcus sp.
  185
  modified_base (977)..(977): a, c, t, g, unknown or other
cgctggcggcgtgcttaacacatgcaagtcgaacgatgaagcccagcttgctgggtggattagtggcgaacgggtgagtaacacgtgagtaacctgcccttaactctgggataagcctgggaaactaggtctaataccggataggagcgcctaccgcatggtgggtgttggaaagatttatcggttttggatggactcgcggcctatcagcttgttggtgaggtaatggctcaccaaggcgacgacgggtagccggcctgagagggtgaccggccacactgggactgagacacggcccagactcctacgggaggcagcagtggggaatattgcacaatgggcgaaagcctgatgcagcgacgccgcgtgagggatgacggccttcgggttgtaaacctctttcagtagggaagaagcgaaagtgacggtacctgcagaagaagcaccggctaactacgtgccagcagccgcggtaatacgtagggtgcgagcgttatccggaattattgggcgtaaagagctcgtaggcggtttgtcgcgtctgtcgtgaaagtccggggcttaaccccggatctgcggtgggtacgggcagactagagtgcagtaggggagactggaattcctggtgtagcggtggaatgcgcagatatcaggaggaacaccgatggcgaaggcaggtctctgggctgtaactgacgctgaggagcgaaagcatggggagcgaacaggattagataccctggtagtccatgccgtaaacgttgggcactaggtgtggggaccattccacggtttccgcgccgcagctaacgcattaagtgccccgcctggggagtacggccgcaaggctaaaactcaaaggaattgacgggggcccgcacaagcggcggagcatgcggattaattcgatgcaacgcgaagaaccttaccaaggcttgacatgttctcgatcgccgtagagatacggtttccccttnggggcgggttcacaggtggtgcatggttgtcgtcagctcgtgtcgtgagatgttgggttaagtcccgcaacgagcgcaaccctcgttccatgttgccagcacgtaatggtggggactcatgggagactgccggggtcaactcggaggaaggtgaggacgacgtcaaatcatcatgccccttatgtcttgggcttcacgcatgctacaatggccggtacaatgggttgcgatactgtgaggtggagctaatcccaaaaagccggtctcagttcggattggggtctgcaactcgaccccatgaagtcggagtcgctagtaatcgcagatcagcaacgctgcggtgaatacgttcccgggccttgtacacaccgcccgtcaagtcacgaaagttggtaacacccgaagccggtggcctaacccttgtggggggagccgtcgaaggtgggaccagcgattgggactaagtcgtaacaaggtagccgtaccggaagg

SEQ ID NO: 1246 - DNA, 1502 bp, Microcystis aeruginosa
ttcatcatggagagtttgatcctggctcaggatgaacgctggcggcgtgcctaacacatgcaagtcgaacgggaatcttcggattctagtggcggacgggtgagtaacgcgtaagaatctaacttcaggacggggacaacagttggaaacgactgctaatacccgatatgccgcgaggtgaaacctaattggcctgaagaagagcttgcgtctgattagctagttggtggggtaagagcctaccaaggcgacgatcagtagctggtctgagaggatgagcagccacactgggactgagacacggcccagactcctacgggaggcagcagtggggaattttccgcaatgggcgaaagcctgacggagcaacgccgcgtgagggaggaaggtctttggattgtaaacctcttttctcaaggaagaagttctgacggtacttgaggaatcagcctcggctaactccgtgccagcagccgcggtaatacgggggaggcaagcgttatccggaattattgggcgtaaagcgtccgcaggtggtcagccaagtctgctgtcaaatcaggttgcttaacgacctaaaggcggtggaaactggcagactagagagcagtaggggtagcaggaattcccagtgtagcggtgaaatgcgtagagattgggaagaacatcggtggcgaaagcgtgctactgggctgtatctgacactcagggacgaaagctaggggagcgaaagggattagatacccctgtagtcctagccgtaaacgatggatactaggcgtggcttgtatcgacccgagccgtgccgaagctaacgcgttaagtatcccgcctggggagtacgcacgcaagtgtgaaactcaaaggaattgacgggggcccgcacaagcggtggagtatgtggtttaattcgatgcaacgcgaagaaccttaccaagacttgacatgtcgcgaaccctggtgaaagctgggggtgccttcgggagcgcgaacacaggtggtgcatggctgtcgtcagctcgtgtcgtgagatgttgggttaagtcccgcaacgagcgcaaccctcgttcttagttgccagcattaagttggggactctaaggagactgccggtgacaaaccggaggaaggtggggatgacgtcaagtcagcatgccccttacgtcttgggcgacacacgtactacaatggtcgggacaaagggcagcgaactcgcgagagccagcgaatcccagcaaacccggcctcagttcagattgcaggctgcaactcgcctgcatgaaggaggaatcgctagtaatcgccggtcagcatacggcggtgaattcgttcccgggccttgtacacaccgcccgtcacaccatggaagctggtcacgcccgaagtcattacctcaaccgcaaggagggggatgcctaaggcagggctagtgactggggtgaagtcgtaacaaggtagccgtaccggaaggtgtggctggatcacctccttaaagggagacc

SEQ ID NO: 1247 - DNA, 1543 bp, Mitsuokella jalaludinii
tgatcctggctcaggacgaacgctggcggcgtgcttaacacatgcaagtcgtacgagacgattgaaagcttgcttttgaaagtcgagtggcaaacgggtgagtaacgcgtagacaacctgccgtaaagatggggacaacagttcgaaaggactgctaataccgaatgttgtagagtttccgcatgggaatcctactaaaggtggcctctacttgtaagctatcgctttacgatgggtctgcgtctgattagctagttggtggggtaacggcctaccaaggcgacgatcagtagccggtctgagaggatgaacggccacattggaactgagacacggtccagactcctacgggaggcagcagtggggaatcttccgcaatgggcgcaagcctgacggagcaacgccgcgtgagtgaagaagggtttcgactcgtaaagctctgttgtcggggacgaatgtggagatggtgaataaccatttccaatgacggtacctgacgaggaagccacggctaactacgtgccagcagccgcggtaatacgtaggtggcgagcgttgtccggaattattgggcgtaaagggagcgcaggcgggaaggtaagtctatcttaaaagtgcggggctcaaccccgtgaggggatggaaactatctttcttgagtgcaggagaggaaagcggaattcctagtgtagcggtgaaatgcgtagatattaggaggaacaccagtggcgaaggcggctttctggactgtaactgacgctgaggctcgaaagcgtggggagcgaacaggattagataccctggtagtccacgccgtaaacgatgaatgctaggtgtaggaggtatcgacccctcctgtgccggagttaacgcaataagcattccgcctggggagtacggccgcaaggctgaaactcaaaggaattgacgggggcccgcacaagcggtggagtatgtggtttaattcgacgcaacgcgaagaaccttaccagggcttgacattgagtgaaagggctagagatagttccctctcttcggagacacgaaaacaggtggtgcatggctgtcgtcagctcgtgtcgtgagatgttgggttaagtcccgcaacgagcgcaacccctatcctttgttgccagcacgcaatggtgggaactcaaaggagactgccgcggacaacgcggaggaaggcggggatgacgtcaagtcatcatgccccttatgtcctgggctacacacgtactacaatgggatggacagagagcagcgaagccgcgaggccaagcgaaccccataaaccatctcccagttcggattgcaggctgcaacccgcctgcatgaagttggaatcgctagtaatcgcaggtcagcatactgcggtgaatacgttcccgggccttgtacacaccgcccgtcacaccacggaagtcattcacacccgaagccggcaggctaaccgcaaggaggcagccgtctaaggtgggggcgatgactggggtgaagtcgtaacaaggtagccgtatcggaaggtgcggctggatcactc

SEQ ID NO: 1248 - DNA, 1559 bp, Mitsuokella multacida
tggagagtttgatcctggctcaggacgaacgctggcggcgtgcttaacacatgcaagtcgaacgagacgattgaaagcttgcttttgaaagtcgagtggcaaacgggtgagtaacgcgtagacaacctgccgtaaagatggggacaacagtccgaaaggactgctaataccgaatgttgtggaacttccgcatgggagctctactaaagatggcctctacttgtaagctatcgctttacgatgggtctgcgtctgattagctagttggtggggtaatggcttaccaaggcgacgatcagtagccggtctgagaggatgaacggccacattggaactgagacacggtccagactcctacgggaggcagcagtggggaatcttccgcaatgggcgcaagcctgacggagcaacgccgcgtgagtgaagaagggtttcgactcgtaaagctctgttgtcggggacgaatgtggagatggtgaataaccatttccaatgacggtacctgacgaggaagccacggctaactacgtgccagcagccgcggtaatacgtaggtggcgagcgttgtccggaattattgggcgtaaagggagcgcaggcgggagatcaagtctatcttaaaagtgcggggctcaaccccgtgaggggatggaaactggtcttcttgagtgcaggagaggaaagcggaattcctagtgtagcggtgaaatgcgtagatattaggaggaacaccagtggcgaaggcggctttctggactgtaactgacgctgaggctcgaaagcgtggggagcgaacaggattagataccctggtagtccacgccgtaaacgatgaatgctaggtgtaggaggtatcgacccctcctgtgccggagttaacgcaataagcattccgcctggggagtacggccgcaaggctgaaactcaaaggaattgacgggggcccgcacaagcggtggagtatgtggtttaattcgacgcaacgcgaagaaccttaccagggcttgacattgagtgaaagagctagagatagctccctctcttcggagacacgaaaacaggtggtgcatggctgtcgtcagctcgtgtcgtgagatgttgggttaagtcccgcaacgagcgcaacccctatcctttgttgccagcacgtaatggtgggaactcaaaggagactgccgcggacaacgcggaggaaggcggggatgacgtcaagtcatcatgccccttatgtcctgggctacacacgtactacaatgggatggacagagagcagcgaagccgcgaggccaagcgaaccccataaaccatctcccagttcggattgcaggctgcaacccgcctgcatgaagttggaatcgctagtaatcgcaggtcagcatactgcggtgaatacgttcccgggccttgtacacaccgcccgtcacaccacggaagtcattcacacccgaagccggcaggctaaccgcaaggaggcagccgtctaaggtgggggcgatgactggggtgaagtcgtaacaaggtagccgtatcggaaggtgcggctggatcacctcctttct

SEQ ID NO: 1249 - DNA, 1224 bp, Mitsuokella sp.
  oral taxon 521
gacgaacgctggcggcgtgcttaacacatgcaagtcgaacgagacaattaaaagcttgcttttaaacgtcgagtggcaaacgggtgagtaacgcgtagacaacctgccgcaaagatggggacaacagttcgaaaggactgctaataccgaatgttctggaagttccgcatggaaactccagcaaagatggcctctacttgtaagcgatcgctttgcgatgggtctgcgtctgattagctagttggcagggcaacggcctaccaaggcgacgatcagtagccggtctgagaggatgaacggccacattgggactgagacacggcccagactcctacgggaggcagcagtggggaatcttccgcaatgggcgaaagcctgacggagcaacgccgcgtgagtgaagaaggtcttcggatcgtaaagctctgttgccggggacgacatgtaggcagtgcgaacagcattgtgtaatgacggtacccggcgaggaagccacggctaactacgtgccagcagccgcggtaatacgtaggtggcgagcgttgtccggaattattgggcgtaaagggagcgcaggcgggcgagtaagtctttcttaaaagtgcggggctcaaccccgtgaggggagagaaactactcatcttgagtgcaggagaggaaagcggaattcctagtgtagcggtgaaatgcgtagatattaggaagaacaccagtggcgaaggcggctttctggactgtaactgacgctgaggctcgaaagccaggggagcgaacgggattagataccccggtagtcctggccgtaaacgatgaatgctaggtgtagggggtatcgacccctcctgtgccggagttaacgcaataagcattccgcctggggagtacggtcgcaagactgaaactcaaaggaattgacgggggcccgcacaagcggtggagtatgtggtttaattcgacgccacgcgatgaaccttaccagggcttgacattgagtgacagacttagagacaagtcattctcttcggagacacgaaaactggtggtgcatggctgtcgtcagctcgtgtcgtgagatgtagggttagttccgcacgagcgcaccccctattctctgttgccagcacgcgaaggtgggaactcaaaggaaactgccgccgaaccagccggagaaaggcggggaatacgtcagttatcatgccccctagttcgtggctacaccgttca

SEQ ID NO: 1250 - DNA, 1210 bp, Mitsuokella sp.
  oral taxon G68
gacgaacgctggcggcgtgcttcaacacatgcaagtcgaacgagacaattaaaagcttgcttttcaaacgtccgagtggcaaacgggtgagtcaacgcgtagacaacctgccgcaaagatggggacaacagttccgaaaggactgctaataccgaatgttcctggaagttcccgcatggaaactcccagcaaagatggcctcctacttgtaagcgatccgctttgcgatgggtcctgcgtcctgattagctagttggtgaggtaacggcctaccaaggcgacgatcagtagccggtcctgagaggatgaacggccacattgggactgagacacggcccagactccctacgggaggcagcagtggggaatccttccgcaatgggcgaaagcctgacggagcaacgccgcgtgagtgaagaaggtccttcggatccgtaaagctctgttgccggggacgagtgtaggcaatgcaaacagcattgtgtaatgacggtacccggcgaggaagccacggctaactacgtgccagcagccgcggtaatacgtaggtggcgagcgttgtccggaattattgggcgtaaagggagcgcaggcgggcgagtaagtctttcttaaaagtgcggggctcaaccccgtgaggggagagaaactactcatcttgagtgcaggagaggaaggcggaattcctagtgtagcggtgaaatgcgtagatattaggaagaacaccagtggcgaaggcggctttctggactgtaactgacgctgaggctcgaaagccaggggagcgaacgggattagataccccggtagtcctggccgtaaacgatgaatgctaggtgtagggggtatcgacccctcctgtgccggagttaacgcaataagcattccgcctggggagtacggtagcaagactgaaactcaaaggaattgacgggggcccgcacaagcggtggagtatgtggtttaattcgacgcaacgcgaagaacttaccaggtcttgacatagagtgacagacttagagacaagtcattctcttcggagacacgagaacagggtggtgcatggctgtcgtcagctcgtgtcgtgagatgtttgggttagttccgccacgagcgcacgcctattctctgttgccagcactgcgatggtgggaactcgaggagacgcgccgacacgccgaggaggcgggatagttagtagcatccctag

SEQ ID NO: 1251 - DNA, 1544 bp, Mobiluncus curtisii
tttttttggagagtttgatcctggctcaggacgaacgctggcggcgtgcttaacacatgcaagtcgaacgatgaagccgcagcttgctgtggtggattagtggcgaacgggcgagtaacacgtgagtaacctgtccttttctttgggataacggctggaaacggctgctaatactggatattcaggcgtcaccgcatggtggtgtttggaaaggttttttctgggattgggtgggctcgcggcctatcagcttgttggtggggtgatggcttaccaaggctttgacgggtagccggcctgagagggtggtcggtcgcactgggactgagatacggcccagactcctacgggaggcagcagtggggaatattgcacaatggacgaaagtttgatgcagcgacgccgcgtggagggtgtaggccttcgggttgtgaactcctttttctcgcgaaaaaggcacagttttggctgtgttgatggtagtgggggaagaagcgccggctaactacgtgccagcagccgcggtaatacgtagggcgcgagcgttgtccggatttattgggcgtaaagagctcgtaggtggttcgtcgcgtctgtcgtgaaagccagcagcttaactgttggtctgcggtgggtacgggcgggcttgagtgcggtaggggtgactggaattcctggtgtagcggtggaatgcgcagatatcaggaggaacaccgatggcgaaggcaggtcactgggccgttactgacactgaggagcgaaagcgtggggagcgaacaggattagataccctggtagtccacgctgtaaacgttgggaactaggtgtggggatgctatcctgtgtttctgcgccgtagctaacgcattaagttccccgcctggggagtacggtcgcaaggctaaaactcaaaggaattgacgggggcccgcacaagcggcggagcatgcggattaattcgatgcaacgcgaagaaccttaccaaggcttgacatacactgcgatggttccagagatgggccagccttcggggtggtgtacaggtggtgcatggttgtcgtcagctcgtgtcgtgagatgttgggttaagtcccgcaacgagcgcaacccttgcctcatgttgccagcggttcggccggggactcgtgagggactgccggggttaactcggaggagggtggggatgacgtcaaatcatcatgccccttatgtcttgggcttcacgcatgctacaatggccagtacagagggttgcgataccgtgaggtggggctaatctcttaaagctggtctcggttcggattggggtctgcaactcgaccccatgaagttggagtcgctagtaatcgcagatcagcattgctgcggtgaatacgttctcgggccttgtacacaccgcccgtcacgtcacgaaagttggtaacacccgaagcccgtggcttaactctttttgagggggagcggtcgaaggtgggattggcgattgggacgaagtcgtaacaaggtagccgtaccggaaggtgcggctggatcacctcctttct

SEQ ID NO: 1252 - DNA, 1542 bp, Mobiluncus mulieris
ttttgttggagagtttgatcctggctcaggacgaacgctggcggcgtgcttaacacatgcaagtcgaacgatgaagccgcagcttgctgtggtggattagtggcgaacgggcgagtaacacgtgagtaacctgtccttttctttgggataacggctggaaacggctgctaatactggatattcaggctgcatcgcatggtgtggtttggaaaggttttttctggaatggggtgggctcgcggcctatcagcttgttggtggggtgatggcttaccaaggctttgacgggtagccggcctgagagggtggtcggtcgcactgggactgagatacggcccagactcctacgggaggcagcagtggggaatattgcacaatggacggaagtttgatgcagcgacgccgcgtggagggtgtaggccttcgggttgtgaactcctttttctcgtgaaaaaggcatgcttttgggtgtgttgatggtagcgggggaagaagcgccggctaactacgtgccagcagccgcggtaatacgtagggcgcgagcgttgtccggatttattgggcgtaaagagctcgtaggtggttcgtcgcgtctgtcgtgaaagccagcagcttaactgttggtctgcggtgggtacgggcgggcttgagtgcggtaggggtgactggaattcctggtgtagcggtggaatgcgcagatatcaggaggaacaccgatggcgaaggcaggtcactgggccgttactgacgctgaggagcgaaagcgtggggagcgaacaggattagataccctggtagtccacgctgtaaacgttgggaactaggtgtggggatgctatcctgtgtttctgcgccgtagctaacgcattaagttccccgcctggggagtacggccgcaaggctaaaactcaaaggaattgacgggggcccgcacaagcggcggagcatgcggattaattcgatgcaacgcgaagaaccttaccaaggcttgacatacactgcgacatgccagagatggtgtggccttcggggtggtgtacaggtggtgcatggttgtcgtcagctcgtgtcgtgagatgttgggttaagtcccgcaacgagcgcaacccttgcctcatgttgccagcacgttatggtggggactcgtgagggactgccggggttaactcggaggagggtggggatgacgtcaaatcatcatgccccttatgtcttgggcttcacgcatgctacaatggccagtacagagggttgcgataccgtgaggtggggctaatctcttaaagctggtctcggttcggattggggtctgcaactcgaccccatgaagttggagtcgctagtaatcgcagatcagcattgctgcggtgaatacgttctcgggccttgtacacaccgcccgtcacgtcacgaaagttggtaacacccgaagcccgtggcctagcctttttggggggagcggtcgaaggtgggattggcgattgggacgaagtcgtaacaaggtagccgtaccggaaggtgcggctggatcacctcctttct

SEQ ID NO: 1253 - DNA, 1532 bp, Moellerella wisconsensis
agagtttgatcatggctcagattgaacgctggcggcaggcctaacacatgcaagtcgagcggtaacaggaagaagcttgcttctttgctgacgagcggcggacgggtgagtaatgtatggggatctgcctgacagagggggataactactggaaacggtagctaataccgcataatctctaaggagcaaagcaggggaccttcgggccttgcgctgtcggatgaacccatatgggattagctagtaggtggggtaacggctcacctaggcgacgatctctagctggtctgagaggatgatcagccacactgggactgagacacggcccagactcctacgggaggcagcagtggggaatattgcacaatgggcgcaagcctgatgcagccatgccgcgtgtatgaagaaggccttagggttgtaaagtactttcagtcgggaggaaggcgttgatattaatactatcagcgattgacgttaccgacagaagaagcaccggctaactccgtgccagcagccgcggtaatacggggggtgcaagcgttaatcggaattactgggcgtaaagcgcacgcaggcggttgattaagttagatgtgaaatccccgggcttaacctgggaatggcatctaaaactggtcagctagagtcttgtagaggggggtagaattccatgtgtagcggtgaaatgcgtagagatgtggaggaataccggtggcgaaggcggccccctggacaaagactgacgctcaggtgcgaaagcgtggggagcaaacaggattagataccctggtagtccacgctgtaaacgatgtcgatttggaggttgttcccttgaggagtggcttccggagctaacgcgttaaatcgaccgcctggggagtacggccgcaaggttaaaactcaaatgaattgacgggggcccgcacaagcggtggagcatgtggtttaattcgatgcaacgcgaagaaccttacctactcttgacatccagagaatttagcagagatgctttagtgccttcgggaactctgagacaggtgctgcatggctgtcgtcagctcgtgttgtgaaatgttgggttaagtcccgcaacgagcgcaacccttatcctttgttgccagcacgtaatggtgggaactcaagggagactgccggtgataaaccggaggaaggtggggatgacgtcaagtcatcatggcccttacgagtagggctacacacgtgctacaatggcgcatacaaagagaagcgaactcgcgagagccagcggaactcataaagtgcgtcgtagtccggattggagtctgcaactcgactccatgaagtcggaatcgctagtaatcgtagatcagaatgctacggtgaatacgttcccgggccttgtacacaccgcccgtcacaccatgggagtgggttgcaaaagaagtaggtagcttaaccttcgggggggcgcttaccactttgtgattcatgactggggtgaagtcgtaacaaggtaaccgtaggggaacctgcggttggatcacctt

SEQ ID NO: 1254 - DNA, 1455 bp, Mogibacterium diversum
  modified_base (792)..(793): a, c, t, g, unknown or other
acgctggcggcgtgcctaatacatgcaagtcgagcgagatgttagcgcatgaaccttcgggggattatgctaacggacagcggcggacggtgtgagtaacgcgtaggcaacctgcccctgacagagggatagccattggaaacgatgattaaaaccatcatgacaccgtagaagcacatgcttcatcggtcaaagatttatcggtcagggatgggcctgcgtctgattaactagttggtgaggtaacggctcaccaaggtgacgatcagtagccgacctgagagggtgatcggccacattggaactgagacacggtccaaacttctacggaaggcagcagtagggaatcttgcacaatgggcgaaagcctgatgcagcaacgccgcgtgaaggatgaaggccttcgggttgtaaacttctgttctaagggaagaaacaaatgacggtaccttaggagcaagccccggctaactacgtgccagcagccgcggtaatacgtagggggcaagcgttatccggaattattgggcgtaaagagtgcgtaggtggttacctaagcgcaaggtttaatttagaggctcaacctctacttgccttgcgaactgggctactttagtgcaggaggggaaagcggaattcctagtgtagcggtgaaatgcgtagatattaggaggaacaccagcggctgaaggtcggtctttctggactgtaactgacactgaggcacgaaagcgtgggtagcaaacaggattagataccctggtagtccacgccgtaaacgatgagcactanntgttgggcccgttagggctcagtgccgcagttaacgcaataagtgctccgcctggggagtacgctcgcaagagtaaaactcaaaggaattgacggggacccgcacaagcagcggagcatgtggtttaattcgaagcaacgcgaagaaccttaccagggcttgacatcctgctgacaggaccttaaccggtcccttcttcggacagcagagacaggtggtgcatggttgtcgtcagctcgtgtcgtgagatgttgggttaagtcccgcaacgagcgcaacccttgtcgctagttactaacattcagttgaggactctagcgagactgccgaggtcaactcggaggaaggtggggatgacgtcaaatcatcatgccccttatgttctgggctacacacgtgctacaatggtcggtacaatgagaggcaatactgtgaagtggagcaaatcaccaaaaccgatcccagttcggattgtaggctgcaactcgcctacatgaagttggagttgctagtaatcgcagatcagaatgctgcggtgaatgcgttcccgggtcttgtacacaccgcccgtcacaccatggaagttgggggtgcccaaagtcgtttaattaatctatcgcctaaggcaaaaccaatgactggggtgaagtcgtaacaaggta

SEQ ID NO: 1255 - DNA, 1478 bp, Mogibacterium neglectum
agtttgatcatggctcaggatgaacgctggcggcgtgcctaatacatgcaagtcgagcgagatgttagcgcatgaaccttcgggggattatgctaacggaaagcggcggacgggtgagtaacgcgtaggcaacctgcccctgacagagggatagccattggaaacgatgattaaaacctcatgacaccgatgaagcacatgcttcatcggtcaaagatttatcggtcagggatgggcctgcgtctgattaactagttggtgaggtaacggctcaccaaggtgacgatcagtagccgacctgagagggtgatcggccacattggaactgagacacggtccaaacttctacggaaggcagcagtagggaatcttgcacaatgggcgaaagcctgatgcagcaacgccgcgtgaaggatgaaggccttcgggttgtaaacttctgttctaagggaagaaacaaatgacggtaccttaggagcaagccccggctaactacgtgccagcagccgcggtaatacgtagggggcaagcgttatccggaattattgggcgtaaagagtgcgtaggtggttacctaagcgcaaggtttaatttagaggctcaacctctacttgccttgcgaactgggctacttgagtgcaggaggggaaagcggaattcctagtgtagcggtgaaatgcgtagatattaggaggaacaccagcggcgaaggcggctttctggactgtaactgacactgaggcacgaaagcgtgggtagcaaacaggattagataccctggtagtccacgccgtaaacgatgagcactaggtgttgggcccgttaggctcagtgccgcagttaacgcaataagtgctccgcctggggagtacgctcgcaagagtaaaactcaaaggaattgacggggacccgcacaagcagcggagcatgtggtttaattcgaagcaacgcgaagaaccttaccagggcttgacatcctgctgacaggaccttaaccggtcccttcttcggacagcagagacaggtggtgcatggttgtcgtcagctcgtgtcgtgagatgttgggttaagtcccgcaacgagcgcaacccttgtcgctagttactaacattcagttgaggactctagcgagactgccgaggtcaactcggaggaaggtggggatgacgtcaaatcatcatgccccttatgttctgggctacacacgtgctacaatggtcggtacaatgggatgcaatactgtgaagtggagcaaatcaccaaaaccgatcccagttcggattgtaggctgcaactcgcctacatgaagttggagttgctagtaatcgcagatcagaatgctgcggtgaatgcgttcccgggtcttgtacacaccgcccgtcacaccatgggaagttgggggtgcccaaagtcggttaattaatctatcgcctaaggcaaaaccaatgactggggtgaagtcgtaacaaggtaaccgt

SEQ ID NO: 1256 - DNA, 1466 bp, Mogibacterium pumilum
  modified_base (946)..(947): a, c, t, g, unknown or other
ttgatcctggctcaggatgaacgctggcggcgtgcctaatacatgcaagtcgagcgagatgttagtgcatgaacttcgggggattatattaacggacagcggcggacgggtgagtaacgcgtaggcaacctgcccttgacagagggatagccattggaaacgatgattaaaacctcataacaccgtagaagcacatgcttcaacggtcaaagatttatcggtcagggatgggcctgcgtctgattaactagttggtgaggtaacggctcaccaaggtgacgatcagtagccgacctgagagggtgatcggccacattggaactgagacacggtccaaacttctacggaaggcagcagtagggaatcttgcacaatggcgaaagcctgatgcagcaacgccgcgtgaaggatgaaggcttcgggttgtaaacttctgttctaagggaagaaacaaatgacggtaccttaggagcaagccccggctaactacgtgccagcagccgcggtaatacgtagggggcaagcgttatccggaattattgggcgtaaagagtgcgtaggtggttacctaagcgcaaggtttaatttagaggctcaacctctacttgccttgcgaactgggctacttgagtgcaggaggggaaagcggaattcctagtgtagcggtgaaatgcgtagatattaggaggaacaccagcggcgaaggcggctttctggactgtaactgacactgaggcacgaaagcgtgggtagcaaacaggattagataccctggtagtccacgccgtaaacgatgagcactaggtgttgggtccgttaggctcagtgccgcagttaacgcaataagtgctccgcctggggagtacgctcgcaagagtaaaactcaaaggaattgacggggacccgcacaagcagcggacatgtggtttaattcgaagcaacgcgnnagaaccttaccagggcttgacatcctgctgacaggatcttaaccgatcccttcttcggacagcagagacaggtggtgcatggttgtcgtcagctcgtgtcgtgagatgttgggttaagtcccgcaacgagcgcaacccttgtcgctagttactaacattcagttgaggactctagcgagactgccgaggtcaactcggaggaaggtggggatgacgtcaaatcatcatgccccttatgttctgggctacacacgtgctacaatggtcggtacaatgagaggcaatactgcgaagtggagcgaatcaccaaaaccgatcccagttcggattgtaggctgcaactcgcctacatgaagttggagttgctagtaatcgcagatcagaatgctgcggtgaatgcgttcccgggtcttgtacacaccgcccgtcacaccatggaagttgggggtgcccgaagtcggctaattaatctgtcgcctaaggcaaaaccaatgactggggtgaagtcgtaacaaggta

SEQ ID NO: 1257 - DNA, 1480 bp, Mogibacterium timidum
agagtttgatcctggctcaggatgaacgctggcggcgtgcctaatacatgcaagtcgagcgagaagcttggaaatgacgcttcggttgaatttccaagcggacagcggcggacgggtgagtaacgcgtaggcaacctgcccctgtacagagggatagccattggaaacgatgattaaaacctcatgacaccgtagtagcacatgctacatcggtcaaagatttatcggtcagggatgggcctccgtctgattaactggttggtgaggtaacggctcaccaaggtgacgatcagtagccgacctgagagggtgatcggccacattggaactgagacacggtccaaacttctacggaaggcagcagtagggaatcttgcacaatgggcgtaagcctgatgcagcaacgccgcgtgaaggatgaaggcttcgggttgtaaacttctgttctaagggaagaaagaaatgacggtaccttaggagcaagccccggctaactacgtgccagcagccgcggtaatacgtagggggcaagcgttatccggaattattgggcgtaaagagtgcgtaggtggttacctaagcgcaaggtttaaattagaggctcaacctctacatgccttgcgaactgggctacttgagtgcaggaggggaaagcggaattcctagtgtagcggtgaaatgcgtagatattaggaggaacaccggcggcgaaggcggctttctggactgtaactgacactgaggcacgaaagcgtgggtagcaaacaggattagataccctggtagtccacgccgtaaacgatgagcactaggtgttgggtccgttaggactcagtgccgcagttaacgcaataagtgtccgcctgggagtacgctcgcaagagtaaactcaaggaattgacgggcacccgcacaagcaggggagcttgtggtttaattcgaagcaacgcgaagaaccttaccagggcttgacatcctgctgacagaaccttaatcggttttttcttcggacagcagagacaggtggtgcatggttgtcgtcagctcgtgtcgtgagatgttgggttaagtcccgcaacgagcgcaacccttgtcgctagttactaacattcagttgaggactctagcgagactgccgaggtcaactcggaggaaggtggggatgacgtcaaatcatcatgccccttatgttctgggctacacacgtgctacaatggtcggtacaatgagatgcaatactgcgaagtggagcgaaacaccaaaaccgatcccagttcggattgtaggctgcaactcgcctacatgaagtcggagttgctagtaatcgcagatcagaatgctgcggtgaatgcgttcccgggtcttgtacacaccgcccgtcacaccatggaagttgggggtgcccaaagtcggttaattaatctatcgcctaaggcaaaaccaatgactggggtgaagtcgtaacaaggtacccgtagga

SEQ ID NO: 1258 - DNA, 1400 bp, Mollicutes bacterium pACH93
gcaagtcgaacgaagaactagcttgctagttcttagtggcgaacgggtgagtaatacataaataatctgtccatatgactgggataactattggaaacgatagctaataccggataggttaattgaaggcatcttcgattaattaaagtaggttttctacacaaatggatgagtttatggcgcattagttagttggtggggtaacggcctaccaagacgatgatgcgtagccgacctgagagggtgaccggccacactgggactgagacacggcccagactcctacgggaggcagcagtagggaattttcggcaatgggcgcaagcctgaccgagcaacgccgcgtgagtgattaaggccttcgggttgtaaagctctgttgtaagggaagaaaaatcagtagaggaaatgatactgatcagacggtaccttaccagaaagccacggctaactacgtgccagcagccgcggtaatacgtaggtggcaagcgttatccggaattattgggcgtaaagggtgcgtaggcggtttattaagtctatggtgaaagtgcggggctcaaccccgtatggccatagaaactgatagactagagtgcaggagagggcaatggaattccatgtgtagcggtaaaatgcgtagatatatggaggaacaccagtggcgaaggcggttgcctggcctgtaactgacgctgaagcacgaaagcgtggggagcaaataggattagataccctagtagtccacgccgtaaacgatgaatactaagtgttggagaaattcagtgctgcagttaacgcaataagtattccgcctggggagtatgcacgcaagtgtgaaactcaaaggaattgacgggaccccgcacaagcggtggattatgttgtttaattcgacgcaacgcgaagaaccttaccaggccttgacatactcagcaaaaccctagagatagggtggaggttatctgggatacaggtggtgcatggttgtcgtcagctcgtgtcgtgagacgttgggttaagtcccgcaacgagcgcaacccttgtctttagttaccatcattcagttggggactctagagagactgccggtgataaaccggaggaaggtggggatgacgtcaaatcatcatgccccttatggcctgggctacaaacgtaatacaatggcgtatacaaagggatgcgaaagggtgacctggagcaaaactcacaaagtacgtctcagttcagattggagtctgcaactcgactccatgaaggcggaatcgctagtaatcgcggatcagcatgccgcggtgaatacgttctcggggtttgtacacaccgcccgtcaaaccatgagagttggtaatacccgaagccggtggcctaacctagtaataggagggagccgtcga

SEQ ID NO: 1259 - DNA, 1555 bp, Moorella thermoacetica
gtttgatcctggctcaggacaaacgctggcggcgtgcctaacacatgcaagtcgagcggtctttaattggggaaatcttcggatggaaccgattaaagatagcggcggacgggtgagtaacgcgtgggtaatctacccttcagactgggataacaccgggaaactggtgctaataccggatacggtctacgggaggcatcttctgtagaagaaaggtggcgcaagctaccgctgaaggatgagcccgcgtcccattagctagttggtgaggtaacggctcaccaaggcgacgatgggtagccggcctgagagggtggtcggccacactgggactgagacacggcccagactcctacgggaggcagcagtggggaatcttgcgcaatgggcgaaagcctgacgcagcaacgccgcgtgagcgatgaaggccttcgggttgtaaagctctgtcatcagggacgaagtcttaaaggcgaatagcctttaaggtgacggtacctgaggaggaagccccggctaactacgtgccagcagccgcggtaaaacgtagggggcgagcgttgtccggaattactgggcgtaaagggcgtgtaggcggcctggcaagtcagatgtgaaaaaccccggcttaaccgggggcatgcatttgaaactgccgggcttgagggcaggagaggagagtggaattcccggtgtagcggtgaaatgcgtagatatcgggaggaacaccagtggcgaaggcgactctctggcctggccctgacgctgaggcgcgaaagcgtggggagcaaacaggattagataccctggtagtccacgccgtaaacgatgggtactaggtgtaggaggtatcgaccccttctgtgccgcagtaaacacaataagtaccccgcctggggagtacggccgcaaggctgaaactcaaaggaattgacgggggcccgcacaagcggtggagcatgtggtttaattcgacgcaacgcgaagaaccttaccggggtttgacatcctgcgaacctggtggaaacactggggtgcccttcggggaacgcagagacaggtggtgcatggttgtcgtcagctcgtgtcgtgagatgttgggttaagtcccgcaacgagcgcaacccctacctttagttgccagcgggtaaagccgggcactctaaagggactgccggtgacaaaccggaggaaggtggggatgacgtcaaatcatcatgccccttatatcccgggctacacacgtgctacaatggcctgtacaaaggggtgcgaaggagcgatccggagcgaatcccaaaaagcaggtctcagttcggattgcaggctgcaactcgcctgcatgaagtcggaatcgctagtaatcgcggatcagcatgccgcggtgaatacgttcccgggccttgtacacaccgcccgtcacaccacgaaagctggcaacacccgaagccggtgacctaacccgcgagggaaggagccgtctaaggtggggctggtgattggggtgaagtcgtaacaaggtagccgtatcggaaggtgcggctggatcacctcc

SEQ ID NO: 1260 - DNA, 1532 bp, Moraxella catarrhalis
ttaaactgaagagtttgatcatggctcagattgaacgctggcggcaggcttaacacatgcaagtcgaacgaagttaggaagcttgcttctgatacttagtggcggacgggtgagtaatgcttaggaatctgcctagtagtgggggataacttggggaaacccaagctaataccgcatacgacctacgggtgaaagggggcttttagctctcgctattagatgagcctaagtcggattagctggttggtggggtaaaggcctaccaaggcgacgatctgtagctggtctgagaggatgatcagccacactgggactgagacacggcccagactcctacgggaggcagcagtggggaatattggacaatgggcgaaagcctgatccagccatgccgcgtgtgtgaagaaggccttttggttgtaaagcactttaagtggggaggaaaagcttatggttaatacccataagccctgacgttacccacagaataagcaccggctaactctgtgccagcagccgcggtaatacagagggtgcaagcgttaatcggaattactgggcgtaaagcgcgcgtaggtggttatttaagtcagatgtgaaagccccgggcttaacctgggaactgcatctgatactggataactagagtaggtgagaggggagtagaattccaggtgtagcggtgaaatgcgtagagatctggaggaataccgatggcgaaggcagctccctggcatcatactgacactgaggtgcgaaagcgtgggtagcaaacaggattagataccctggtagtccacgccgtaaacgatgtctaccagtcgttgggtcttttaaagacttagtgacgcagttaacgcaataagtagaccgcctggggagtacggccgcaaggttaaaactcaaatgaattgacgggggcccgcacaagcggtggagcatgtggtttaattcgatgcaacgcgaagaaccttacctggtcttgacatagtgagaatcttgcagagatgcgagagtgccttcgggaattcacatacaggtgctgcatggctgtcgtcagctcgtgtcgtgagatgttgggttaagtcccgcaacgagcgcaacccttttccttagttaccagcgactcggtcgggaactctaaggatactgccagtgacaaactggaggaaggcggggacgacgtcaagtcatcatggcccttacgaccagggctacacacgtgctacaatggttggtacaaagggttgctacacagcgatgtgatgctaatctcaaaaagccaatcgtagtccggattggagtctgcaactcgactccatgaagtcggaatcgctagtaatcgcagatcagaatgctgcggtgaatacgttcccgggccttgtacacaccgcccgtcacaccatgggagttgatctcaccagaagtggttagcctaacgcaagagggcgatcaccacggtggggtcgatgactggggtgaagtcgtaacaaggtagccgtaggggaacctgcggctggatcacctcctta

SEQ ID NO: 1261 - DNA, 1501 bp, Moraxella lincolnii
attgaacgctggcggcaggcttaacacatgcaagtcgaacgaagaggtctagcttgctagactgattagtggcgaacgggtgagtaacatttaggaatctaccttatagagggggatagctcggggaaactcgaattaataccgcatacgacctacgggtgaaagggggcgcaagctcttgctataagatgagcctaaaccagattagctagttggtggggtaaaggcctaccaaggcgacgatctgtagctggtctgagaggatgatcagccacactgggactgagacacggcccagactcctacgggaggcagcagtggggaatattggacaatgggcgaaagcctgatccagccatgccgcgtgtgtgaagaaggccttatggttgtaaagcacttttaagtggggagaaaagcttatggataacacccataggttctgacgttacccacagaataagcaccggctaactctgtgccagcagccgcggtaatacagagggtgcaagcgttaatcggaattactgggcgtaaagcgagcgtaggtggtttattaagtcagatgtgaaatccctgggcttaacctaggaactgcatctgatactgataaactagagtaggtgagaggaaagtagaattccaggtgtagcggtgaaatgcgtagagatctggaggaataccgatggcgaaggcagctttctggcatcatactgacactgaggttcgaaagcgtgggtagcaaacaggattagataccctggtagtccacgccgtaaacgatgtctaccagtcgttgggtcttttaaaggcttagtgacgcagttaacgcgataagtagaccgcctggggagtacggccgcaaggttaaaactcaaatgaattgacgggggcccgcacaagcggtggagcatgtggtttaattcgatgcaacgcgaagaaccttacctggtcttgacatagtgagaatcttgcagagatgcgagagtgcctttgggaattcacatacaggtgctgcatggctgtcgtcagctcgtgtcgtgagatgttgggttaagtcccgcaacgagcgcaacccttttccttagttaccagcgacttggtcggggactttaaggacactgccagtgacaaactggaggaaggcggggacgacgtcaagtcatcatggcccttacgaccagggctacacacgtgctacaatggtaggtacagagggcagctacacggcgacgtgatgccaatctcaaaaagcctatcttagtccagattggagtctgcaactcgactccatgaagtcggaatcgctagtaatcgcggatcagaatgccgcggtgaatacgttcccgggccttgtacacaccgcccgtcacaccatgggagttgattgcaccagaagtggttagcctaacttaggagggcgatcaccacggtgtggttaatgactggggtgaagtcgtaacaaggtagccgtaggggaacctgcggctggatcacctcctta

SEQ ID NO: 1262 - DNA, 1522 bp, Moraxella osloensis
tagagtttgatcatggctcagattgaacgctggcggcaggcttaacacatgcaagtcgaacgatgactctctagcttgctagagatgattagtggcggacgggtgagtaacatttaggaatctacctagtagtgggggatagctcggggaaactcgaattaataccgcatacgacctacgggtgaaagggggcgcaagctcttgctattagatgagcctaaatcagattagctagttggtggggtaaaggcccaccaaggcgacgatctgtaactggtctgagaggatgatcagtcacaccggaactgagacacggtccggactcctacgggaggcagcagtggggaatattggacaatgggggcaaccctgatccagccatgccgcgtgtgtgaagaaggccttttggttgtaaagcactttaagcagggaggagaggctaatggttaatacccattagattagacgttacctgcagaataagcaccggctaactctgtgccagcagccgcggtaatacagagggtgcgagcgttaatcggaattactgggcgtaaagcgagtgtaggtggctcattaagtcacatgtgaaatccccgggcttaacctgggaactgcatgtgatactggtggtgctagaatatgtgagagggaagtagaattccaggtgtagcggtgaaatgcgtagagatctggaggaataccgatggcgaaggcagcttcctggcataatattgacactgagattcgaaagcgtgggtagcaaacaggattagataccctggtagtccacgccgtaaacgatgtctactagccgttggggtccttgagactttagtggcgcagttaacgcgataagtagaccgcctggggagtacggccgcaaggttaaaactcaaatgaattgacgggggcccgcacaagcggtggagcatgtggtttaattcgatgcaacgcgaagaaccttacctggtcttgacatagtgagaatctttcagagatgagagagtgccttcgggaactcacatacaggtgctgcatggctgtcgtcagctcgtgtcgtgagatgttgggttaagtcccgcaacgagcgcaacccttttccttatttgccagcgggttaagccgggaactttaaggatactgccagtgacaaactggaggaaggcggggacgacgtcaagtcatcatggcccttacgaccagggctacacacgtgctacaatggtaggtacagagggttgctacacagcgatgtgatgctaatctcaaaaagcctatcgtagtccggattggagtctgcaactcgactccatgaagtcggaatcgctagtaatcgcggatcagaatgccgcggtgaatacgttcccgggccttgtacacaccgcccgtcacaccatgggagtctattgcaccagaagtaggtagcctaacgaaagagggcgcttaccacggtgtggtcgatgactggggtgaagtcgtaacaaggtagccgtaggggaacctgcggttggatcacctc

SEQ ID NO: 1263 - DNA, 1450 bp, Moraxella sp.
  16285
attgaacgctggcggcaggcttaacacatgcaagtcgaacgatrgaacctagcttgctaggggaaatagtggcgaacgggtgagtaacatttaggaaactgccttatagagggggatagctcggggaaactcgaattaataccgcatacgtcctacgggagaaaggagctttagggttctgctataagatgtgcctaaattagattagctagatggtgaggtaaaggctcaccatggcgacgatctataactggtcttagaggatgatcagtcacaccggaactgagacacggtccggactcctacgggaggcagcagtggggaatattggacaatgggggcaaccctgatccagccatgccgcgtgtgtgaagaaggtcataagattgtaaagcactttaagcagggaggaagagccagtggagaaacacactggtggtgacgttacctgcagaataagcaccggctaactctgtgccagcagccgcggtaatacagagggtgcgagcgttaatcggaattactgggcgtaaagcgggtgcaggtggtgcactaagtcatatgtgaaagccctgggcttaacctaggaacagcatatgatactggtgaactagagtatatgagaggraagtagaattccaggtgtagcggtgaaatgcgtagagatctggaggaataccgatggcgaaggcagctttctggcacaatactgacactcagacccgaaagcgtgggtagcaaacaggattagataccctggtagtccacgccgtaaacgatgtctactagccgttggrgctcatgaagcyttagtggcgcagctaacgcgataagtagaccgcctggggagtacggccgcaaggttaaaactcaaatgaattgacgggggcccgcacaagcggtggagcatgtggtttaattcgatgcaacgcgaagaaccttacctggtcttgacatagtgagratcctacagagatgtgggagtgccythgggaaytcacatacaggtgctgcatggctgtcgtcagctcgtgtcgtgagatgttgggttaagtcccgcaacgagcgcaacccttatccttacttgctagcrggtaragcygagaactgtaaggagactgccagtgacaaactggaggaaggcggggacgacgtcaagtcatcatggcccttacgaccagggctacacacgtgctacaatggtaggtacagagggcagctacacagcgatgtgatgcgaatctcaaaaagcctatcgtagtccggattggagtctgcaactcgactycatgaagtcggaatcgctagtaatcgcagatcagaatgctgcggtgaatacgttcccgggccttgtacacaccgcccgtcacaccatgggagtctattgcaccagaagtaggtagcctaacgcaagagggcgcttaccacggtgtggtcgatgactggggtg

SEQ ID NO: 1264 - DNA, 1226 bp, Moraxella sp.
  GM2
ctggctcagattgaacgctggcggcaggcttaacacatgcaagtcgaacgagtggcggacgggtgagtaacatttaggaatctgcctagtagtgggggatagctcggggaaactcgaattaataccgcatacggaaagttgctattagatgagcctaaatcagattagctagttggtggggtaaaggcccaccaaggcgacgatctgtaactggtctgagaggatgatcagtcacaccggaactgagacacggtccggactcctacgggaggcagcagtggggaatattggacaatgggggcaaccctgatccagccatgccgcgtgtgtgaagaaggccttttggttgtaaagcactttaagcagggaggaagacgttacctgcagaataagcaccggctaactctgtgccagcagccgcggtaatacagagggtgcgagcgttaatcggaattactgggcgtaaagcgagtgtaggtggctcattaagtcacatgtgaaatccccgggcttaacctgggaactgcatgtgatactggtgggctagaatatgtgagagggaagtagaattccaggtgtagcggtgaaatgcgtagagatctggaggaataccgatggcgaaggcagcttcctggcataattgacactgagattcgaaagcgtgggtagcaaacaggattagataccctggtagtccacgccgtaaacgatgtctactagccgttggggctttagtggcgcagttaacgcgataagtagaccgcctggggagtacggccgcaaggttaaaactcaaatgaattgacgggggcccgcacaagcggtggagcatgtggtttaattcgatgcaacgcgaagaaccttacctggtcttgacatatacaggtgctgcatggctgtcgtcagctcgtgtcgtgagatgttgggttaagtcccgcaacgagcgcaacccttttccttatttgccagcggccgggaactttaaggatactgccagtgacaaactggaggaaggcggggacgacgtcaagtcatcatggcccttacgaccagggctacacacgtgctacaatggtaggcagagggttgctacacagcgatgtgatgctaatctcaacctatcgtagtccggatggagtctgcaactcgactccagaagtcggaatcgctagtaatcgcagatcagaatgctgcggtgaatacgttcccgggccttgtacacaccg

SEQ ID NO: 1265 - DNA, 1402 bp, Morganella morganii
tcgggcggtaacagggagaagcttgcttctctgctgacgagcggcggacgggtgagtaatgtatggggatctgcctgatggcgggggataactactggaaacggtagctaataccgcataatgtcttcggaccaaagcgggggacctccgggcctcgcgccatcagatgaacccatatgggattagctagtaggtgaggtaacggcttacctaggcgacgatccctagctggtctgagaggatgatcagccacactgggactgagacacggcccagactcctacgggaggcagcagtggggaatattgcacaatgggcgcaagcctgatgcagccatgccgcgtgtatgaagaaggccttcgggttgtaaagtactttcagtcgggaggaaggtggtaaggttaataaccttggcaattgacgttaccgacagaagaagcaccggctaactccgtgccagcagccgcggtaatacggagggtgcaagcgttaatcggaattactgggcgtaaagcgcacgcaggcggttgattgagtcagatgtgaaatccccgggcttaacccgggaattgcatctgatactggtcagctagagtcttgtagaggggggtagaattccatgtgtagcggtgaaatgcgtagagatgtggaggaataccggtggcgaaggcggccccctggacaaagactgacgctcaggtgcgaaagcgtggggagcaaacaggattagataccctggtagtccacgctgtaaacgatgtcgacttggaggttgtgcccttgaggcgtggcttccggagctaacgcgttaagtcgaccgcctggggagtacggccgcaaggttaaaactcaaatgaattgacgggggcccgcacaagcggtggagcatgtggtttaattcgatgcaacgcgaagaaccttacctactcttgacatccagagaactttccagacatggattggagccttcgggaactctgagacggttaacccgggaattgcatctgatagtgttgtgaaatgttgggttaagtcccgcaacgagcgcaacccttatcctttgttgccagcgcgtgatggcgggaactcaaaggagactgccggtgataaaccggaggaaggtggggatgacgtcaagtcatcatggcccttacgagtagggctacacacgtgctacaatggcgtatacaaagggaagcgaccccgcgagggcaagcggaactcataaagtacgtcgtagtccggattggagtctgcaactcgactccatgaagtcggaatcgctagtaatcgtagatcagaatgctacggtgaatacgttcccgggccttgtacacaccgcccgtcacaccatgggagtgggttgcaaaagaagtaggtagcttaacctccgggagggcgc

SEQ ID NO: 1266 - DNA, 1495 bp, Morganella sp.
  JB-T16
attgaacgctggcggcaggcctaacacatgcaagtcgggcggtaacagggagaagcttgcttctctgctgacgagcggcggacgggtgagtaatgtatggggatctgcctgatggagggggataactactggaaacggtagctaataccgcataatgtctccggaccaaagcgggggaccttcgggcctcgcaccatcagatgaacccatatgggattagctagtaggtgaggtaatggctcacctaggcgacgatctctagctggtctgagaggatgatcagccacactgggactgagacacggcccagactcctacgggaggcagcagtggggaatattgcacaatgggcgcaagcctgatgcagccatgccgcgtgtatgaagaaggccttagggttgtaaagtactttcagtcgggaggaaggtgttgagtttaatatgctcagcaattgacgttaccgacagaagaagcaccggctaactccgtgccagcagccgcggtaatacggagggtgcaagcgttaatcggaattactgggcgtaaagcgcacgcaggcggttgattaagtcagatgtgaaatccccgggctcaacccgggaattgcatctgagactggtcagctagagtcttgtagaggggggtagaattccatgtgtagcggtgaaatgcgtagagatgtggaggaataccggtggcgaaggcggccccctggacaaagactgacgctcaggtgcgaaagcgtggggagcaaacaggattagataccctggtagtccacgctgtaaacgatgtcgacttggaggttgtgcccttgaggcgtggcttccggagctaacgcgttaagtcgaccgcctggggagtacggccgcaaggttaaaactcaaatgaattgacgggggcccgcacaagcggtggagcatgtggtttaattcgatgcaacgcgaagaaccttacctactcttgacatccagagaacttagcagagatgctttggtgccttcgggaactctgagacaggtgctgcatggctgtcgtcagctcgtgttgtgaaatgttgggttaagtcccgcaacgagcgcaacccttatcctttgttgccagcrcgtaatggygggaactcaaaggagactgccggtgataaaccggaggaaggtggggatgacgtcaagtcatcatggcccttacgagtagggctacacacgtgctacaatggcgtatacaaagggaagcgacctcgcgagagcaagcggaactcacaaagtacgtcgtagtccggattggagtctgcaactcgactccatgaagtcggaatcgctagtaatcgtagatcagaatgctacggtgaatacgttcccgggccttgtacacaccgcccgtcacaccatgggagtgggttgcaaaagaagtaggtagcttaaccttcgggagggcgcttaccactttgtgattcatgactggggtgaagtcgtaacaaggtaaccgtaggggaacc

SEQ ID NO: 1267 - DNA, 1427 bp, Morococcus cerebrosus
atgcaagtcggacggcagcacagagaagcttgcttcttgggtggcgagtggcgaacgggtgagtaacatatcggaacgtaccgagcagtgggggataactaatcgaaagattagctaataccgcatatattctgaggaagaaagcaggggaccatttggccttgcgctgtttgagcggccgatatctgattagctagttggtggggtaaaggcctaccaaggcgacgatcagtagcgggtctgagaggatgatccgccacactgggactgagacacggcccagactcctacgggaggcagcagtggggaattttggacaatgggcgaaagcctgatccagccatgccgcgtgtctgaagaaggccttcgggttgtaaaggacttttgtcagggaagaaaagggcggggttaatacccctgtctgatgacggtacctgaagaataagcaccggctaactacgtgccagcagccgcggtaatacgtagggtgcgagcgttaatcggaattactgggcgtaaagcgggcgcagacggttacttaagcaggatgtgaaatccccgggctcaacctgggaactgcgttctgaactgggtgactagagtgtgtcagagggaggtagaattccacgtgtagcagtgaaatgcgtagagatgtggaggaataccgatggcgaaggcagcctcctgggataacactgacgttcatgcccgaaagcgtgggtagcaaacaggattagataccctggtagtccacgccctaaacgatgtcgattagctgttgggcagcatgactgcttagtagcgaagctaacgcgtgaaatcgaccgcctggggagtacggtcgcaagattaaaactcaaaggaattgacggggacccgcacaagcggtggatgatgtggattaattcgatgcaacgcgaagaaccttacctggtcttgacatgtacggaatcctccagagacggaggagtgccttcgggagccgtaacacaggtgctgcatggctgtcgtcagctcgtgtcgtgagatgttgggttaagtcccgcaacgagcgcaacccttgtcattagttgccatcattaagttgggcactctaatgagactgccggtgacaagccggaggaaggtggggatgacgtcaagtcctcatggcccttatgaccagggcttcacacgtcatacaatggtcggtacagagggtagccaagccgcgaggtggagccaatctcacaaaaccgatcgtagtccggattgcactctgcaactcgagtgcatgaagtcggaatcgctagtaatcgcaggtcagcatactgcggtgaatacgttcccgggtcttgtacacaccgcccgtcacaccatgggagtgggggataccagaagtaggtagggtaaccgcaaggagcccgcttaccacggtatgcttcatg

SEQ ID NO: 1268 - DNA, 1331 bp, Moryella indoligenes
gcgtgcttaacacatgcaagtcgaacgagtggcggacgggtgagtaacgcgtggggaacctgcctcatacagggggataacagttggaaacgactgttaataccgcataagaaaaagtggtatgagatggacccgcgttcgattagccagttggcggggtaacggcccaccaaagcgacgatcgatagccgatttgagagaatgaccggccacattgggactgagacacggcccaaactcctacgggaggcagcagtggggaatattgcacaatggggggaaccctgatgcagcgacgccgcgtgagtgaagaagtatttcggtatgtaaagctctatcagcagggaagatgacggtacctgagtaagaagccccggctaactacgtgccagcagccgcggtaatacgtagggggcaagcgttatccggatttactgggtgtaaagggagcgcagacggctatgcaagtctgaagtgaaagcccggggctcaaccccgggactgctttggaaactgtgtagctagagtgtcggagaggtaagcagaattcccagtgtagcggtgaaatgcgtagatattgggaagaataccggtggcgaaggcggcttactggacgaactgacgttcaggctcgaaggcgtggggagcaaacaggattagataccctggtagtccacgcggtaaacgatgaatactaggtgttggcatgtcggtgccgtcgcaaacgcaataagtattccacctggggagtacgttcgcaagaatgaaactcaaaggaattgacggggacccgcacaagcagtggagcatgtggtttaattcgaagcaacgcgaagaaccttaccaagtcttgacatcgacaggtggtgcatggttgtcgtcagctcgtgtcgtgagatgttgggttaagtcccgcaacgagcgcaacccctattgccagtagccagcagctgggcactctggcgagactgcctgggataaccaggaggaaggtggggatgacgtcaaatcatcatgccccttatgatttgggcaacacacgtgctacaatggcgtacagagagaagcgaaggagcgatccggagcgaatctaaaacgtctcagttcggatgcagtctgcaactcgactgcagaagctggaattgctagtaatcgcgaatcagcatgtcgcggtgaatacgttcccgggtcttgtacacaccgcccgtcacaccatgggagtcagcaacgcccgaagtcagtacccagggagctgccgaaggcggggcggataactggggtgaagtcgtaacaaggtagccgtatcggaaggtgcggttggatcacctcct

SEQ ID NO: 1269 - DNA, 1526 bp, Mycobacterium abscessus
ttttgtttggagagtttgatcctggctcaggacgaacgctggcggcgtgcttaacacatgcaagtcgaacggaaaggcccttcggggtactcgagtggcgaacgggtgagtaacacgtgggtgatctgccctgcactctgggataagcctgggaaactgggtctaataccggataggaccacacacttcatggtgagtggtgcaaagcttttgcggtgtgggatgagcccgcggcctatcagcttgttggtggggtaatggcccaccaaggcgacgacgggtagccggcctgagagggtgaccggccacactgggactgagatacggcccagactcctacgggaggcagcagtggggaatattgcacaatgggcgcaagcctgatgcagcgacgccgcgtgagggatgacggccttcgggttgtaaacctctttcagtagggacgaagcgaaagtgacggtacctacagaagaaggaccggccaactacgtgccagcagccgcggtaatacgtagggtccgagcgttgtccggaattactgggcgtaaagagctcgtaggtggtttgtcgcgttgttcgtgaaaactcacagcttaactgtgggcgtgcgggcgatacgggcagactagagtactgcaggggagactggaattcctggtgtagcggtggaatgcgcagatatcaggaggaacaccggtggcgaaggcgggtctctgggcagtaactgacgctgaggagcgaaagcgtgggtagcgaacaggattagataccctggtagtccacgccgtaaacggtgggtactaggtgtgggtttccttccttgggatccgtgccgtagctaacgcattaagtaccccgcctggggagtacggtcgcaagactaaaactcaaaggaattgacgggggcccgcacaagcggcggagcatgtggattaattcgatgcaacgcgaagaaccttacctgggtttgacatgcacaggacgtatctagagataggtattcccttgtggcctgtgtgcaggtggtgcatggctgtcgtcagctcgtgtcgtgagatgttgggttaagtcccgcaacgagcgcaacccttgtcctatgttgccagcgggtaatgccggggactcgtaggagactgccggggtcaactcggaggaaggtggggatgacgtcaagtcatcatgccccttatgtccagggcttcacacatgctacaatggccagtacagagggctgcgaagccgtaaggtggagcgaatcccttaaagctggtctcagttcggattggggtctgcaactcgaccccatgaagtcggagtcgctagtaatcgcagatcagcaacgctgcggtgaatacgttcccgggccttgtacacaccgcccgtcacgtcatgaaagtcggtaacacccgaagccagtggcctaaccttttggagggagctgtcgaaggtgggatcggcgattgggacgaagtcgtaacaaggtagccgtaccggaaggtgcggctggatcacctcctttctaagga

SEQ ID NO: 1270 - DNA, 1433 bp, Mycobacterium africanum
gacgaacgctggcggcgtgcttaacacatgcaagtcgaacggaaaggtctcttcggagatactcgagtggcgaacgggtgagtaacacgtgggtgatctgccctgcacttcgggataagcctgggaaactgggtctaataccggataggaccacgggatgcatgtcttgtggtggaaagcgctttagcggtgtgggatgagcccgcggcctatcagcttgttggtggggtgacggcctaccaaggcgacgacgggtagccggcctgagagggtgtccggccacactgggactgagatacggcccagactcctacgggaggcagcagtggggaatattgcacaatgggcgcaagcctgatgcagcgacgccgcgtgggggatgacggccttcgggttgtaaacctctttcaccatcgacgaaggtccgggttctctcggattgacggtaggtggagaagaagcaccggccaactacgtgccagcagccgcggtaatacgtagggtgcgagcgttgtccggaattactgggcgtaaagagctcgtaggtggtttgtcgcgttgttcgtgaaatctcacggcttaactgtgagcgtgcgggcgatacgggcagactagagtactgcaggggagactggaattcctggtgtagcggtggaatgcgcagatatcaggaggaacaccggtggcgaaggcgggtctctgggcagtaactgacgctgaggagcgaaagcgtggggagcgaacaggattagataccctggtagtccacgccgtaaacggtgggtactaggtgtgggtttccttccttgggatccgtgccgtagctaacgcattaagtaccccgcctggggagtacggccgcaaggctaaaactcaaaggaattgacgggggcccgcacaagcggcggagcatgtggattaattcgatgcaacgcgaagaaccttacctgggtttgacatgcacaggacgcgtctagagataggcgttcccttgtggcctgtgtgcaggtggtgcatggctgtcgtcagctcgtgtcgtgagatgttgggttaagtcccgcaacgagcgcaacccttgtctcatgttgccagcacgtaatggtggggactcgtgagagactgccggggtcaactcggaggaaggtggggatgacgtcaagtcatcatgccccttatgtccagggcttcacacatgctacaatggccggtacaaagggctgcgatgccgcgaggttaagcgaatccttaaaagccggtctcagttcggatcggggtctgcaactcgaccccgtgaagtcggagtcgctagtaatcgcagatcagcaacgctgcggtgaatacgttcccgggccttgtacacaccgcccgtcacgtcatgaaagtcggtaacacccgaagccagtggcctaaccctcgggagggagctgtcgaag

SEQ ID NO: 1271 - DNA, 1376 bp, Mycobacterium alsiensis
ttttgggagtttgatcctggctcaggacgaacgctggcggcgtgcttaacacatgcaagtcgaacgagtggcgaacgggtgagtaacacgtgggtaatctgccctgcacttcgggataagcctgggaaactgggtctaataccgaatagggaaaggcggtgtgggatgggcccgcggcctatcagcttgttggtggggtgacggcctaccaaggcgacgacgggtagccggcctgagagggtgtccggccacactgggactgagatacggcccagactcctacgggaggcagcagtggggaatattgcacaatgggcgcaagcctgatgcagcgacgccgcgtgggggatgacggccttcgggttgtaaacctctttcaccatcgacgatgacggtaggtggagaagaagcaccggccaactacgtgccagcagccgcggtaatacgtagggtgcgagcgttgtccggaattactgggcgtaaagagctcgtaggtggtttgtcgcgttgttcgtgaaatctcacggcttaactgtgagcgtgcgggcgatacgggcagactggagtactgcaggggagactggaattcctggtgtagcggtggaatgcgcagatatcaggaggaacaccggtggcgaaggcgggtctctgggcagactgacgctgaggagcgaaagcgtggggagcgaacaggattagataccctggtagtccacgccgtaaacggtgggtactaggtgtgggttgatccgtgccgtagctaacgcattaagtaccccgcctggggagtacggccgcaaggctaaaactcaaaggaattgacgggggcccgcacaagcggcggagcatgtggattaattcgatgcaacgcgaagaaccttacctgggtttgacatgtgcaggtggtgcatggctgtcgtcagctcgtgtcgtgagatgttgggttaagtcccgcaacgagcgcaacccttgtctcatgttgccagcggccggggactcgtgagagactgccggggtcaactcggaggaaggtggggatgacgtcaagtcatcatgccccttatgtccagggcttcacacatgctacaatggccggcaaagggctgcgatgccgcaaggttaagcgaatcctttccggtctcagttcggacggggtctgcaactcgaccccggaagtcggagtcgctagtaatcgcagatcagcaacgctgcggtgaatacgttcccgggccttgtacacaccgcccgtcacgtcatgaaagtcggtaacacccgaagccagtgcctagggagctgtcgaaggtgggatcggcgattgggacgaagtcgtaacaaggtagccgtaccggaaggtgcggctggatcacctcctttct

SEQ ID NO: 1272 - DNA, 1537 bp, Mycobacterium avium
tttgtttggagagtttgatcctggctcaggacgaacgctggcggcgtgcttaacacatgcaagtcgaacggaaaggcctcttcggaggtactcgagtggcgaacgggtgagtaacacgtgggcaatctgccctgcacttcgggataagcctgggaaactgggtctaataccggataggacctcaagacgcatgtcttctggtggaaagcttttgcggtgtgggatgggcccgcggcctatcagcttgttggtggggtgacggcctaccaaggcgacgacgggtagccggcctgagagggtgtccggccacactgggactgagatacggcccagactcctacgggaggcagcagtggggaatattgcacaatgggcgcaagcctgatgcagcgacgccgcgtgggggatgacggccttcgggttgtaaacctctttcaccatcgacgaaggtccgggttttctcggattgacggtaggtggagaagaagcaccggccaactacgtgccagcagccgcggtaatacgtagggtgcgagcgttgtccggaattactgggcgtaaagagctcgtaggtggtttgtcgcgttgttcgtgaaatctcacggcttaactgtgagcgtgcgggcgatacgggcagactagagtactgcaggggagactggaattcctggtgtagcggtggaatgcgcagatatcaggaggaacaccggtggcgaaggcgggtctctgggcagtaactgacgctgaggagcgaaagcgtggggagcgaacaggattagataccctggtagtccacgccgtaaacggtgggtactaggtgtgggtttccttccttgggatccgtgccgtagctaacgcattaagtaccccgcctggggagtacggccgcaaggctaaaactcaaaggaattgacgggggcccgcacaagcggcggagcatgtggattaattcgatgcaacgcgaagaaccttacctgggtttgacatgcacaggacgcgtctagagataggcgttcccttgtggcctgtgtgcaggtggtgcatggctgtcgtcagctcgtgtcgtgagatgttgggttaagtcccgcaacgagcgcaacccttgtctcatgttgccagcgggtaatgccggggactcgtgagagactgccggggtcaactcggaggaaggtggggatgacgtcaagtcatcatgccccttatgtccagggcttcacacatgctacaatggccggtacaaagggctgcgatgccgtaaggttaagcgaatccttttaaagccggtctcagttcggattggggtctgcaactcgaccccatgaagtcggagtcgctagtaatcgcagatcagcaacgctgcggtgaatacgttcccgggccttgtacacaccgcccgtcacgtcatgaaagtcggtaacacccgaagccagtggcctaacccttttgggagggagctgtcgaaggtgggatcggcgattgggacgaagtcgtaacaaggtagccgtaccggaaggtgcggctggatcacctcctttct

SEQ ID NO: 1273 - DNA, 1468 bp, Mycobacterium chelonae
gacgaacgctggcggcgtgcttaacacatgcaagtcgaacggaaaggcccttcggggtactcgagtggcgaacgggtgagtaacacgtgggtgatctgccctgcactctgggataagcctgggaaactgggtctaataccggataggaccacacacttcatggtgagtggtgcaaagcttttgcggtgtgggatgagcccgcggcctatcagcttgttggtggggtaatggcccaccaaggcgacgacgggtagccggcctgagagggtgaccggccacactgggactgagatacggcccagactcctacgggaggcagcagtggggaatattgcacaatgggcgcaagcctgatgcagcgacgccgcgtgagggatgacggccttcgggttgtaaacctctttcagtagggacgaagcgaaagtgacggtacctacagaagaaggaccggccaactacgtgccagcagccgcggtaatacgtagggtccgagcgttgtccggaattactgggcgtaaagagctcgtaggtggtttgtcgcgttgttcgtgaaaactcacagcttaactgtgggcgtgcgggcgatacgggcagactagagtactgcaggggagactggaattcctggtgtagcggtggaatgcgcagatatcaggaggaacaccggtggcgaaggcgggtctctgggcagtaactgacgctgaggagcgaaagcgtgggtagcgaacaggattagataccctggtagtccacgccgtaaacggtgggtactaggtgtgggtttccttccttgggatccgtgccgtagctaacgcattaagtaccccgcctggggagtacggtcgcaagactaaaactcaaaggaattgacgggggcccgcacaagcggcggagcatgtggattaattcgatgcaacgcgaagaaccttacctgggtttgacatgcgcaggacgtatctagagataggtattcccttgtggcctgcgtgcaggtggtgcatggctgtcgtcagctcgtgtcgtgagatgttgggttaagtcccgcaacgagcgcaacccttgtcctatgttgccagcgggtaatgccggggactcgtaggagactgccggggtcaactcggaggaaggtggggatgacgtcaagtcatcatgccccttatgtccagggcttcacacatgctacaatggccagtacagagggctgcgaagccgcaaggtggagcgaatcccttaaagctggtctcagttcggattggggtctgcaactcgaccccatgaagtcggagtcgctagtaatcgcagatcagcaacgctgcggtgaatacgttcccgggccttgtacacaccgcccgtcacgtcatgaaagtcggtaacacccgaagccagtggcctaaccttttggagggagctgtcgaaggtgggatcggcgattgggacgaagtcgtaacaaggtagccgtaccggaagg

SEQ ID NO: 1274 - DNA, 1481 bp, Mycobacterium colombiense
catgcaagtcgaacggaaaggcctcttcggaggtactcgagtggcgaacgggtgagtaacacgtgggcaatctgccctgcacttcgggataagcctgggaaactgggtctaataccggataggacctttagacgcatgtcttttggtggaaagcttttgcggtgtgggatgggcccgcggcctatcagcttgttggtggggtgatggcctaccaaggcgacgacgggtagccggcctgagagggtgtccggccacactgggactgagatacggcccagactcctacgggaggcagcagtggggaatattgcacaatgggcgcaagcctgatgcagcgacgccgcgtgggggatgacggccttcgggttgtaaacctctttcaccatcgacgaaggtccgggttttctcggattgacggtaggtggagaagaagcaccggccaactacgtgccagcagccgcggtaatacgtagggtgcgagcgttgtccggaattactgggcgtaaagagctcgtaggtggtttgtcgcgttgttcgtgaaatctcacggcttaactgtgagcgtgcgggcgatacgggcagactagagtactgcaggggagactggaattcctggtgtagcggtggaatgcgcagatatcaggaggaacaccggtggcgaaggcgggtctctgggcagtaactgacgctgaggagcgaaagcgtggggagcgaacaggattagataccctggtagtccacgccgtaaacggtgggtactaggtgtgggtttccttccttgggatccgtgccgtagctaacgcattaagtaccccgcctggggagtacggccgcaaggctaaaactcaaaggaattgacgggggcccgcacaagcggcggagcatgtggattaattcgatgcaacgcgaagaaccttacctgggtttgacatgcacaggacgcgtctagagataggcgttcccttgtggcctgtgtgcaggtggtgcatggctgtcgtcagctcgtgtcgtgagatgttgggttaagtcccgcaacgagcgcaacccttgtctcatgttgccagcgggtaatgccggggactcgtgagagactgccggggtcaactcggaggaaggtggggatgacgtcaagtcatcatgccccttatgtccagggcttcacacatgctacaatggccggtacaaagggctgcgatgccgtaaggttaagcgaatccttttaaagccggtctcagttcggattggggtctgcaactcgaccccatgaagtcggagtcgctagtaatcgcagatcagcaacgctgcggtgaatacgttcccgggccttgtacacaccgcccgtcacgtcatgaaagtcggtaacacccgaagccagtggcctaaccttttggagggagctgtcgaaggtgggatcggcgattgggacgaagtcgtaacaaggtagccgtaccggaaggtgcggctggatcacctccttttct

SEQ ID NO: 1275 - DNA, 1475 bp, Mycobacterium elephantis
agtttgatcctggctcaggacgaacgctggcggcgtgcttaacacatgcaagtcgaacggaaaggccccttcgggggtgctcgagtggcgaacgggtgagtaacacgtgggtgatctgccctgcactttgggataagcctgggaaactgggtctaataccgaatacaccctgctggtcgcatggcctggtgggggaaagcttttgcggtgtgggatgggcccgcggcctatcagcttgttggtggggtgatggcctaccaaggcgacgacgggtagccggcctgagagggtgtccggccacactgggactgagatacggcccagactcctacgggaggcagcagtggggaatattgcacaatgggcgcaagcctgatgcagcgacgccgcgtgggggatgacggccttcgggttgtaaacccctttcagtatcgacgaagccgtgaggtgacggtaggtacagaagaagcaccggccaactacgtgccagcagccgcggtaatacgtagggtgcgagcgttgtccggaattactgggcgtaaagagctcgtaggtggtttgtcgcgttgtccgtgaaaactcacagcttaactgtgggcgtgcgggcgatacgggcagactggagtactgcaggggagactggaattcctggtgtagcggtggaatgcgcagatatcaggaggaacaccggtggcgaaggcgggtctctgggcagtaactgacgctgaggagcgaaagcgtggggagcgaacaggattagataccctggtagtccacgccgtaaacggtgggtactaggtgtgggtttccttccttgggatccgtgccgtagctaacgcattaagtaccccgcctggggagtacggccgcaaggctaaaactcaaaggaattgacgggggcccgcacaagcggcggagcatgtggattaattcgatgcaacgcgaagaaccttacctgggtttgacatgcacaggacgcgtctagagataggcgttcccttgtggcctgtgtgcaggtggtgcatggctgtcgtcagctcgtgtcgtgagatgttgggttaagtcccgcaacgagcgcaacccttgtctcatgttgccagcacgtgatggtggggactcgtgagagactgccggggtcaactcggaggaaggtggggatgacgtcaagtcatcatgccccttatgtccagggcttcacacatgctacaatggccggtacaaagggctgcgatgccgtgaggtggagcgaatcctttcaaagccggtctcagttcggatcggggtctgcaactcgaccccgtgaagtcggagtcgctagtaatcgcagatcagcaacgctgcggtgaatacgttcccgggccttgtacacaccgcccgtcacgtcatgaaagtcggtaacacccgaagccggtggcctaacccgcaagggagggagccgtcgaaggtgggatcggcgattgggacgaagtcgtaac

SEQ ID NO: 1276 - DNA, 1485 bp, Mycobacterium gordonae
tagagtttgaatcatggctcaggacgaacgctggcggcgtgcttaacacatgcaagtcgaacggtaaggcccttcggggtacacgagtggcgaacgggtgagtaacacgtgggtaatctgccctgcacatcgggataagcctgggaaactgggtctaataccgaataggaccacagaacacatgtcctgtggtggaaagcttttgcggtgtgggatgggcccgcggcctatcagcttgttggtggggtgatggcccaccaaggcgacgacgggtagccggcctgagagggtgtccggccacactgggactgagatacggcccagactcctacgggaggcagcagtggggaatattgcacaatgggcgaaagcctgatgcagcgacgccgcgtgggggatgacggccttcgggttgtaaacctctttcaccatcgacgaaggttcgggttttctcggattgacggtaggtggagaagaagcaccggccaactacgtgccagcagccgcggtaatacgtagggtgcgagcgttgtccggaattactgggcgtaaagagctcgtaggtggtttgtcgcgttgttcgtgaaatctcacggcttaactgtgagcgtgcgggcgatacgggcagacttgagtactgcaggggagactggaattcctggtgtagcggtggaatgcgcagatatcaggaggaacaccggtggcgaaggcgggtctctgggcagtaactgacgctgaggagcgaaagcgtggggagcgaacaggattagataccctggtagtccacgccgtaaacggtgggtactaggtgtgggtttccttccttgggatccgtgccgtagctaacgcattaagtaccccgcctggggagtacggccgcaaggctaaaactcaaagaaattgacgggggcccgcacaagcggcggagcatgtggattaattcgatgcaacgcgaagaaccttacctgggtttgacatgcacaggacgccggcagagatgtcggttcccttgtggcctgtgtgcaggtggtgcatggctgtcgtcagctcgtgtcgtgagatgttgggttaagtcccgcaacgagcgcaacccttgtctcatgttgccagcgggtaatgccggggactcgtgagagactgccggggtcaactcggaggaaggtggggatgacgtcaagtcatcatgccccttatgtccagggcttcacacatgctacaatggccggtacagagggctgcgatgccgcgaggttaagcgaatccttttaaagccggtctcagttcggatcggggtctgcaactcgaccccgtgaagtcggagtcgctagtaatcgcagatcagcaacgctgcggtgaatacgttcccgggccttgtacacaccgcccgtcacgtcatgaaagtcggtaacacccgaagccagtggcctaaccctttgggagggagctgtcgaaggtgggatcggcgattgggacgaagtcgtaaca

SEQ ID NO: 1277 - DNA, 1495 bp, Mycobacterium intracellulare
agagtttgatcctggctcaggacgaacgctggcggcgtgcttaacacatgcaagtcgaacggaaaggccccttcgggggtactcgagtggcgaacgggtgagtaacacgtgggcaatctgccctgcacttcgggataagcctgggaaactgggtctaataccggataggacctttaggcgcatgtctttaggtggaaagcttttgcggtgtgggatgggcccgcggcctatcagcttgttggtggggtgatggcctaccaaggcgacgacgggtagccggcctgagagggtgtccggccacactgggactgagatacggcccagactcctacgggaggcagcagtggggaatattgcacaatgggcgcaagcctgatgcagcgacgccgcgtgggggatgacggccttcgggttgtaaacctctttcaccatcgacgaaggtccgggttttctcggattgacggtaggtggagaagaagcaccggccaactacgtgccagcagccgcggtaatacgtagggtgcgagcgttgtccggaattactgggcgtaaagagctcgtaggtggtttgtcgcgttgttcgtgaaatctcacggcttaactgtgagcgtgcgggcgatacgggcagactagagtactgcaggggagactggaattcctggtgtagcggtggaatgcgcagatatcaggaggaacaccggtggcgaaggcgggtctctgggcagtaactgacgctgaggagcgaaagcgtggggagcgaacaggattagataccctggtagtccacgccgtaaacggtgggtactaggtgtgggtttccttccttgggatccgtgccgtagctaacgcattaagtaccccgcctggggagtacggccgcaaggctaaaactcaaaggaattgacgggggcccgcacaagcggcggagcatgtggattaattcgatgcaacgcgaagaaccttacctgggtttgacatgcacaggacgcgtctagagataggcgttcccttgtggcctgtgtgcaggtggtgcatggctgtcgtcagctcgtgtcgtgagatgttgggttaagtcccgcaacgagcgcaacccttgtctcatgttgccagcgggtaatgccggggactcgtgagagactgccggggtcaactcggaggaaggtggggatgacgtcaagtcatcatgccccttatgtccagggcttcacacatgctacaatggccggtacaaagggctgcgatgccgcaaggttaagcgaatccttttaaagccggtctcagttcggattggggtctgcaactcgaccccatgaagtcggagtcgctagtaatcgcagatcagcaacgctgcggtgaatacgttcccgggccttgtacacaccgcccgtcacgtcatgaaagtcggtaacacccgaagccagtggcctaacccttgggagggagctgtcgaaggtgggatcggcgattgggacgaagtcgtaacaaggtagccgta

SEQ ID NO: 1278 - DNA, 1469 bp, Mycobacterium kansasii
gacgaacgctggcggcgtgcttaacacatgcaagtcgaacggaaaggtctcttcggagacactcgagtggcgaacgggtgagtaacacgtgggcaatctgccctgcacaccgggataagcctgggaaactgggtctaataccggataggaccacttggcgcatgccttgtggtggaaagcttttgcggtgtgggatgggcccgcggcctatcagcttgttggtggggtgacggcctaccaaggcgacgacgggtagccggcctgagagggtgtccggccacactgggactgagatacggcccagactcctacgggaggcagcagtggggaatattgcacaatgggcgcaagcctgatgcagcgacgccgcgtgggggatgacggccttcgggttgtaaacctctttcaccatcgacgaaggtccgggttctctcggattgacggtaggtggagaagaagcaccggccaactacgtgccagcagccgcggtaatacgtagggtgcgagcgttgtccggaattactgggcgtaaagagctcgtaggtggtttgtcgcgttgttcgtgaaatctcacggcttaactgtgagcgtgcgggcgatacgggcagactagagtactgcaggggagactggaattcctggtgtagcggtggaatgcgcagatatcaggaggaacaccggtggcgaaggcgggtctctgggcagtaactgacgctgaggagcgaaagcgtggggagcgaacaggattagataccctggtagtccacgccgtaaacggtgggtactaggtgtgggtttccttccttgggatccgtgccgtagctaacgcattaagtaccccgcctggggagtacggccgcaaggctaaaactcaaaggaattgacgggggcccgcacaagcggcggagcatgtggattaattcgatgcaacgcgaagaaccttacctgggtttgacatgcacaggacgcgtctagagataggcgttcccttgtggcctgtgtgcaggtggtgcatggctgtcgtcagctcgtgtcgtgagatgttgggttaagtcccgcaacgagcgcaacccttgtctcatgttgccagcgggtaatgccggggactcgtgagagactgccggggtcaactcggaggaaggtggggatgacgtcaagtcatcatgccccttatgtccagggcttcacacatgctacaatggccggtacaaagggctgcgatgccgcgaggttaagcgaatccttttaaagccggtctcagttcggatcggggtctgcaactcgaccccgtgaagtcggagtcgctagtaatcgcagatcagcaacgctgcggtgaatacgttcccgggccttgtacacaccgcccgtcacgtcatgaaagtcggtaacacccgaagccagtggcctaaccctcgggagggagctgtcgaaggtgggatcggcgattgggacgaagtcgtaacaaggta

SEQ ID NO: 1279 - DNA, 1314 bp, Mycobacterium lacus
gacgaacgctggcggcgtgcttaacacatgcaagtcgaacgagtggcgaacgggtgagtaacacgtgggtgatctgccctgcacttcgggataagcctgggaaactgggtctaataccggatagggaaaggcggtgtgggatgagcccgcggcctatcagcttgttggtggggtgacggcctaccaaggcgacgacgggtagccggcctgagagggtgtccggccacactgggactgagatacggcccagactcctacgggaggcagcagtggggaatattgcacaatgggcgcaagcctgatgcagcgacgccgcgtgggggatgacggccttcgggttgtaaacctctttcaccatcgacgatgacggtagatggagaagaagcaccggccaactacgtgccagcagccgcggtaatacgtagggtgcgagcgttgtccggaattactgggcgtaaagagctcgtaggtggtttgtcgcgttgttcgtgaaatctcacggcttaactgtgagcgtgcgggcgatacgggcagactggagtactgcaggggagactggaattcctggtgtagcggtggaatgcgcagatatcaggaggaacaccggtggcgaaggcgggtctctgggcagactgacgctgaggagcgaaagcgtggggagcgaacaggattagataccctggtagtccacgccgtaaacggtgggtactaggtgtgggttgatccgtgccgtagctaacgcattaagtaccccgcctggggagtacggccgcaaggctaaaactcaaaggaattgacgggggcccgcacaagcggcggagcatgtggattaattcgatgcaacgcgaagaaccttacctgggtttgacatgtgcaggtggtgcatggctgtcgtcagctcgtgtcgtgagatgttgggttaagtcccgcaacgagcgcaacccttgtctcatgttgccagcggccggggactcgtgagagactgccggggtcaactcggaggaaggtggggatgacgtcaagtcatcatgccccttatgtccagggcttcacacatgctacaatggccggcaaagggctgcgatgccgcgaggttaagcgaatcctttccggtctcagttcggacggggtctgcaactcgaccccggaagtcggagtcgctagtaatcgcagatcagcaacgctgcggtgaatacgttcccgggccttgtacacaccgcccgtcacgtcatgaaagtcggtaacacccgaagccagtgcctagggagctgtcgaaggtgggatcggcgattgggacgaagtcgtaacaaggta

SEQ ID NO: 1280 - DNA, 1553 bp, Mycobacterium leprae
tttgtttggagagtttgatcctggctcaggacgaacgctggcggcgtgcttaacacatgcaagtcgaacggaaaggtctctaaaaaatcttttttagagatactcgagtggcgaacgggtgagtaacacgtgggtaatctgccctgcacttcagggataagcttgggaaactgggtctaataccggataggacttcaaggcgcatgtcttgtggtggaaagctttttgcggtgcaggatgggcccgcggcctatcagcttgttggtggggtgacggcctaccaaggcgacgacgggtagccggcctgagagggtgtacggccacactgggactgagatacggcccagactcctacgggaggcagcagtggggaatattgcacaatgggcgcaagcctgatgcagcgacgccgcgtgggggatgacggctttcgggttgtaaacctctttcaccatcgacgaaggtctgggttttctcggattgacggtaggtggagaagaagcaccggccaactacgtgccagcagccgcggtaatacgtagggtgcgagcgttgtccggaattactgggcgtaaagagctcgtaggtggtttgtcgcgttgttcgtgaaatctcacggcttaactgtgagcgtgcgggcgatacgggcagactggagtactgcaggggagactggaattcctggtgtagcggtggaatgcgcagatatcaggaggaacaccagtggcgaaggcgggtctctgggcagtaactgacgctgaggagcgaaagcgtggggagcaaacaggattagataccctggtagtccacgccgtaaacggtgggtactaggtgtgggtttccttccttgggatccgtgccgtagctaacgcattaagtaccccgcctggggagtacggccgcaaggctaaaactcaaaggaattgacgggggcccgcacaagcggcggagcatgtggattaattcgatgcaacgcgaagaaccttacctgggtttgacatgcacaggatgcgtctagagataggcactcccttgtggcctgtgtgcaggtggtgcatggctgtcgtcagctcgtgtcgtgagatgttgggttaagtcccgcaacgagcgcaacccttgtctcatgttgccagcacgtaatggtggggactcgtgagagactgccgcggtcaactcggaggaaggtggggatgacgtcaagtcatcatgccccttatgtccagggcttcacacatgctacaatggccggtacaaagggctgcgatgccgcaaggttaagcgaatccttttaaagccggtctcagttcggatcggggtctgcaactcgaccccgtgaagtcggagtcgctagtaatcgcagatcagcaacgctgcggtgaatacgttcccgggccttgtacacaccgcccgtcacgtcatgaaagtcggtaacacccgaagccagtggcctaaccctcgggagggagctgtccaaggtgggatcggcgattgggacgaagtcgtaacaaggtagccgtaccggaaggtgcggctggatcacctcctttctaagg

SEQ ID NO: 1281 - DNA, 1538 bp, Mycobacterium lepromatosis
agagtttgatcctggctcaggacgaacgctggcggcgtgcttaacacatgcaagtcgaacggaaaggtctcttaatacttaaacctattaaagatactcgagtggcgaacgggtgagtaacacgtgggtaatctaccctgcacttcagggataagcctgggaaaccgggtctaataccggataggacttcaaggcgcatgtcttgtggtggaaagcttttgcggtgcgggatgggcccgcggcctatcagcttgttggtggggtgacggcctaccaaggcgacgacgggtagccggcctgagagggtgtccggccacactgggactgagatacggcccagactcctacgggaggcagcagtggggaatattgcacaatgggcgcaagcctgatgcagcgacgccgcgtgggggatgacggctttcgggttgtaaacctctttcaccattgacgaagatctgggttttctcggattgacggtaggtggagaagaagcaccggccaactacgtgccagcagccgcggtaatacgtagggtgcgagcgttgtccggaattactgggcgtaaagagctcgtaggtggtttgtcgcgttgttcgtgaaatctcacggcttaactgtgagcgtgcgggcgatacgggcagactggagtactgcaggggagactggaattcctggtgtagcggtggaatgcgcagatatcaggaggaacaccggtggcgaaggcgggtctctgggcagtaactgacgctgaggagcgaaagcgtggggagcgaacaggattagataccctggtagtccacgccgtaaacggtgggtactaggtgtgggtttccttccttgggatccgtgccgtagctaacgcattaagtaccccgcctggggagtacggccgcaaggctaaaactcaaaggaattgacggggcccgcacaagcggcggagcatgtggattaattcgatgcaacgcgaagaaccttacctgggtttgacatgcacaggacgcgtctagagataggcgttcctttttggcctgtgtgcaggtggtgcatggctgtcgtcagctcgtgtcgtgagatgttgggttaagtcccgcaacgagcgcaacccttgtctcatgttgccagcacgtaatggtggggactcgtgagagactgccgcggtcaactcggaggaaggtggggatgacgtcaagtcatcatgccccttatgtccagggcttcacacatgctacaatggccggtacaaagggctgcgatgccgcaaggttaagcgaatccttattaaagccggtctcagttcggatcggggtctgcaactcgaccccgtgaagccggagtcgctagtaatcgcagatcagcaacgctgcggtgaatacgttcccgggccttgtacacaccgcccgtcacgtcatgaaagtcggtaacacccgaagccagtggcctaaccctcgggagggagctgtcgaaggtgggatcggcgattgggacgaagtcgtaacaaggtagccgtaccggaaggtgcggttggatcacctcct

SEQ ID NO: 1282 - DNA, 1310 bp, Mycobacterium mageritense
gacgaacgctggcggcgtgcttaacacatgcaagtcgaacgagtggcgaacgggtgagtaacacgtgggtgatctgccctgcactttgggataagcctgggaaactgggtctaataccgaatagggaaaggcggtgtgggatgggcccgcggcctatcagcttgttggtggggtgatggcctaccaaggcgacgacgggtagccggcctgagagggtgaccggccacactgggactgagatacggcccagactcctacgggaggcagcagtggggaatattgcacaatgggcgcaagcctgatgcagcgacgccgcgtgagggatgacggccttcgggttgtaaacctctttcagcaagacgatgacggtatgtgcagaagaaggaccggccaactacgtgccagcagccgcggtaatacgtagggtccgagcgttgtccggaattactgggcgtaaagagctcgtaggtggtttgtcgcgttgttcgtgaaaactcacagcttaactgtgggcgtgcgggcgatacgggcagactggagtactgcaggggagactggaattcctggtgtagcggtggaatgcgcagatatcaggaggaacaccggtggcgaaggcgggtctctgggcagactgacgctgaggagcgaaagcgtggggagcgaacaggattagataccctggtagtccacgccgtaaacggtgggtactaggtgtgggttgatccgtgccgtagctaacgcattaagtaccccgcctggggagtacggccgcaaggctaaaactcaaaggaattgacgggggcccgcacaagcggcggagcatgtggattaattcgatgcaacgcgaagaaccttacctgggtttgacatgtgcaggtggtgcatggctgtcgtcagctcgtgtcgtgagatgttgggttaagtcccgcaacgagcgcaacccttgtctcatgttgccagcacgtggggactcgtgagagactgccggggtcaactcggaggaaggtggggatgacgtcaagtcatcatgccccttatgtccagggcttcacacatgctacaatggccggcaaagggctgcgatgccgtgaggtggagcgaatcctttccggtctcagttcggacggggtctgcaactcgaccccggaagtcggagtcgctagtaatcgcagatcagcaacgctgcggtgaatacgttcccgggccttgtacacaccgcccgtcacgtcatgaaagtcggtaacacccgaagccggtgcctagggagccgtcgaaggtgggatcggcgattgggacgaagtcgtaacaag

SEQ ID NO: 1283 - DNA, 1471 bp, Mycobacterium mantenii
tggttcaggacgaacgctggcggcgtgcttaacacatgcaagtcgaacggaaaggcctcttcggaggtactcgagtggcgaacgggtgagtaacacgtgggcaatctgccctgcacttcgggataagcctgggaaactgggtctaataccgaataggaccacttggcgcatgccttgtggtggaaagcttttgcggtgtgggatgggcccgcggcctatcagcttgttggtggggtgatggcctaccaaggcgacgacgggtagccggcctgagagggtgtccggccacactgggactgagatacggcccagactcctacgggaggcagcagtggggaatattgcacaatgggcgcaagcctgatgcagcgacgccgcgtgggggatgacggccttcgggttgtaaacctctttcaccatcgacgaaggctcactttgtgggttgacggtaggtggagaagaagcaccggccaactacgtgccagcagccgcggtaatacgtagggtgcgagcgttgtccggaattactgggcgtaaagagctcgtaggtggtttgtcgcgttgttcgtgaaatctcacggcttaactgtgagcgtgcgggcgatacgggcagactagagtactgcaggggagactggaattcctggtgtagcggtggaatgcgcagatatcaggaggaacaccggtggcgaaggcgggtctctgggcagtaactgacgctgaggagcgaaagcgtggggagcgaacaggattagataccctggtagtccacgccgtaaacggtgggtactaggtgtgggtttccttccttgggatccgtgccgtagctaacgcattaagtaccccgcctggggagtacggccgcaaggctaaaactcaaaggaattgacgggggcccgcacaagcggcggagcatgtggattaattcgatgcaacgcgaagaaccttacctgggtttgacatgcacaggacgcgtctagagataggcgttcccttgtggcctgtgtgcaggtggtgcatggctgtcgtcagctcgtgtcgtgagatgttgggttaagtcccgcaacgagcgcaacccttgtctcatgttgccagcgggtaatgccggggactcgtgagagactgccggggtcaactcggaggaaggtggggatgacgtcaagtcatcatgccccttatgtccagggcttcacacatgctacaatggccggtacaaagggctgcgatgccgtaaggttaagcgaatccttttaaagccggtctcagttcggattggggtctgcaactcgaccccatgaagtcggagtcgctagtaatcgcagatcagcaacgctgcggtgaatacgttcccgggccttgtacacaccgcccgtcacgtcatgaaagtcggtaacacccgaagccagtggcctaaccctttgggagggagctgtcgaaggtgggatcggcgattgggacgaagtcgtaacaa

SEQ ID NO: 1284 - DNA, 1535 bp, Mycobacterium marinum
tttgtttggagagtttgatcctggctcaggacgaacgctggcggcgtgcttaacacatgcaagtcgaacggaaaggtctcttcggagatactcgagtggcgaacgggtgagtaacacgtgggcgatctgccctgcacttcgggataagcctgggaaactgggtctaataccggataggaccacgggattcatgtcctgtggtggaaagcttttgcggtgtgggatgggcccgcggcctatcagcttgttggtggggtaacggcctaccaaggcgacgacgggtagccggcctgagagggtgtccggccacactgggactgagatacggcccagactcctacgggaggcagcagtggggaatattgcacaatgggcgcaagcctgatgcagcgacgccgcgtgggggatgacggccttcgggttgtaaacctctttcaccatcgacgaaggttcgggttttctcggattgacggtaggtggagaagaagcaccggccaactacgtgccagcagccgcggtaatacgtagggtgcgagcgttgtccggaattactgggcgtaaagagctcgtaggtggtttgtcgcgttgttcgtgaaatctcacggcttaactgtgagcgtgcgggcgatacgggcagactagagtactgcaggggagactggaattcctggtgtagcggtggaatgcgcagatatcaggaggaacaccggtggcgaaggcgggtctctgggcagtaactgacgctgaggagcgaaagcgtggggagcgaacaggattagataccctggtagtccacgccgtaaacggtgggtactaggtgtgggtttccttccttgggatccgtgccgtagctaacgcattaagtaccccgcctggggagtacggccgcaaggctaaaactcaaaggaattgacgggggcccgcacaagcggcggagcatgtggattaattcgatgcaacgcgaagaaccttacctgggtttgacatgcacaggacgcgtctagagataggcgttcccttgtggcctgtgtgcaggtggtgcatggctgtcgtcagctcgtgtcgtgagatgttgggttaagtcccgcaacgagcgcaacccttgtctcatgttgccagcacgtaatggtggggactcgtgagagactgccggggtcaactcggaggaaggtggggatgacgtcaagtcatcatgccccttatgtccagggcttcacacatgctacaatggccggtacaaagggctgcgatgccgcgaggttaagcgaatcctttaaagccggtctcagttcggatcggggtctgcaactcgaccccgtgaagtcggagtcgctagtaatcgcagatcagcaacgctgcggtgaatacgttcccgggccttgtacacaccgcccgtcacgtcatgaaagtcggtaacacccgaagccagtggcctaaccctttgggagggagctgtcgaaggtgggatcggcgattgggacgaagtcgtaacaaggtagccgtaccggaaggtgcggctggatcacctcctttct

SEQ ID NO: 1285 - DNA, 1484 bp, Mycobacterium microti
gacgaacgctggcggcgtgcttaacacatgcaagtcgaacggaaaggtctcttcggagatactcgagtggcgaacgggtgagtaacacgtgggtgatctgccctgcacttcgggataagcctgggaaactgggtctaataccggataggaccacgggatgcatgtcttgtggtggaaagcgctttagcggtgtgggatgagcccgcggcctatcagcttgttggtggggtgacggcctaccaaggcgacgacgggtagccggcctgagagggtgtccggccacactgggactgagatacggcccagactcctacgggaggcagcagtggggaatattgcacaatgggcgcaagcctgatgcagcgacgccgcgtgggggatgacggccttcgggttgtaaacctctttcaccatcgacgaaggtccgggttctctcggattgacggtaggtggagaagaagcaccggccaactacgtgccagcagccgcggtaatacgtagggtgcgagcgttgtccggaattactgggcgtaaagagctcgtaggtggtttgtcgcgttgttcgtgaaatctcacggcttaactgtgagcgtgcgggcgatacgggcagactagagtactgcaggggagactggaattcctggtgtagcggtggaatgcgcagatatcaggaggaacaccggtggcgaaggcgggtctctgggcagtaactgacgctgaggagcgaaagcgtggggagcgaacaggattagataccctggtagtccacgccgtaaacggtgggtactaggtgtgggtttccttccttgggatccgtgccgtagctaacgcattaagtaccccgcctggggagtacggccgcaaggctaaaactcaaaggaattgacgggggcccgcacaagcggcggagcatgtggattaattcgatgcaacgcgaagaaccttacctgggtttgacatgcacaggacgcgtctagagataggcgttcccttgtggcctgtgtgcaggtggtgcatggctgtcgtcagctcgtgtcgtgagatgttgggttaagtcccgcaacgagcgcaacccttgtctcatgttgccagcacgtaatggtggggactcgtgagagactgccggggtcaactcggaggaaggtggggatgacgtcaagtcatcatgccccttatgtccagggcttcacacatgctacaatgaccggtacaaagggctgcgatgccgcgaggttaagcgaatccttaaaagccggtctcagttcggatcggggtctgcaactcgaccccgtgaagtcggagtcgctagtaatcgcagatcagcaacgctgcggtgaatacgttcccgggccttgtacacaccgcccgtcacgtcatgaaagtcggtaacacccgaagccagtggcctaaccctcgggagggagctgtcgaaggtgggatcggcgattgggacgaagtcgtaacaaggtagccgtaccggaagg

SEQ ID NO: 1286 - DNA, 1273 bp, Mycobacterium neoaurum
tggcgaacgggtgagtaacacgtgggtgatctgccctgcactttgggataagcctgggaaactgggtctaataccgaatatgatcatcggcttcatggtcggtggtggaaagcttttgcggtgtgggatgggcccgcggcctatcagcttgttggtggggtaatggcctaccaaggcgacgacgggtagccggcctgagagggtgaccggccacactgggactgagatacggcccagactcctacgggaggcagcagtggggaatattgcacaatgggcgcaagcctgatgcagcgacgccgcgtgagggatgacggccttcgggttgtaaacctctttcagcacagacgaagcgcaagtgacggtatgtgcagaagaaggaccggccaactacgtgccagcagccgcggtaatacgtagggtccgagcgttgtccggaattactgggcgtaaagagctcgtaggtggtttgtcgcgttgttcgtgaaaactcacagcttaactgtgggcgtgcgggcgatacgggcagactagagtactgcaggggagactggaattcctggtgtagcggtggaatgcgcagatatcaggaggaacaccggtggcgaaggcgggtctctgggcagtaactgacgctgaggagcgaaagcgtggggagcgaacaggattagataccctggtagtccacgccgtaaacggtgggtactaggtgtgggtttccttccttgggatccgtgccgtagctaacgcattaagtaccccgcctggggagtacggccgcaaggctaaaactcaaaggaattgacgggggcccgcacaagcggcggagcatgtggattaattcgatgcaacgcgaagaaccttacctgggtttgacatgcacaggacgctggtagagatatcagttcccttgtggcctgtgtgcaggtggtgcatggctgtcgtcagctcgtgtcgtgagatgttgggttaagtcccgcaacgagcgcaacccttgtcctatgttgccagcgggttatgccggggactcgtaggagactgccggggtcaactcggaggaaggtggggatgacgtcaagtcatcatgccccttatgtccagggcttcacacatgctacaatggccggtacaaagggctgcgatgccgtgaggtggagcgaatcctttcaaagccggtctcagttcggatcggggtctgcaactcgaccccgtgaagtcggagtcgctagtaatcgcagatcagcaacgctgcggtgaatacgttcccgggcct

SEQ ID NO: 1287 - DNA, 1523 bp, Mycobacterium parascrofulaceum
tttgtttggagagtttgatcctggctcaggacgaacgctggcggcgtgcttaacacatgcaagtcgaacggaaaggtctcttcggagatactcgagtggcgaacgggtgagtaacacgtgggcaatctgccctgcacttcgggataagcctgggaaactgggtctaataccggataggaccacttggcgcatgccttgtggtggaaagcttttgcggtgtgggatgggcccgcggcctatcagctagttggtggggtgatggcctaccaaggcgacgacgggtagccggcctgagagggtgtccggccacactgggactgagatacggcccagactcctacgggaggcagcagtggggaatattgcacaatgggcgcaagcctgatgcagcgacgccgcgtgggggatgacggccttcgggttgtaaacctctttcagcagggacgaagcgcaagtgacggtacctgcagaagaagcaccggccaactacgtgccagcagccgcggtaatacgtagggtgcgagcgttgtccggaattactgggcgtaaagagctcgtaggtggtttgtcgcgttgttcgtgaaaaccgggggcttaaccctcggcgtgcgggcgatacgggcagactagagtactgcaggggagactggaattcctggtgtagcggtggaatgcgcagatatcaggaggaacaccggtggcgaaggcgggtctctgggcagtaactgacgctgaggagcgaaagcgtggggagcgaacaggattagataccctggtagtccacgccgtaaacggtgggtactaggtgtgggtttccttccttgggatccgtgccgtagctaacgcattaagtaccccgcctggggagtacggccgcaaggctaaaactcaaaggaattgacgggggcccgcacaagcggcggagcatgtggattaattcgatgcaacgcgaagaaccttacctgggtttgacatgcacaggacgcgtctagagataggcgttcccttgtggcctgtgtgcaggtggtgcatggctgtcgtcagctcgtgtcgtgagatgttgggttaagtcccgcaacgagcgcaacccttgtctcatgttgccagcgggtaatgccggggactcgtgagagactgccggggtcaactcggaggaaggtggggatgacgtcaagtcatcatgccccttatgtccagggcttcacacatgctacaatggccggtacaaagggctgcgatgccgcaaggttaagcgaatccttttaaagccggtctcagttcggatcggggtctgcaactcgaccccgtgaagtcggagtcgctagtaatcgcagatcagcaacgctgcggtgaatacgttcccgggccttgtacacaccgcccgtcacgtcatgaaagtcggtaacacccgaagccagtggcctaacccttgggagggagctgtcgaaggtgggatcggcgattgggacgaagtcgtaacaaggtagccgtaccggaaggtgcggctggatcacctcctttct

SEQ ID NO: 1288 - DNA, 1417 bp, Mycobacterium paraterrae
tgcttaacacatgcaagtcgaacggaaaggccctttcgggggtactcgagtggcgaacgggtgagtaacacgtgggtgatctgccctgcactttgggataagcctgggaaactgggtctaataccgaataggaccacgcgcttcatggtgtgtggtggaaagcttttgcggtgtgggatgggcccgcggcctatcagcttgttggtggggtaatggcctaccaaggcgacgacgggtagccggcctgagagggtgtccggccacactgggactgagatacggcccagactcctacgggaggcagcagtggggaatattgcacaatgggcgcaagcctgatgcagcgacgccgcgtgggggatgacggccttcgggttgtaaacctctttcagtatcggcgaagctccaggattcttcttggggtgacagtaggtacagaagaagcaccggccaactacgtgccagcagccgcggtaatacgtagggtgcgagcgttgtccggaattactgggcgtaaagagctcgtaggtggtttgtcacgttgtccgtgaaaactcacagcttaactgtgggcgtgcgggcgatacgggcagactggagtactgtaggggagactggaattcctggtgtagcggtggaatgcgcagatatcaggaggaacaccggtggcgaaagcgggtctctgggcagtaactgacgctgaggagcgaaagcgtggggagcgaacaggattagataccctggtagtccacgccgtaaacggtgggtactaggtgtgggtttccttcctttagggatccgtgccgtagctaacgcattaagtaccccgcctggggagtacggccgcaaggctaaaactcaaaggaattgacgggggcccgcacaagcggcggagcatgtggattaattcgatgcaacgcgaagaaccttacctgggtttgacatgcacaggacgccggtagagatatcggttcccttgtggcctgtgtgcaggtggtgcatggctgtcgtcagctcgtgtcgtgagatgctgggttaagtcccgcaacgagcgcaacccttgtctcatgttgccagcacgttatggtggggactcgtgagagactgccggggtcaactcggaggaaggtggggatgacgtcaagtcatcatgccccttatgtccagggcttcacacatgctacaatggccggtacaaagggctgcgatcccgtgagggttagcgaatcctttaaagccggtctcagttcggattggggtctgcaactcgaccccatgaagtcggagtcgctagtaatcgcagatcagcaacgctgcggtgaatacgttcccgggccttgtacacaccgcccgtcacgtcatgaaagtcggtaacacccgaagccggtggcctaacccttgtggagggagccgtcga

SEQ ID NO: 1289 - DNA, 1486 bp, Mycobacterium phlei
tagagtttgatcatggctcaggacgaacgctggcggcgtgcttaacacatgcaagtcgaacggaaaggccccttcgggggtactcgagtggcgaacgggtgagtaacacgtgggtgatctgccctgcactctgggataagcctgggaaactgggtctaataccggatacacccttctggttgcatggctgggaggggaaagcttttgcggtgtgggatgggcccgcggcctatcagcttgttggtggggtgatggcctaccaaggcgacgacgggtagccggcctgagagggtgtccggccacactgggactgagatacggcccagactcctacgggaggcagcagtggggaatattgcacaatgggcgcaagcctgatgcagcgacgccgcgtgggggatgacggccttcgggttgtaaacccctttcagtagggacgaagcgtgagtgacggtacctacagaagaagcaccggccaactacgtgccagcagccgcggtaatacgtagggtgcgagcgttgtccggaattactgggcgtaaagagctcgtaggtggtttgtcgcgttgttcgtgaaaactcacagcttaactgtgggcgtgcgggcgatacgggcagactagagtactgcaggggagactggaattcctggtgtagcggtggaatgcgcagatatcaggaggaacaccggtggcgaaggcgggtctctgggcagtaactgacgctgaggagcgaaagcgtggggagcgaacaggattagataccctggtagtccacgccgtaaacggtgggtactaggtgtgggtttccttccttgggatccgtgccgtagctaacgcattaagtaccccgcctggggagtacggccgcaaggctaaaactcaaaggaattgacgggggcccgcacaagcggcggagcatgtggattaattcgatgcaacgcgaagaaccttacctgggtttgacatgcacaggacgacggcagagatgtcgtttcccttgtggcctgtgtgcaggtggtgcatggctgtcgtcagctcgtgtcgtgagatgttgggttaagtcccgcaacgagcgcaacccttgtctcatgttgccagcacgttatggtggggactcgtgagagaccgccggggtcaactcggaggaaggtggggatgacgtcaagtcatcatgccccttatgtccagggcttcacacatgctacaktggccggtacaaagggctgcgatgccgtgaggtggagcgaatcctttcaaagccggtctcagttcggatcggggtctgcaactcgaccccgtgaagtcggagtcgctagtaatcgcagatcagcaacgctgcggtgaatacgttcccgggccttgtacacaccgcccgtcacgtcatgaaagtcggtaacacccgaagccggtggcctaaccccttgtgggagggagccgtcgaaggtgggatcggcgattgggacgaagtcgtaacaaggagccgc

SEQ ID NO: 1290 - DNA, 1522 bp, Mycobacterium seoulense
gagagtttgatcctggctcaggacgaacgctggcggcgtgcttaacacatgcaagtcgaacggaaaggccccttcgggggtactcgagtggcgaacgggtgagtaacacgtgggcaatctgccctgcacttcgggataagcctgggaaactgggtctaataccgaataggaccacttggcgcatgccttgtggtggaaagcttttgcggtgtgggatgggcccgcggcctatcagcttgttggtggggtgatggcctaccaaggcgacgacgggtagccggcctgagagggtgtccggccacactgggactgagatacggcccagactcctacgggaggcagcagtggggaatattgcacaatgggcgcaagcctgatgcagcgacgccgcgtgggggatgacggccttcgggttgtaaacctctttcaccatcgacgaaggtccgggtttctcggattgacggtaggtggagaagaagcaccggccaactacgtgccagcagccgcggtaatacgtagggtgcgagcgttgtccggaattactgggcgtaaagagctcgtaggtggtttgtcgcgttgttcgtgaaatctcacggcttaactgtgagcgtgcgggcgatacgggcagactagagtactgcaggggagactggaattcctggtgtagcggtggaatgcgcagatatcaggaggaacaccggtggcgaaggcgggtctctgggcagtaactgacgctgaggagcgaaagcgtggggagcgaacaggattagataccctggtagtccacgccgtaaacggtgggtactaggtgtgggtttccttccttgggatccgtgccgtagctaacgcattaagtaccccgcctggggagtacggccgcaaggctaaaactcaaaggaattgacgggggcccgcacaagcggcggagcatgtggattaattcgatgcaacgcgaagaaccttacctgggtttgacatgcacaggacgcgtctagagataggcgttcccttgtggcctgtgtgcaggtggtgcatggctgtcgtcagctcgtgtcgtgagatgttgggttaagtcccgcaacgagcgcaacccttgtctcatgttgccagcgggtaatgccggggactcgtgagagactgccggggtcaactcggaggaaggtggggatgacgtcaagtcatcatgccccttatgtccagggcttcacacatgctacaatggccggtacaaagggctgcgatgccgcaaggttaagcgaatccttttaaagccggtctcagttcggatcggggtctgcaactcgaccccgtgaagtcggagtcgctagtaatcgcagatcagcaacgctgcggtgaatacgttcccgggccttgtacacaccgcccgtcacgtcatgaaagtcggtaacacccgaagccagtggcctaacccttgggagggagctgtcgaaggtgggatcggcgattggacgaagtcgtaacaaggtagccgtaccggaaggtgcggctggatcacctcctt

SEQ ID NO: 1291 - DNA, 1525 bp, Mycobacterium smegmatis
ttgtttggagagtttgatcctggctcaggacgaacgctggcggcgtgcttaacacatgcaagtcgaacggaaaggccctttcgggggtactcgagtggcgaacgggtgagtaacacgtgggtgatctgccctgcactttgggataagcctgggaaactgggtctaataccgaatacaccctgctggtcgcatggcctggtaggggaaagcttttgcggtgtgggatgggcccgcggcctatcagcttgttggtggggtgatggcctaccaaggcgacgacgggtagccggcctgagagggtgaccggccacactgggactgagatacggcccagactcctacgggaggcagcagtggggaatattgcacaatgggcgcaagcctgatgcagcgacgccgcgtgagggatgacggccttcgggttgtaaacctctttcagcacagacgaagcgcaagtgacggtatgtgcagaagaaggaccggccaactacgtgccagcagccgcggtaatacgtagggtccgagcgttgtccggaattactgggcgtaaagagctcgtaggtggtttgtcgcgttgttcgtgaaaactcacagcttaactgtgggcgtgcgggcgatacgggcagactagagtactgcaggggagactggaattcctggtgtagcggtggaatgcgcagatatcaggaggaacaccggtggcgaaggcgggtctctgggcagtaactgacgctgaggagcgaaagcgtggggagcgaacaggattagataccctggtagtccacgccgtaaacggtgggtactaggtgtgggtttccttccttgggatccgtgccgtagctaacgcattaagtaccccgcctggggagtacggccgcaaggctaaaactcaaaggaattgacgggggcccgcacaagcggcggagcatgtggattaattcgatgcaacgcgaagaaccttacctgggtttgacatgcacaggacgccggcagagatgtcggttcccttgtggcctgtgtgcaggtggtgcatggctgtcgtcagctcgtgtcgtgagatgttgggttaagtcccgcaacgagcgcaacccttgtctcatgttgccagcacgttatggtggggactcgtgagagactgccggggtcaactcggaggaaggtggggatgacgtcaagtcatcatgccccttatgtccagggcttcacacatgctacaatggccggtacaaagggctgcgatgccgtgaggtggagcgaatcctttcaaagccggtctcagttcggatcggggtctgcaactcgaccccgtgaagtcggagtcgctagtaatcgcagatcagcaacgctgcggtgaatacgttcccgggccttgtacacaccgcccgtcacgtcatgaaagtcggtaacacccgaagccggtggcctaacccttgtggagggagccgtcgaaggtgggatcggcgattgggacgaagtcgtaacaaggtagccgtaccggaaggtgcggctggatcacctcctttct

SEQ ID NO: 1292 - DNA, 1478 bp, Mycobacterium sp.
  1761
gaacgctggcggcgtgcttaacacatgcaagtcgaacgtgaaggcttccttcggcatagtcgagtggcgaacgggtgagtaacacgtgggtgatctgccctgcacttcgggataagcttgggaaactgggtctaataccggatagacgctgctacccgcatgccttttggtggaaagcttttgcggtgtgggatgggcccgcggcctatcagcttgttggtgaggtaacggcctaccaaggcgacgacgggtagccggcctgagagggtgtccggccacactgggactgagatacggcccagactcctaccgggagcagcagtggggaatattgcacaatgggcgcaagcctgatgcagcgacgccgcgtgggggatgacggccttcgggtggtaaacctctttcaccatcgacgaaggtcctggtcttctccgattgacggtaggtggagaagaagcaccggccaactacgtgccagcagccgcggtaatacgtagggtgcgagcgttgtccggaattactgggcgtaaagagctcgtaggtggtttgtcgcgttgttcgtgaaatctcacggcttaactgtgagcgtgcgggcgatacgggcagactagagtactgcaggggagactggaattcctggtgtagcggtggaatgcgcagatatcaggaggaacaccggtggcgaaggcgggtctctgggcagtaactgacgctgaggagcgaaagcgtggggagcgaacaggattagataccctggtagtccacgccgtaaacggtgggtactaggtgtgggtttccttccttgggatccgtgccatagctaacgcattaagtaccccgcctgaggagtacggccgcaaggctaaaactcaaaggaattgacgggggcccgcaccagcggcggagcatgtggattaattcgatgcaacgcgaagaaccttacctgggtttgacatgcacaggacgcgtctagagataggcgttcccttgtggcctgtgtgcaggtggtgcatggctgtcgtcagctcgtgtcgtgagatgttgggttaagtcccgcaacgagcgcaacccttgtttcatgttgccagcgggtaatgccggggactcgtgagagactgccggggtcaactcggaggaaggtggggatgacgtcaagtcatcatgccccttatgtccagggcttcacacatgctacaatggccggtacaaagggccgcgatgccgcgaggttaagcgaatccttttaaagccggtctcagttcggatcggggtctgcaactcgaccccgtgaagtcggagtcgctagtaatcgcagatcagcaacgctgcggtgaatacgttcccgggccttgtacaccccgcccgtcacgtcatgaaagtcggtaacacccgaagccagtggcctaacccctccggagggagctgtcgaaggtgggatcggcgattgggacgaagtcgtaacaaggtagccgtaccgg

SEQ ID NO: 1293 - DNA, 1507 bp, Mycobacterium sp.
  1776
ctggcggcgtgcttaacacatgcaagtcgaacggaaaggcccctttcggaaggtactcgagtggcgaacgggtgagtaacacgtgggtgatctgccctgcacttcgggataagcctgggaaactgggtctaataccggataggaccacctgtcgcatggtgtgtggtggaaagcttttgcggtgtgggatgggcccgcggcctatcaacttgttggtggggtgatggcctaccaaggcgacgacgggtagccggcctgagagggtgtccggccacactgggactgagatacggcccagactcctacgggaggcagcagtggggaatattgcacaatgggcgcaagcctgatgcagcgacgccgcgtgggggatgacggccttcgggttgtaaacctctttcaccatcgacgaagctgcgggttttctcctggtgacagtatgtggagaagaagcaccggccaactacgtgccagcagccgcggtaatacgtagggtgcaagcgttgtccggaattactgggcgtaaagagctcgtaggtggtttgtcccgttgttcgtgaaatgacacagcttaactgtgggcgtgcgggcgatacgggcatactgtagtactgcaggggagactggaattcctggtgtagcggtggaatgcgcagatatcaggaggaacaccggtggcgaaggcgggtctctgggcagtaactgacgctgaggagcgaaagcgtggggagcgaacaggattagataccctggtagtccacgccgtaaacggtgggtactaggtgtgggtttctttcctaaggatccgtgccgtagctaacgcattaaataccccgcctggggagtacggccgcaaggctaaaactcaaaggaattgacgggggcccgcacaagcggcggagcatgtggattaattcgatgcaacgcgaagaaccttacctgggtttgacatgcacaggacgcgtctagagataggcgttcccttgtggcctgtgtgcaggtggtgcatggctgtcgtcagctcgtgtcgtgagatgttgggttaagtcccgcaacgagcgcaaccctcgtctcatgttgccagcgcgtgatggcggggactcgtgagagactgccggggtcaactcggaggaaggtggggatgacgtcaagtcatcatgccccttatgtccagggcttcacacatgctacaatggccggtacaaagggctgcgatgccgtgaggttaaaccaatccttgtaaagccggtctcagttcggatcggggtctgcaactcgaccccgtgaagtcgaagtcgctagtaatcgcagatcagcaacgctgcggtgaatacgttcccgggccttgtacacaccgcccgtcacgtcatgaaagtcggtaacacccgaagccggtggcctaacccgtttgggagggagccgtcgaaggtgggatcgacgattgggacgaagtcgtaacaaggtagccgtaccggaaggtgctgctgataaacccacctcaataaaa

SEQ ID NO: 1294 - DNA, 1487 bp, Mycobacterium sp.
  1781
catgccgggctgctaccatgcaagtcgacggaaggcccctttcggggggtactcgagtggcgaacgggtgagtaacacgtgggtgatctgccctgcacttcgggataagcttgggaaactgggtctaataccggataggaccacatgtcgcatggtgtgtggtggaaagcttttgcggtgtgggatgggcccgcggcctatcagcttgttggtggggtgatggcctaccaaggcgacgacgggtagccggcctgagagggtgtccggccacactgggactgagatacggcccagactcctacgggaggcagcagtggggaatattgcacaatgggcgcaagcctgatgcagcgacgccgcgtgggggatgacggccttcgggttgtaaacctctttcaccatcgacgaagctgcgggttttctcgtggtgacggtaggtggagaagaagcaccggccaactacgtgccagcagccgcggtaatacgtagggtgcgagcgttgtccggaattactgggcgtaaagagctcgtaggtggtttgtcgcgttgttcgtggaatgccacagcttaactgtgggcgtgcgggcgatacgggcagactggagtactgcaggggagactggaattcctggtgtagcggtggaatgcgcagatatcaggaggaacaccggtggcgaaggcgggtctctgggcagtaactgacgctgaggagcgaaagcgtggggagcgaacaggattagataccctggtagtccacgccgtaaacggtgggtactaggtgtgggttctttcctaaggatccgtgccgtagctaacgcattaagtaccccgcctggggagtacggccgcaaggctaaaactcaaaggaattgacggggggcccgcacaagcggcgggagcatgtggattaattcgatgcaacgcggaagaacctttacctgggtttgacatgcacaggacgcgtctagagataggcgtttcccttgtggcctgtgtgcaggtggtgcatggctgtcgtcagctcgtgtcgtggagatgttgggttaaggtcccgcaacgaggcgcaacccttgtctcatgttgccagcgcgtgatgggcgggacctcgtggagaagactgcctggggtcacctcggaggaaggtgggggatgacgtccaagtcatcatgccccttatgtccagggcttcacacatgcctacaatggccggtacaaagggctgcgatgccgtgaggatttaagcgaatccttgttaaagctcggtcttcgagttcggaattcggggtctgcaactcgaccccgtgaagtcggagtcgctagtaatcgcagatcagcaacgctgcggtgaatacgttcccgggccttgtacacaccgcccgtcacgtcatgaaagtcggtaacacccgaagccggtggcctaacccgtttgggagggagccgtcgaaggtgggatcggcgattggacgaagtcgtaacaagtagcttca

SEQ ID NO: 1295 - DNA, 1472 bp, Mycobacterium sp.
  1791
gaacgctggcggcgtgcttaacacatgcaagtcgaacggaaaggtccttcgggcctactcgagtggcgaacgggtgagtaacacgtgggcaatctgccctgcacttcgggataagcttgggaaactgggtctaataccgggtagaccgcgtcatgcatgtccggtggtggaaagcttttgcggtgtgggatgggcccgcggcctatcagcttgttggtggggtgatggcctaccaaggcgacgacgggtagccggcctgagagggtgtccggccacactgggactgagatacggcccagactcctacgggaggcagcagtggggaatattgcacaatgggcgcaagcctgatgcagcgacgccgcgtgggggatgacggccttcgggttgtaaacctctttcaccatcgacgaaggttccggttttcttcggattgacggtaggtggagaagaagcaccggccaactacgtgccagcagccgcggtaatacgtagggtgcgagcgttgtccggaattactgggcgtaaagagctcgtaggtggtttgtcgcgttgttcgtgaaatctcacggcttaactgtgagcgtgcgggcgatacgggcagacttgagtactgcaggggagactggaattcctggtgtagcggtggaatgcgcagatatcaggaggaacaccggtggcgaaggcgggtctctgggcagtaactgacgctgaggagcgaaagcgtggggagcgaacaggattagataccctggtagtccacgccgtaaacggtgggtactaggtgtgggtttccttccttgggatccgtgccgtagctaacgcattaagtaccccgcctggggagtacggccgcaaggctaaaactcaaaggaattgacgggggcccgcacaagcggcggagcatgtggattaattcgatgcaacgcgaagaaccttacctgggtttgacatgcacaggacgccggcagagatgtcggttcccttgtggcctgtgtgcaggtggtgcatggctgtcgtcagctcgtgtcgtgagatgttgggttaagtcccgcaacgagcgcaacccttgtctcatgttgccagcgggtaatgccggggactcgtgagagactgccggggtcaactcggaggaaggtggggatgacgtcaagtcatcatgccccttatgtccagggcttcacacatgctacaatggccggtacaaagggctgcgatgccgcgaggttaagcgaatccttttaaagccggtctcagttcggatcggggtctgcaactcgaccccgtgaagtcggagtcgctagtaatcgcagatcagcaacgctgcggtgaatacgttcccgggccttgtacacaccgcccgtcacgtcatgaaagtcggtaacacccgaagcccgtggcctaacccgttttggagggagctgtcgaaggtgggatcggcgattgggacgaagtcgtaacaaggtagccgt

SEQ ID NO: 1296 - DNA, 1486 bp, Mycobacterium sp.
  1797
gaacgctggcggcgtgcttaacacatgcaagtcgaacgtgaaggcttccttcggcatagtcgagtggcgaacgggtgagtaacacgtgggtgatctgccctgcacttcgggataagcctgggaaactgggtctaataccggatagacgctgctacccgcatgccttgtggtggaaagcttttgcggtgtgggatgggcccgcggcctatcagcttgttggtgaggtaatggcttaccaaggcgacgacgggtagccggcctgagagggtgtccggccacactgggactgagatacggcccagactcctaccggaagcagcagtggggaatattgcacaatgggcgcaagcctgatgcagcgacgccgcgtgagggatgacggccttcgggttgtaaacctccttcaccatcgacgaatgatctgagtttttctcggattgacggtaggtggagaagaagcaccggccaactacgtgccagcagccgcggtaatacgtagggtgcgagcgttgtccggaattactgggcgtaaagagctcgtaggtggtttgtcgcgttgttcgtgaaatctcacggcttaactgtgagcgtgcgggcgatacgggcagactagagtactgcaggggagactggaattcctggtgtagcggtggaatgcgcagatatcaggaggaacaccggtggcgaaggcgggtctctgggcagtaactgacgctgaggagcgaaagcgtggggagcgaacaggattagataccctggtagtccacgccgtaaacggtgggtactaggtgtgggtttccttccttgggatccgtgccgtagctaacgcattaagtaccccgcctggggagtacggccgcaaggctaaaactcaaaggaattgacgggggcccgcacaagcggcggagcatgtggattaattcgatgcaacgcgaagaaccttacctgggtttgacatgcacaggacgcgtctagagataggcgttcccttgtggcctgtgtgcaggtggtgcatggctgtcgtcagctcgtgtcgtgagatgttgggttaagtcccgcaacgagcgcaacccttgtctcatgttgccagcgggtaatgccggggactcgtgagagactgccggggtcaactcggaggaaggtggggatgacgtcaagtcatcatgccccttatgtccagggcttcacacatgctacaatggccggtacaaagggctgcgatgccgtaaggttaagcgaatccttttaaagccggtctcagttcggattggggtctgcaactcgaccccatgaagtcggagtcgctagtaatcgcagatcagcaacgctgcggtgaatacgttcccgggccttgtacacaccgcccgtcacgtcatgaaagtcggtaacacccgaagccggtggcctaaccctctctggagggagccgtcgaaggtgggatcggcgattgggacgaagtcgtaacaaggtagccgtaccggaaggt

SEQ ID NO: 1297 - DNA, 1328 bp, Mycobacterium sp.
  AQ1GA4
ggtgagtaacacgtgggtgatctgccctgcactttgggataagcctgggaaactgggtctaataccgaataggactccggactgcatggtctggggtggaaagcttttgcggtgtgggatgggcccgcggcctatcagcttgttggtggggtgatggcctaccaaggcgacgacgggtagccggcctgagagggtgtccggccacactgggactgagatacggcccagactcctacgggaggcagcagtggggaatattgcacaatgggcgcaagcctgatgcagcgacgccgcgtgggggatgacggccttcgggttgtaaacctctttcgcctacgacgaagcgtaagtgacggtagtaggagaagaagcaccggccaactacgtgccagcagccgcggtaatacgtagggtgcgagcgttgtccggaattactgggcgtaaagagctcgtaggtggtttgtcgcgttgttcgtgaaaactcacagcttaactgtgggcgtgcgggcgatacgggcagactggagtactgcaggggagactggaattcctggtgtagcggtggaatgcgcagatatcaggaggaacaccggtggcgaaggcgggtctctgggcagtaactgacgctgaggagcgaaagcgtggggagcgaacaggattagataccctggtagtccacgccgtaaacggtgggtactaggtgtgggtttccttccttgggatccgtgccgtagctaacgcattaagtaccccgcctggggagtacggccgcaaggctaaaactcaaaggaattgacgggggcccgcacaagcggcggagcatgtggattaattcgatgcaacgcgaagaaccttacctgggtttgacatgcacaggacgactgcagagatgtggtttcccttgtggcctgtgtgcaggtggtgcatggctgtcgtcagctcgtgtcgtgagatgttgggttaagtcccgcaacgagcgcaacccttgtctcatgttgccagcacgttatggtggggactcgtgagagactgccggggtcaactcggaggaaggtggggatgacgtcaagtcatcatgccccttatgtccagggcttcacacatgctacaatggccggtacaaagggctgcgatgccgtgaggtggagcgaatccttgttaaagccggtctcagttcggatcggggtctgcaactcgaccccgtgaagtcggagtcgctagtaatcgcagatcagcaacgctgcggtgaatacgttcccgggccttgtacacaccgcccgtcacgtcatgaaagtcggtaacacccgaagccggtggcctaacccttg

SEQ ID NO: 1298 - DNA, 1513 bp, Mycobacterium sp.
  B10-07.09.0206
gacgaacgctggcggcgtgcttaacacatgcaagtcgaacggaaaggcccykytygsrgggtgctcgagtggcgaacgggtgagtaacacgtgggtgatctgccctgcacttcgggataagcttgggaaactgggtctaataccggataggactccgagatgcatgtcttggggtggaaagctttttgcggtgtgggatgggcccgcggcctatcagcttgttggtggggtgatggcctaccaaggcgacgacgggtagccggcctgagagggtgtccggccacactgggactgagatacggcccagactcctacgggaggcagcagtggggaatattgcacaatgggcgcaagcctgatgcagcgacgccgcgtgggggatgacggccttcgggttgtaaacctctttcaccatcgacgaagctgccgctttttgtggtggtgacggtaggtggagaagaagcaccggccaactacgtgccagcagccgcggtaatacgtagggtgcgagcgttgtccggaattactgggcgtaaagagctcgtaggtggtttgtcgcgttgttcgtgaaattccctggcttaactgggggcgtgcgggcgatacgggcagactggagtactgcaggggagactggaattcctggtgtagcggtggaatgcgcagatatcaggaggaacaccggtggcgaaggcgggtctctgggcagtaactgacgctgaggagcgaaagcgtggggagcgaacaggattagataccctggtagtccacgccgtaaacggtgggtactaggtgtgggtttccttccttgggatccgtgccgtagctaacgcattaagtaccccgcctggggagtacggccgcaaggctaaaactcaaaggaattgacgggggcccgcacaagcggcggagcatgtggattaattcgatgcaacgcgaagaaccttacctgggtttgacatgcacaggacgcwycyagagatrggkgttcccttgtggcctgtgtgcaggtggtgcatggctgtcgtcagctcgtgtcgtgagatgttgggttaagtcccgcaacgagcgcaacccttgtctcatgttgccagcgcgtgatggcggggactcgtgagagactgccggggtcaactcggaggaaggtggggatgacgtcaagtcatcatgccccttatgtccagggcttcacacatgctacaatggccggtacaaagggctgcgatgccgtgaggtttagcgaatcctttaaagccggtctcagttcggatcggggtctgcaactcgaccccgtgaagtcggagtcgctagtaatcgcagatcagcaatgctgcggtgaatacgttcccgggccttgtacacaccgcccgtcacgtcatgaaagtcggtaacacccgaagcccatggcctaacccgcaagggagggagtggtcgaaggtgggatcggcgattgggacgaagtcgtaacaaggtagccgtaccggaaggtgcggctggatcacctcctttctaa

SEQ ID NO: 1299 - DNA, 1402 bp, Mycobacterium sp.
  GN-10546
catgcaagtcgaacggaaaggccctttcgggggtactcgagtggcgaacgggtgagtaacacgtgggtgatctgccctgcactttgggataagcctgggaaactgggtctaataccgaataggaccgcatgcttcatggtgtgtggtggaaagcttttgcggtgtgggatgggcccgcggcctatcagcttgttggtggggtaatggcctaccaaggcgacgacgggtagccggcctgagagggtgtccggccacactgggactgagatacggcccagactcctacgggaggcagcagtggggaatattgcacaatgggcgcaagcctgatgcagcgacgccgcgtgggggatgacggccttcgggttgtaaacctctttcagtatcggcgaagctccgggatttttcttggggtgacggtaggtacagaagaagcaccggccaactacgtgccagcagccgcggtaatacgtagggtgcgagcgttgtccggaattactgggcgtaaagagctcgtaggtggtttgtcacgttgtccgtgaaaactcacagcttaactgtgggcgtgcgggcgatacgggcagactggagtactgtaggggagactggaattcctggtgtagcggtggaatgcgcagatatcaggaggaacaccggtggcgaaggcgggtctctgggcagtaactgacgctgaggagcgaaagcgtggggagcgaacaggattagataccctggtagtccacgccgtaaacggtgggtactaggtgtgggtttccttcctttagggatccgtgccgtagctaacgcattaagtaccccgcctggggagtacggccgcaaggctaaaactcaaaggaattgacgggggcccgcacaagcggcggagcatgtggattaattcgatgcaacgcgaagaaccttacctgggtttgacatgcacaggacgccagcagagatgttggttcccttgtggcctgtgtgcaggtggtgcatggctgtcgtcagctcgtgtcgtgagatgttgggttaagtcccgcaacgagcgcaacccttgtctcatgttgccagcacgttatggtggggactcgtgagagactgccggggtcaactcggaggaaggtggggatgacgtcaagtcatcatgccccttatgtccagggcttcacacatgctacaatggccggtacaaagggctgcgatcccgtgagggttagcgaatcctttaaagccggtctcagttcggattggggtctgcaactcgaccccatgaagtcggagtcgctagtaatcgcagatcagcaacgctgcggtgaatacgttcccgggccttgtacacaccgcccgtcacgtcatgaaagtcggtaacacccgaagccggtggcctaacccttgtggagggagc

SEQ ID NO: 1300 - DNA, 1390 bp, Mycobacterium sp.
  GN-10827
tgcaagtcgaacggaaaggccccttcgggggtgctcgagtggcgaacgggtgagtaacacgtgggtgatctgccctgcactttgggataagcctgggaaactgggtctaataccgaatacaccctgctggtcgcatggcctggtgggggaaagcttttgcggtgtgggatgggcccgcggcctatcagcttgttggtggggtgatggcctaccaaggcgacgacgggtagccggcctgagagggtgtccggccacactgggactgagatacggcccagactcctacgggaggcagcagtggggaatattgcacaatgggcgcaagcctgatgcagcgacgccgcgtgggggatgacggccttcgggttgtaaacccctttcagtatcgacgaagccgtgaggtgacggtaggtacagaagaagcaccggccaactacgtgccagcagccgcggtaatacgtagggtgcgagcgttgtccggaattactgggcgtaaagagctcgtaggtggtttgtcgcgttgtccgtgaaaactcacagcttaactgtgggcgtgcgggcgatacgggcagactggagtactgcaggggagactggaattcctggtgtagcggtggaatgcgcagatatcaggaggaacaccggtggcgaaggcgggtctctgggcagtaactgacgctgaggagcgaaagcgtggggagcgaacaggattagataccctggtagtccacgccgtaaacggtgggtactaggtgtgggtttccttccttgggatccgtgccgtagctaacgcattaagtaccccgcctggggagtacggccgcaaggctaaaactcaaaggaattgacgggggcccgcacaagcggcggagcatgtggattaattcgatgcaacgcgaagaaccttacctgggtttgacatgcacaggacgcgtctagagataggcgttcccttgtggcctgtgtgcaggtggtgcatggctgtcgtcagctcgtgtcgtgagatgttgggttaagtcccgcaacgagcgcaacccttgtctcatgttgccagcacgtgatggtggggactcgtgagagactgccggggtcaactcggaggaaggtggggatgacgtcaagtcatcatgccccttatgtccagggcttcacacatgctacaatggccggtacaaagggctgcgatgccgtgaggtggagcgaatcctttcaaagccggtctcagttcggatcggggtctgcaactcgaccccgtgaagtcggagtcgctagtaatcgcagatcagcaacgctgcggtgaatacgttcccgggccttgtacacaccgcccgtcacgtcatgaaagtcggtaacacccgaagccggtggcctaacccgcaagggagggagc

SEQ ID NO: 1301 - DNA, 1383 bp, Mycobacterium sp.
  GN-11124
tcgaacggaaaggccctttcgggggtgctcgagtggcgaacgggtgagtaacacgtgggtgatctgccctgcacttcgggataagcctgggaaactgggtctaataccggataggaccacggtctgcatggattgtggtggaaagcttttgcggtgtgggatgggcccgcggcctatcagcttgttggtggggtgatggcctaccaaggcgacgacgggtagccggcctgagagggtgtccggccacactgggactgagatacggcccagactcctacgggaggcagcagtggggaatattgcacaatgggcgcaagcctgatgcagcgacgccgcgtgggggatgacggccttcgggttgtaaacccctttcaatagggacgaagcgcaagtgacggtacctatagaagaagcaccggccaactacgtgccagcagccgcggtaatacgtagggtgcgagcgttgtccggaattactgggcgtaaagagctcgtaggtggtttgtcgcgttgtccgtgaaaactcacagcttaactgtgggcgtgcgggcgatacgggcagactggagtactgcaggggagactggaattcctggtgtagcggtggaatgcgcagatatcaggaggaacaccggtggcgaaggcgggtctctgggcagtaactgacgctgaggagcgaaagcgtggggagcgaacaggattagataccctggtagtccacgccgtaaacggtgggtactaggtgtgggtttccttccttgggatccgtgccgtagctaacgcattaagtaccccgcctggggagtacggccgcaaggctaaaactcaaaggaattgacgggggcccgcacaagcggcggagcatgtggattaattcgatgcaacgcgaagaaccttacctgggtttgacatgcacaggacgccggcagagatgtcggttcccttgtggcctgtgtgcaggtggtgcatggctgtcgtcagctcgtgtcgtgagatgttgggttaagtcccgcaacgagcgcaacccttgtctcatgttgccagcgggtaatgccggggactcgtgagagactgccggggtcaactcggaggaaggtggggatgacgtcaagtcatcatgccccttatgtccagggcttcacacatgctacaatggccggtacaaagggctgcgatgccgtgaggtggagcgaatcctttcaaagccggtctcagttcggatcggggtctgcaactcgaccccgtgaagtcggagtcgctagtaatcgcagatcagcaacgctgcggtgaatacgttcccgggccttgtacacaccgcccgtcacgtcatgaaagtcggtaacacccgaagccggtggcctaaccccttgtgggagggagccg

SEQ ID NO: 1302 - DNA, 1404 bp, Mycobacterium sp.
  GN-9188
catgcaagtcgaacggaaaggccctttcgggggtactcgagtggcgaacgggtgagtaacacgtgggtgatctgccctgcactttgggataagcctgggaaactgggtctaataccgaatatgatcatgcgcctcatggtgtgtggtggaaagcttttgcggtgtgggatgggcccgcggcctatcagcttgttggtggggtaatggcctaccaaggcgacgacgggtagccggcctgagagggtgtccggccacactgggactgagatacggcccagactcctacgggaggcagcagtggggaatattgcacaatgggcgcaagcctgatgcagcgacgccgcgtgggggatgacggccttcgggttgtaaacctctttcagtatcggcgaagctccagggttttctttggggtgacggtaggtacagaagaagcaccggccaactacgtgccagcagccgcggtaatacgtagggtgcgagcgttgtccggaattactgggcgtaaagagctcgtaggtggtttgtcgcgttgtccgtgaaaactcacagctcaactgtgggcgtgcgggcgatacgggcagactggagtactgtaggggagactggaattcctggtgtagcggtggaatgcgcagatatcaggaggaacaccggtggcgaaggcgggtctctgggcagtaactgacgctgaggagcgaaagcgtggggagcgaacaggattagataccctggtagtccacgccgtaaacggtgggtactaggtgtgggtttccttcctttagggatccgtgccgtagctaacgcattaagtaccccgcctggggagtacggccgcaaggctaaaactcaaaggaattgacgggggcccgcacaagcggcggagcatgtggattaattcgatgcaacgcgaagaaccttacctgggtttgacatgcacaggacgccggtagagatatcggttcccttgtggcctgtgtgcaggtggtgcatggctgtcgtcagctcgtgtcgtgagatgttgggttaagtcccgcaacgagcgcaacccttgtctcatgttgccagcacgttatggtggggactcgtgagagactgccggggtcaactcggaggaaggtggggatgacgtcaagtcatcatgccccttatgtccagggcttcacacatgctacaatggccggtacaaagggctgcgataccgtgaggtttagcgaatcctttaaagccggtctcagttcggatcggggtctgcaactcgaccccgtgaagtcggagtcgctagtaatcgcagatcagcaacgctgcggtgaatacgttcccgggccttgtacacaccgcccgtcacgtcatgaaagtcggtaacacccgaagccggtggcctaacccttgtggagggagccg

SEQ ID NO: 1303 - DNA, 1386 bp, Mycobacterium sp.
  GR-2007-210
agtcgaacggaaaggcccttcggggtactcgagtggcgaacgggtgagtaacacgtgggtgatctgccctgcactttgggataagcctgggaaactgggtctaataccgaatacaccctgctggccgcatggtctggtgggggaaagcttttgcggtgtgggatgggcccgcggcctatcagcttgttggtgaggttacggctcaccaaggcgacgacgggtagccggcctgagagggtgatcggccacactgggactgagatacggcccagactcctacgggaggcagcagtggggaatattgcacaatgggcgcaagcctgatgcagcgacgccgcgtgggggatgacggccttcgggttgtaaacctctttcagtagggacgaagcgcaagtgacggtacctacagaagaaggaccggccaactacgtgccagcagccgcggtaatacgtagggtccgagcgttgtccggaattactgggcgtaaagagctcgtaggtggtttgtcgcgttgttcgtgaaaaccgggggcttaaccctcggcgtgcgggcgatacgggcagacttgagtactgcaggggagactggaattcctggtgtagcggtggaatgcgcagatatcaggaggaacaccggtggcgaaggcgggtctctgggcagtaactgacgctgaggagcgaaagcgtggggagcgaacaggattagataccctggtagtccacgccgtaaacggtgggtactaggtgtgggtttccttccttgggatccgtgccgtagctaacgcattaagtaccccgcctggggagtacggccgcaaggctaaaactcaaagaaattgacgggggcccgcacaagcggcggagcatgtggattaattcgatgcaacgcgaagaaccttacctgggtttgacatgcacaggacgccggcagagatgtcggttcccttgtggcctgtgtgcaggtggtgcatggctgtcgtcagctcgtgtcgtgagatgttgggttaagtcccgcaacgagcgcaacccttgtctcatgttgccagcacgttatggtggggactcgtgagagactgccggggtcaactcggaggaaggtggggatgacgtcaagtcatcatgccccttatgtccagggcttcacacatgctacaatggccggtacaaagggctgcgatgccgtgaggtggagcgaatcctttcaaagccggtctcagttcggatcggggtctgcaactcgaccccgtgaagtcggagtcgctagtaatcgcagatcagcaacgctgcggtgaatacgttcccgggccttgtacacaccgcccgtcacgtcatgaaagtcggtaacacccgaagccggtggcctaaccccttgtgggagggagccgt

SEQ ID NO: 1304 - DNA, 1484 bp, Mycobacterium sp.
  HE5
agagtttgatcctggctcaggacgaacgctggcggcgtgcttaacacatgcaagtcgaacggaaaggcccttcggggtactcgagtggcgaacgggtgagtaacacgtgggtgatctgccctgcactttgggataagcctgggaaactgggtctaataccgaataggaccgcatgcttcatggtgtgtggtggaaagcttttgcggtgtgggatgggcccgcggcctatcagcttgttggtggggtaatggcctaccaaggcgacgacgggtagccggcctgagagggtgaccggccacactgggactgagatacggcccagactcctacgggaggcagcagtggggaatattgcacaatgggcgcaagcctgatgcagcgacgccgcgtgagggatgacggccttcgggttgtaaacctctttcagcagggacgaagcgcaagtgacggtacctgcagaagaaggaccggccaactacgtgccagcagccgcggtaatacgtagggtccgagcgttgtccggaattactgggcgtaaagagctcgtaggtggtttgtcgcgttgttcgtgaaaactcacagcttaactgtgggcgtgcgggcgatacgggcagactggagtactgcaggggagactggaattcctggtgtagcggtggaatgcgcagatatcaggaggaacaccggtggcgaaggcgggtctctgggcagtaactgacgctgaggagcgaaagcgtggggagcgaacaggattagataccctggtagtccacgccgtaaacggtgggtactaggtgtgggtttccttccttgggatccgtgccgtagctaacgcattaagtaccccgcctggggagtacggccgcaaggctaaaactcaaaggaattgacgggggcccgcacaagcggcggagcatgtggattaattcgatgcaacgcgaagaaccttacctgggtttgacatgcacaggacgccggcagagatgtcggttcccttgtggcctgtgtgcaggtggtgcatggctgtcgtcagctcgtgtcgtgagatgttgggttaagtcccgcaacgagcgcaacccttgtctcatgttgccagcacgttatggcggggactcgtgagagactgccggggtcaactcggaggaaggtggggatgacgtcaagtcatcatgccccttatgtccagggcttcacacatgctacaatggccggtacaaagggctgcgatgccgtgaggtggagcgaatcctttcaaagccggtctcagttcggatcggggtctgcaactcgaccccgtgaagtcggagtcgctagtaatcgcagatcagcaacgctgcggtgaatacgttcccgggccttgtacacaccgcccgtcacgtcatgaaagtcggtaacactcgaagccggtggcctaaccccttgtgggagggagccgtcgaaggtgggatcggcgattgggacgaagtcgtaacaaggtagccgta

SEQ ID NO: 1305 - DNA, 1470 bp, Mycobacterium sp.
  NLA001000736
agtttgatcatggttcaggacgaacgctggcggcgtgcttaacacatgcaagtcgaacggaaaggccccttcgggggtgctcgagtggcgaacgggtgagtaacacgtgggtgatctgccctgcactctgggataagcctgggaaactgggtctaataccggataggaccgcgcatcgcatggtgtgtggtggaaagcttttgcggtgtgggatgggcccgcggcctatcagcttgttggtggggttatggcctaccaaggcgacgacgggtagccggcctgagagggtgtccggccacactgggactgagatacggcccagactcctacgggaggcagcagtggggaatattgcacaatgggcggaagcctgatgcagcgacgccgcgtgagggatgacggccttcgggttgtaaacctctttcagcctcgacgaagcgcaagtgacggtaggggcagaagaagcaccggccaactacgtgccagcagccgcggtaatacgtagggtgcgagcgttgtccggaattactgggcgtaaagagctcgtaggtggtttgtcgcgtcgtccgtgaaatcccatggcttaactgtgggcgtgcgggcgatacgggcagacttgagtactgcaggggagactggaattcctggtgtagcggtggaatgcgcagatatcaggaggaacaccggtggcgaaggcgggtctctgggcagtaactgacgctgaggagcgaaagcgtggggagcgaacaggattagataccctggtagtccacgccgtaaacggtgggtactaggtgtgggtttccttccttgggatccgtgccgtagctaacgcattaagtaccccgcctggggagtacggccgcaaggctaaaactcaaaggaattgacgggggcccgcacaagcggcggagcatgtggattaattcgatgcaacgcgaagaaccttacctgggtttgacatgcacaggacgactgcagagatgtggtttcccttgtggyctgtgtacaggtggtgcatggctgtcgtcagctcgtgtcgtgagatgttgggttaagtcccgcaacgagcgcaacccttgttccatgttgccagcgcgtaatggcggggactcatgggagactgccggggtcaactcggaggaaggtggggatgacgtcaagtcatcatgccccttatgtccagggcttcacacatgctacaatggccggtacaaagggctgcgatgccgtgaggtggagcgaatcctttcaaagccggtctcagttcggatcggggtctgcaactcgaccccgtgaagtcggagtcgctagtaatcgcagatcagcaacgctgcggtgaatacgttcccgggccttgtacacaccgcccgtcacgtcatgaaagtcggtaacacccgaagccagtggcctaaccctttgggggggagctgtcgaaggtgggatcggcgattgggacgaagtcgtaac

SEQ ID NO: 1306 - DNA, 1465 bp, Mycobacterium sp.
  W
gagagtttgatcctggctcaggacgaacgctggcggcgtgcttaacacatgcaagtcgaacggaaaggccccttcgggggtactcgagtggcgaacgggtgagtaacacgtgggcaatctgccctgcacttcgggataagcctgggaaactgggtctaataccggataggacctttaggcgcatgtctttaggtggaaagcttttgcggtgtgggatgggcccgcggcctatcagcttgttggtggggtgatggcctaccaaggcgacgacgggtagccggcctgagagggtgtccggccacactgggactgagatacggcccagactcctacgggaggcagcagtggggaatattgcacaatgggcgcaagcctgatgcagcgacgccgcgtgggggatgacggccttcgggttgtaaacctctttcaccatcgacgaaggtccgggttttctcggattgacggtaggtggagaagaagcaccggccaactacgtgccagcagccgcggtaatacgtagggtgcgagcgttgtccggaattactgggcgtaaagagctcgtaggtggtttgtcgcgttgttcgtgaaatctcacggcttaactgtgagcgtgcgggcgatacgggcagactagagtactgcaggggagactggaattcctggtgtagcggtggaatgcgcagatatcaggaggaacaccggtggcgaaggcgggtctctgggcagtaactgacgctgaggagcgaaagcgtggggagcgaacaggattagataccctggtagtccacgccgtaaacggtgggtactaggtgtgggtttccttccttgggatccgtgccgtagctaacgcattaagtaccccgcctggggagtacggccgcaaggctaaaactcaaaggaattgacgggggcccgcacaagcggcggagcatgtggattaattcgatgcaacgcgaagaaccttacctgggtttgacatgcacaggacgcgtctagagataggcgttcccttgtggcctgtgtgcaggtggtgcatggctgtcgtcagctcgtgtcgtgagatgttgggttaagtcccgcaacgagcgcaacccttgtctcatgttgccagcgggtaatgccggggactcgtgagagactgccggggtcaactcggaggaaggtggggatgacgtcaagtcatcatgccccttatgtccagggcttcacacatgctacaatggccggtacaaagggctgcgatgccgcaaggttaagcgaatccttttaaagccggtctcagttcggattggggtctgcaactcgaccccatgaagtcggagtcgctagtaatcgcagatcagcaacgctgcggtgaatacgttcccgggccttgtacacaccgcccgtcacgtcatgaaagtcggtaacacccgaagccagtggcctaacccttgggagggagctgtcgaaggtgggatcggcg

SEQ ID NO: 1307 - DNA, 1540 bp, Mycobacterium tuberculosis
tttgtttggagagtttgatcctggctcaggacgaacgctggcggcgtgcttaacacatgcaagtcgaacggaaaggtctcttcggagatactcgagtggcgaacgggtgagtaacacgtgggtgatctgccctgcacttcgggataagcctgggaaactgggtctaataccggataggaccacgggatgcatgtcttgtggtggaaagcgctttagcggtgtgggatgagcccgcggcctatcagcttgttggtggggtgacggcctaccaaggcgacgacgggtagccggcctgagagggtgtccggccacactgggactgagatacggcccagactcctacgggaggcagcagtggggaatattgcacaatgggcgcaagcctgatgcagcgacgccgcgtgggggatgacggccttcgggttgtaaacctctttcaccatcgacgaaggtccgggttctctcggattgacggtaggtggagaagaagcaccggccaactacgtgccagcagccgcggtaatacgtagggtgcgagcgttgtccggaattactgggcgtaaagagctcgtaggtggtttgtcgcgttgttcgtgaaatctcacggcttaactgtgagcgtgcgggcgatacgggcagactagagtactgcaggggagactggaattcctggtgtagcggtggaatgcgcagatatcaggaggaacaccggtggcgaaggcgggtctctgggcagtaactgacgctgaggagcgaaagcgtggggagcgaacaggattagataccctggtagtccacgccgtaaacggtgggtactaggtgtgggtttccttccttgggatccgtgccgtagctaacgcattaagtaccccgcctggggagtacggccgcaaggctaaaactcaaaggaattgacgggggcccgcacaagcggcggagcatgtggattaattcgatgcaacgcgaagaaccttacctgggtttgacatgcacaggacgcgtctagagataggcgttcccttgtggcctgtgtgcaggtggtgcatggctgtcgtcagctcgtgtcgtgagatgttgggttaagtcccgcaacgagcgcaacccttgtctcatgttgccagcacgtaatggtggggactcgtgagagactgccggggtcaactcggaggaaggtggggatgacgtcaagtcatcatgccccttatgtccagggcttcacacatgctacaatggccggtacaaagggctgcgatgccgcgaggttaagcgaatccttaaaagccggtctcagttcggatcggggtctgcaactcgaccccgtgaagtcggagtcgctagtaatcgcagatcagcaacgctgcggtgaatacgttcccgggccttgtacacaccgcccgtcacgtcatgaaagtcggtaacacccgaagccagtggcctaaccctcgggagggagctgtcgaaggtgggatcggcgattgggacgaagtcgtaacaaggtagccgtaccggaaggtgcggctggatcacctcctttctaagg

SEQ ID NO: 1308 - DNA, 1475 bp, Mycobacterium ulcerans
ctggcggcgtgcttaacacatgcaagtcgaacggaaaggtctcttcggagatactcgagtggcgaacgggtgagtaacacgtgggcgatctgccctgcacttcgggataagcctgggaaactgggtctaataccggataggaccacgggattcatgtcctgtggtggaaagcttttgcggtgtgggatgggcccgcggcctatcagcttgttggtggggtaacggcctaccaaggcgacgacgggtagccggcctgagagggtgtccggccacactgggactgagatacggcccagactcctacgggaggcagcagtggggaatattgcacaatgggcgcaagcctgatgcagcgacgccgcgtgggggatgacggccttcgggttgtaaacctctttcaccatcgacgaaggttcgggttttctcggattgacggtaggtggagaagaagcaccggccaactacgtgccagcagccgcggtaatacgtagggtgcgagcgttgtccggaattactgggcgtaaagagctcgtaggtggtttgtcgcgttgttcgtgaaatctcacggcttaactgtgagcgtgcgggcgatacgggcagactagagtactgcaggggagactggaattcctggtgtagcggtggaatgcgcagatatcaggaggaacaccggtggcgaaggcgggtctctgggcagtaactgacgctgaggagcgaaagcgtggggagcgaacaggattagataccctggtagtccacgccgtaaacggtgggtactaggtgtgggtttccttccttgggatccgtgccgtagctaacgcattaagtaccccgcctggggagtacggccgcaaggctaaaactcaaaggaattgacgggggcccgcacaagcggcggagcatgtggattaattcgatgcaacgcgaagaaccttacctgggtttgacatgcacaggacgcgtctagagataggcgttcccttgtggcctgtgtgcaggtggtgcatggctgtcgtcagctcgtgtcgtgagatgttgggttaagtcccgcaacgagcgcaacccttgtctcatgttgccagcacgtaatggtggggactcgtgagagactgccggggtcaactcggaggaaggtggggatgacgtcaagtcatcatgccccttatgtccagggcttcacacatgctacaatggccggtgcaaagggctgcgatgccgcgaggttaagcgaatcctttaacgccggtctcagttcggatcggggtctgcaactcgaccccgtgaagtcggagtcgctagtaatcgcagatcagcaacgctgcggtgaatacgttcccgggccttgtacacaccgcccgtcacgtcatgaaagtcggtaacacccgaagccagtggcctaaccctttgggagggagctgtcgaaggtgggatcggcgattgggacgaagtcgtaacaaggtagccgtaccggaagg

SEQ ID NO: 1309 - DNA, 1471 bp, Mycobacterium vulneris
gttcaggacgaacgctggcggcgtgcttaacacatgcaagtcgaacggaaaggcctcttcggaggtactcgagtggcgaacgggtgagtaacacgtgggcaatctgccctgcacttcgggataagcctgggaaactgggtctaataccggataggacctttagacgcatgtcttttggtggaaagcttttgcggtgtgggatgggcccgcggcctatcagcttgttggtggggtgacggcctaccaaggcgacgacgggtagccggcctgagagggtgtccggccacactgggactgagatacggcccagactcctacgggaggcagcagtggggaatattgcacaatgggcgcaagcctgatgcagcgacgccgcgtgggggatgacggccttcgggttgtaaacctctttcaccatcgacgaaggttcgggttttctcggattgacggtaggtggagaagaagcaccggccaactacgtgccagcagccgcggtaatacgtagggtgcgagcgttgtccggaattactgggcgtaaagagctcgtaggtggtttgtcgcgttgttcgtgaaatctcacggcttaactgtgagcgtgcgggcgatacgggcagactagagtactgcaggggagactggaattcctggtgtagcggtggaatgcgcagatatcaggaggaacaccggtggcgaaggcgggtctctgggcagtaactgacgctgaggagcgaaagcgtggggagcgaacaggattagataccctggtagtccacgccgtaaacggtgggtactaggtgtgggtttccttccttgggatccgtgccgtagctaacgcattaagtaccccgcctggggagtacggccgcaaggctaaaactcaaaggaattgacgggggcccgcacaagcggcggagcatgtggattaattcgatgcaacgcgaagaaccttacctgggtttgacatgcacaggacgcgtctagagataggcgttcccttgtggcctgtgtgcaggtggtgcatggctgtcgtcagctcgtgtcgtgagatgttgggttaagtcccgcaacgagcgcaacccttgtctcatgttgccagcgggtaatgccggggactcgtgagagactgccggggtcaactcggaggaaggtggggatgacgtcaagtcatcatgccccttatgtccagggcttcacacatgctacaatggccggtacaaagggctgcgatgccgcaaggttaagcgaatccttttaaagccggtctcagttcggattggggtctgcaactcgaccccatgaagtcggagtcgctagtaatcgcagatcagcaacgctgcggtgaatacgttcccgggccttgtacacaccgcccgtcacgtcatgaaagtcggtaacacccgaagccagtggcctaaccttttggagggagctgtcgaaggtgggatcggcgattgggacgaagtcgtaacaa

SEQ ID NO: 1310 - DNA, 1346 bp, Mycoplasma agalactiae
gatgaacgctggctgtgtgcctaatacatgcatgtcgagcgatgatagcaatatcatagcggcgaatgggtgagtaacacgtactcaacgtaccttttagattgggatagcggatggaaacatccgataataccgaatacttattatttttgcatgaaagtaatataaaaggaagcgtttgcttcgctagaagatcggagtgcgcaacattagctagttggtgaggtaacggcccaccaaggcgatgatgtttagcggggttgagagattgatccgccacactgggactgagatacggcccagactcctacgggaggcagcagtagggaatattccacaatggacgaaagtctgatggagcgacacagcgtgcaggatgaaggccctatgggttgtaaactgctgtggttagggaagaaaaagtagcgtaggaaatgacgctaccttgacggtacctgattagaaagcaacggctaactatgtgccagcagccgcggtaatacataggttgcaagcgttatccgaaattattgggcgtaaagcgtctgtaggttgtttgttaagtctggcgttaaattttggggctcaaccccaaaacgcgttggatactggcagactagagttatgtagaggttagcggaattccttgtgaagcggtgaaatgcgtagatataaggaagaacatcaatatggcgaaggcagctaactgggcatacactgacactgagagacgaaagcgtggggagcaaacaggattagataccctggtagtccacgccctaaacgatgatcattagttgatggggaactcatcgacgcagctaacgcattaaatgatccgcctgagtagtacgttcgcaagaataaaacttaaaggaattgacggggatccgcacaagcggtggagcatgtggtttaatttgaagatacgcgtagaaccttacccactcttgacatcttctgcaaagctatggagacatagtggaggttaacagaatgacagatggtgcatggttgtcgtcagctcgtgtcgtgagatgttcggttaagtcctgcaacgagcgcaacccttatccttagttactaccatttagttgagcactctaaggagactgcccgagtaatcgggaggaaggtggggacgacgtcaaatcatcatgcctcttacgagtggggctacacacgtgctacaatggacggtacaaagagaagcgaagtggtgacatggagcaaacctcaaaaaaccgttctcagttcggattgaagtctgcaactcgacttcatgaagtcggaatcgctagtaatcgtagatcagctacgctacggtgaatacgttctcgggtctt

SEQ ID NO: 1311 - DNA, 1339 bp, Mycoplasma amphoriforme
ttgatcctggctcaggattaacgctggcggcatgcctaatacatgcaagtcgatcgagaggcgaacgggtgagtaacacgtatccaatttaccccatagcggggataactagtcgaaagattagctaataccgcataactaaagttactatgggataagggtgcggcatatcagctagttggtgaggtaacggcccaccaaggcaatgacgtgtagttatgctgagaggtagaataaccacaatggaactgagacacggtccatactcctacgggaggcagcagtagggaatttttcacaatggacgaaagtctgatggagcaatgccgcgtgaacgatgaaggtcttgtgattgtaaagttcttttatttaggaagatgaccgtactatttgaataagtaacgactaactatgtgccagcagtcgcggtaatacataggttgcaagcgttatccggatttattgggcgtaaaacaagcgcaggcggattagaaagtctggtgttaaaatcactgcttaacggttgaatgcattggaaacttctagtctagagtgtggtagagagttctggaactccatgtggagcggtggaatgcgtagatatatggaagaacaccagctgcgaaggcgagaacttaggccaactgacgcttaggcttgaaagtgtggggagcaaataggattagataccctagtagtccacaccgtaaacgatggatgttaaacgtcggggcctcggtgttgcagttaacacattaaacatcctgcctgggtagtacattcgcaagaatgaaactcaaaggaattgacggggacccgcacaagtggtggagcatgttgcttaattcgacggtacacgaaaaaccttacctagacttgacatcgacaggtggtgcatggttgtcgtcagctcgtgtcgtgagatgttgggttaagtccgcaacgcgcaacccttatcgttagttatctaacgagactgccaacgcaagttggaggaaggtggggatgacgtcaaatcatcatgccttatgtctagggctgcaaacgtgctacaatggccaacaaacagttaccaaaccgtaaggtggtgagtatctgcttggtctcagttcggatgagggctgcaattcgccctcagaagtcggaatcactagtaatcgcgaatcagctatgtcgcggtgaatacgttctcgggtcttgtacacaccgcccgtcaaactacgagagttgatagtgtctaaaaccgtgtgctaagcgcatgtctaggacaagattaatgattggagttaagtcgtaacaaggtacccctacgagaacgtgggggtggatcacctccttt

SEQ ID NO: 1312 - DNA, 1525 bp, Mycoplasma arthritidis
atatttttaagagtttgatcctggctcaggatgaacgctggctgtgtgcctaatacatgcatgtcgagcggaagtagcaatactttagcggcgaatgggtgagtaacacgtgcttaatctaccctttagactggaataactaatggaaacattggctaatgccggatgcgcatggaatcgcatgattccgttgtgaaaggagcctcaaagctccactagaggatgagggtgcggaacattagcttgttggtgaggtaacggcccaccaaggcaatgatgtttagccgggtcgagagactgaacggccacattgggactgagatacggcccaaactcctacgggaggcagcagtagggaatattccacaatgagcgaaagcttgatggagcgacacagcgtgcacgatgacggtcttcggattgtaaagtgctgttataggggaagaacacttagttgaggaaatgcttctaagctgacggtaccctgtcagaaagcgatggctaactatgtgccagcagccgcggtaatacataggtcgcaagcgttatccggaattattgggcgtaaagcgttcgtaggctgtttattaagtctggagttaaatcccagggctcaaccctggctcgctttggatactggtaaactagagttagatagaggtaagcggaattccatgtgaagcggtgaaatgcgtagatatatggaagaacaccaaaggcgaaggcagcttgctgggtctatactgacgctgagggacgaaagcgtggggagcaaacaggattagataccctggtagtccacgccgtaaacgatgatcattagtcggtggattaatcactgacgcagctaacgcattaaatgatccgcctgagtagtatgctcgcaagagtgaaacttaaaggaattgacggggacccgcacaagcggtggagcatgtggtttaatttgaagatacgcggagaaccttacccactcttgacatccttcgcaaagctatagagatatagtggaggttaacggagtgacagatggtgcatggttgtcgtcagctcgtgtcgtgagatgtttggtcaagtcctgcaacgagcgcaacccctatctttagttactaacgagtcatgtcgaggactctagagatactgcctgggtaactgggaggaaggtggggatgacgtcaaatcatcatgcctcttacgagtggggcaacacacgtgctacaatggtcggtacaaagagaagcaatatggcgacatggagcaaatctcaaaaagccgatctcagttcggattggagtctgcaattcgactccatgaagtcggaatcgctagtaatcgcagatcagctatgctgcggtgaatacgttctcgggtcttgtacacaccgcccgtcacaccatgggagctggtaatacccaaagtcggtttgctaacctcggaggcgactgcctaaggtaggactggtgactggggtgaagtcgtaacaaggtatccctacgagaacgtggggatggatcacctcctttct

SEQ ID NO: 1313 - DNA, 1474 bp, Mycoplasma bovoculi
ctcgctgtgtgcctaatacatgcatgttgaacggaatattttagcttgctaaaatatttagtagcgaatgggtgagtaacacgtacctaatctacctttaggttcgggataacttttggaaacaagagctaatacctgatatagtttattttcgcatgaagataaataaaaaggagcttcacggcttcgcctagaaatgagggtgcggaacattagttagttggtgaggtaatggctcaccaagacgatgatgtttagcggggccaagaggttgtaccgccacactgggactgagatacggcccagactcctacgggaggcagcagtaaggaattttccacaatgagcgaaagcttgatggagcgacacagcgtgcacgatgaagtctttagggatgtaaagtgctgttataaggaaagaaaaaattaaataggaaatgatttaatcttgacggtaccttattagaaagcgacggcaaactatgtgccagcagccgcggtaatacataggtcgcaagcgttatccggaattattgggcgtaaagcgtccgtaggtgttttgttaagtttaaggttaaatactgaagctcaacttcagcccgctttagatactggcaaaatagaattatgaagaggttagcggaattcctagtggagcggtggaatgcgtagatattaggaagaacaccaataggcgaaggcagctaactggtcataaattgacactaagggacgaaagcgtggggagcaaacaggattagataccctggtagtccacgctgtaaacgatgatcattagttggtggtaataatcactagcacagctaacgcgataaatgatccgcctgagtagtatgctcgcaagagtgaaacttaaaggaattgacgggaacccgcacaagcggtggagcatgtggtttaatttgaagatacgcggagaaccttacccactcttgacatccttgcaaagctatagagatatagtagaggttaacaagatgacagatggtgcatggttgtcgtcagctcgtgtcgtgagatgttaggttaagtcctgcaacgagcgcaacccctttctttagttactaacattaagttgaggactctagagacactgccagcgtaagctggaggaaggtggggatgacgtcaaatcatcatgcctcttacgagtggggcaacacacgtgctacaatggctactacaaagagaagcaaaacggtgacgtccagcaaatctcaaaaaagtagtcccagttcggattgaagtctgcaactcgacttcatgaagtcggaatcgctagtaatcgcaggtcagctatactgcggtgaatacgttctcgggttttgtacacaccgcccgtcacaccatgggagttggtaatacccaaagtcggttagttaacttcggagactgctgcctaaggtaggactgatgactggggtgaagtcgtaacaaggtatccctacgagaac

SEQ ID NO: 1314 - DNA, 1459 bp, Mycoplasma faucium
ctggctgtgtgcctaatacatgcatgtcgagcggaagtagcaatactttagcggcgaatgggtgagtaacacgtgcttaatctaccttttagattggaatacctaatggaaacattggttaatgccggatacgcatgaaatcgcatgatttcgttgtgaaaggagcgtttgctccgctaaaagatgagggtgcggaacattagctagttggtgaggtaatggcccaccaaggctatgatgtttagccgggtcgagagactgaacggccacattgggactgagatacggcccaaactcctacgggaggcagcagtagggaatattccacaatgagcgaaagcttgatggagcgacacagcgtgcacgatgaaggccctcgggttgtaaagtgctgttgcaagggaagaacacttagttgaggaaatgcaactaagctgacggtaccttgttagaaagcgatggctaactatgtgccagcagccgcggtaatacataggtcgcaagcgttatccggaattattgggcgtaaagcgttcgtaggctgtttattaagtctggagtcaaatcccagggctcaaccctggctcgctttggatactggtaaactagagttggatagaggtaagcggaattccatgtgaagcggtgaaatgcgtagatatatggaagaacaccaaaggcgaaggcagcttactgggtctatactgacgctgagggacgaaagcgtggggagcaaacaggattagataccctggtagtccacgccgtaaacgatgatcattagtcggtgggagccactgacgcagctaacgcattaaatgatccgcctgagtagtatgctcgcaagagtgaaacttaaaggaattgacggggacccgcacaagcggtggagcatgtggtttaatttgaagatacgcggagaaccttacccactcttgacatcctttgcaaagctatagagatatagtggaggttaacagagtgacagatggtgcatggttgtcgtcagctcgtgtcgtgagatgtttggtcaagtcctgcaacgagcgcaacccctatctttagttactaacgagtcatgttgaggactctagagatactgcctgggtaactgggaggaaggtggggatgacgtcaaatcatcatgcctcttacgagtggggcaacacacgtgctacaatggtcggtacaaagagacgcaatacggtgacgtggagcaaatctcaaaaagccgatctcagttcggattgaagtctgcaattcgacttcatgaagtcggaatcgctagtaatcgcagatcagctatgctgcggtgaatacgttctcgggtcttgtacacaccgcccgtcacaccatgggagctggtaatacccaaagtcggtttgctaacctcggaggcgactgcctaaggtaggactggtgactggggtgaagtcgtaacaaggtatccctacgagaa

SEQ ID NO: 1315 - DNA, 1517 bp, Mycoplasma fermentans
attttttcgagagtttgatcctggctcaggatgaacgctggctgtgtgcctaatacatgcatgtcgagcgaaggtagcaataccttagcggcgaatgggtgagtaacacgtgctcaacgtacccttcagtttggcatagcgactggaaacagtcgataatttcaaatactcgtagttttcgcatgaagattacggaaaagaagcgtttgcttcgctggaggagcggggtgcgtaacattagctagttggtgaggtaacggcccaccaaggcgatgatgtttagcggggttgagagactgaaccgccacactgggactgagatacggcccagactcctacgggaggcagcagtagggaatattccacaatgggcgaaagcctgatggagcgacacagcgtgaaggatgaaggtcctatggattgtaaacttctgtggtaagggaagaaaagacagaataggaaatgattttgttttgacggtaccttattagaaagcaacggctaactatgtgccagcagccgcggtaatacataggttgcaagcgttatccggaattattgggcgtaaagcgtctgtaggttgtttgttaagtctggcgttaaattttggggctcaaccccaaaacgcgttggatactggcaggctagagttgtgtagaggttagcggaattccttgtgaagcggtgaaatgcgtagatataaggaagaacaccaagatggcgaaggcagctaactggacatatactgacactgagagacgaaagcgtggggagcaaacaggattagataccctggtagtccacgccctaaacgatgatcattagctgatggggaactcatcggcgcagctaacgcattaaatgatccgcctgagtagtacgttcgcaagaataaaacttaaaggaattgacggggatccgcacaagcggtggagcatgtggtttaatttgaagatacgcgtagaaccttacccactcttgacatcttctgcaaagctatggagacatagtggaggttaacagaatgacagatggtgcatggttgtcgtcagctcgtgtcgtgagatgtttggttaagtcctgcaacgagcgcaacccttatccttagttactaccattcagttgaggactctaaggagactgcccgagtaatcgggaggaaggtggggatgacgtcaaatcatcatgcctcttacgagtggggcaacacacgtgctacaatggccggtacaaagagaagcgaagtggtgacatggagcaaacctcaaaaaaccggtctcagttcggattgtagtctgcaactcgactacatgaagtcggaatcgctagtaatcgtagatcagctacgctacggtgaatacgttctcgggtcttgtacacaccgcccgtcaaaccatgggagctggtaatgcccgaagtcggtttataaacaaactgcctaaggcaggactggtgactggggttaagtcgtaacaaggtatccctacgagaacgtggggatggatcacctcctttct

SEQ ID NO: 1316 - DNA, 1545 bp, Mycoplasma flocculare
gcaatcatgagagtttgatcctagctcaggatgaacgctagctgtgtgcttaatacatgcatttgaacgggatagtattttagttttactaaagtattgttttagtagcaaatgggtgagtaacacgtacctaacctaccttttggactgggataaccattggaaacagtggctaataccggatataataaaaattcacatgaatttttatgaaaaggagcgaaaataagctccaccaaaaaatgggggtgcgcaacattagttagttggtagggtaaaggcctaccaagacgatgatgtttagcggggccaagaggttgtaccgccacactgggattgagatacggcccagactcctacgggaggcagcagtaaggaatattccacaatgagcgaaagcttgatggagcgacacagcgtgcaggatgaagtctttaggtatgtaaactgctgttgtaagggaagaaaaaaattaggtagggaatgatctaatcttgacggtaccttactagaaagcgacggcaaactatgtgccagcagccgcggtaatacataggtcgcaagcgttatccggaattattgggcgtaaagcgttcgtaggttttttgttaagtttaaggttaaatgctaaagctcaactttagtccgctttagatactggcaaaatagaattatgaagaggttagcggaattcctagtggagtggtggaatacgtagatattaggaagaacaccaataggcgaaggcagctaactggtcatatattgacactgagggacgaaagcgtggggagcaaacaggattagataccctggtagtccacgccgtaaacgatgatcattagttggtggcagaagtcactagcgcagctaacgcgttaaatgatccgcctgagtagtatgctcgcaagagtgaaacttaaaggaattgacgggaacccgcacaagcggtggagcatgtggtttaatttgaggatacgcgtagaaccttacccactcttgacattctcgcaaaactatagagatatagcggaggctaacgagattacagatggtgcatggttgtcgtcagctcgtgtcgtgagatgttaggttaagtcctgcaacgagcgcaacccttttctttagttgctaacattaagttgagaaccctagagatactgccggtgtaaaccggaggaaggtggggatgacgtcaaatcatcatgcctcttacgagtggggcaacacacgtgctacaatggctactacaaagagcagcaaaacagtgatgtcaagctaatctcaaaaaagtagtctcagttcggattgaagtctgcaactcgacttcatgaagtcggaatcgctagtaatcgcaggtcagctatactgcggtgaatacgttctcgggttttgtacacaccgcccgtcacaccatgggagttggtaatgcccaaagtcggtgagttaacctcggagaccattgcctaaggcaggaccgatgactggggtgaagtcgtaacaaggtatccctacgagaacgtggggatggaacacctcctttct

SEQ ID NO: 1317 - DNA, 1521 bp, Mycoplasma genitalium
ttttttctgagagtttgatcctggctcaggattaacgctggcggcatgcctaatacatgcaagtcgatcggaagtagcaatactttagaggcgaacgggtgagtaacacgtatccaatctaccttataatgggggataactagttgaaaaactagctaataccgcataagaactttagttcgcatgaattaaagttgaaaggacctgcaagggttcgttatttgatgagggtgcgccatatcagctagttggtagggtaatggcctaccaaggcaatgacgtgtagctatgctgagaagtagaatagccacaatgggactgagacacggcccatactcctacgggaggcagcagtagggaatttttcacaatgagcgaaagcttgatggagcaatgccgcgtgaacgatgaaggtctttttgattgtaaagttcttttatttgggaagaatgactctagcaggcaatggctggagtttgactgtaccactttgaataagtgacgactaactatgtgccagcagtcgcggtaatacataggtcgcaagcgttatccggatttattgggcgtaaagcaagcgcaggcggattgaaaagtctggtgttaaaggcagctgcttaacagttgtatgcattggaaactatcagtctagagtgtggtagggagttttggaatttcatgtggagcggtgaaatgcgtagatatatgaaggaacaccagtggcgaaggcgaaaacttaggccattactgacgcttaggcttgaaagtgtggggagcaaataggattagataccctagtagtccacaccgtaaacgatagatactagctgtcggagcgatcccttcggtagtgaagttaacacattaagtatctcgcctgggtagtacattcgcaagaatgaaactcaaacggaattgacggggacccgcacaagtggtggagcatgttgcttaattcgacggtacacgaaaaaccttacctagacttgacatccttggcaaagttatggaaacataatggaggttaaccgagtgacaggtggtgcatggttgtcgtcagctcgtgtcgtgagatgttgggttaagtcccgcaacgagcgcaacccttatcgttagttacattgtttaacgagactgctaatgtaaattggaggaaggaagggatgacgtcaaatcatcatgccccttatgtctagggctgcaaacgtgctacaatggccaatacaaacagtagccaacttgtaaaagtgagcaaatctgaaaagttggtctcagttcggattgagggctgcaattcgtcctcatgaagctggaatcactagtaatcgcgaatcagctatgtcgcggtgaatacgttctcgggtcttgtacacaccgcccgtcaaactatgaaagctggtaatatttaaaaacgtgttgctaacctttattggaagcgcatgtcaaggatagcaccggtgattggagttaagtcgtaacaaggtacccctacgagaacgtgggggtggatcacctcctttc

SEQ ID NO: 1318 - DNA, 1521 bp, Mycoplasma hominis
tttttataagagtttgatcctggctcaggatgaacgctggctgtgtgcctaatacatgcatgtcgagcgaggttagcaataacctagcggcgaatgggtgagtaacacgtgcttaatctaccttttagattggaatacccattggaaacaatggctaatgccggatacgcatggaaccgcatggttccgttgtgaaaggcgctgtaaggcgccactaaaagatgagggtgcggaacattagttagttggtgaggtaatggcccaccaagactatgatgtttagccgggtcgagagactgaacggccacattgggactgagatacggcccaaactcctacgggaggcagcagtagggaatattccacaatgagcgaaagcttgatggagcgacacagcgtgcacgatgaaggtcttcggattgtaaagtgctgttataagggaagaacatttgcaataggaaatgattgcagactgacggtaccttgtcagaaagcgatggctaactatgtgccagcagccgcggtaatacataggtcgcaagcgttatccggaattattgggcgtaaagcgttcgtaggctgtttgttaagtctggagttaaatcccggggctcaaccccggctcgctttggatactagcaaactagagttagatagaggtaagcggaattccatgtgaagcggtgaaatgcgtagatatatggaagaacaccaaaggcgaaggcagcttactgggtctatactgacgctgagggacgaaagcgtggggagcaaacaggattagataccctggtagtccacgccgtaaacgatgatcattagtcggtggagaatcactgacgcagctaacgcattaaatgatccgcctgagtagtatgctcgcaagagtgaaacttaaaggaattgacggggacccgcacaagcggtggagcatgtggtttaatttgaagatacacggaaaaccttacccactcttgacatccttcgcaaagctatagagatatagtggaggttatcggagtgacagatggtgcatggttgtcgtcagctcgtgtcgtgagatgtttggtcaagtcctgcaacgagcgcaacccctatctttagttactaacattaagttgaggactctagagatactgcctgggtaactgggaggaaggtggggatgacgtcaaatcatcatgcctcttacgagtggggccacacacgtgctacaatggtcggtacaaagagaagcaatatggcgacatggagcaaatctcaaaaagccgatctcagttcggattggagtctgcaattcgactccatgaagtcggaatcgctagtaatcgcagatcagctatgctgcggtgaatacgttctcgggtcttgtacacaccgcccgtcacaccatgggagctggtaatacccaaagtcggtttgctaacctcggaggcgaccgcctaaggtaggactggtgactggggtgaagtcgtaacaaggtatccctacgagaacgtggggatggatcacctcctttct

SEQ ID NO: 1319 - DNA, 1510 bp, Mycoplasma orale
agagtttgatcctggctcaggatgaacgctggctgtgtgcctaatacatgcatgtcgagcggaagtagcaatactttagcggcgaatgggtgagtaacacgtgcttaatctaccttttagattggaatacctaatggaaacattggttaatgccggatacgcatgaagtcgcatgacttcgttgtgaaaggagcgtttgctccgctaagagatgagggtgcggaacattagctagttggtgaggtaatggcccaccaaggctatgatgtttagccgggtcgagagactgaacggccacattgggactgagatacggcccaaactcctacgggaggcagcagtagggaatattccacaatgagcgaaagcttgatggagcgacacagcgtgcacgatgaaggccctcgggttgtaaagtgctgttgcaagggaagaacagttagttgaggaaatgcttctaatctgacggtaccttgttagaaagcgacggctaactatgtgccagcagccgcggtaatacataggtcgcaagcgttatccggaattattgggcgtaaagcgttcgtaggctgtttattaagtctggagtcaaatcccagggctcaaccctggctcgctttggatactggtaaactagagttagatagaggtaagcggaattccatgtggagcggtgaaatgcgtagatatatggaagaacaccaaaggcgaaggcagcttactgggtctatactgacgctgagggacgaaagcgtggggagcaaacaggattagataccctggtagtccacgctgtaaacgatgatcattagtcggtggaaaactactgacgcagctaacgcattaaatgatccgcctgagtagtatgctcgcaagagtgaaacttaaaggaattgacggggacccgcacaagcggtggagcatgtggtttaatttgaagatacgcggagaaccttacccactcttgacatcccctgcaaagctatagagatatagtagaggttaacagggtgacagatggtgcatggttgtcgtcagctcgtgtcgtgagatgtttggtcaagtcctgcaacgagcgcaacccctatctttagttactaacgagtcatgtcgaggactctagagatactgcctgggtaaccgggaggaaggtggggatgacgtcaaatcatcatgcctcttacgagtggggctacacacgtgctacaatggtcggtacaaagagaagcaatatggcgacatggagcaaatctcaaaaagccgatctcagttcggattgaagtctgcaattcgacttcatgaagtcggaatcgctagtaatcgcagatcagctacgctgcggtgaatacgttctcgggtcttgtacacaccgcccgtcacaccatgggagctggtaatacccaaagtcggtttgctaacctcggaggcgactgcctaaggtaggactggtgactggggtgaagtcgtaacaaggtatccctacgagaacgtgcggctggatcacctcctt

SEQ ID NO: 1320 - DNA, 1475 bp, Mycoplasma ovipneumoniae
ctatctgtgtgcttaatacatgcatgttgaacggaatatgttagcttgctaatatatttagtagcaaatgggtgagtaacacgtacctaacctaccttttggaccgggataaccattggaaacagcggctaataccagatacgataaaaaaatgcatgtttttttattaaaagaagcctttaaagcttcaccaaaaaatgggggtgcgcaacattagttagttggtagggtaaaggcctaccaagacgatgatgtttagcggggccaagaggctgtaccgccacactgggattgagatacggcccagactcctacgggaggcagcagtaaggaatattccacaatgagcgaaagcttgatggagcgacacagagtgcaggatgaagtctttagggatgtaaactgctgttgtaagggaagaaaaaactagataggaaatgatttagtcttgacggtaccttattagaaagtgacggcaaactatgtgccagcagccgcggtaatacataggtcgcaagcgttatccggaattattgggcgtaaagcgtccgcaggttttttgttaagtttaaggttaaatgctaaagctcaactttagttcgctttagatactgacaaaatagaattatgaagaggttagcggaattcctagtggagcggtggaatgcgtagatattaggaagaacaccaataggcgaaggcagctaactggtcatatattgacactaatggacgaaagcgtggggagcaaacaggattagataccctggtagtccacgccgtaaacgatgatcattagttggtggcaaaagtcactagcacagctaacgcgttaaatgatccgcctgagtagtatgctcgcaagagtgaaacttaaaggaattgacgggaacccgcacaagcggtggagcatgtggtttaatttgaagatacgcgtagaaccttacccactcttgacatcctcgcaaaactatagagatatagcggaggctaacgagatgacagatggtgcatggttgtcgtcagctcgtgtcgtgagatgttaggttaagtcctgcaacgagcgcaacccttttctttagttgctaacattaagttgagaaccctagagatactgccggtgcaaaccggaggaaggcggggatgacgtcaaatcatcatgcctcttacgagtggggcaacacacgtgctacaatggctactacaaagagcagcgaaacagtgatgtcaagctaatctcaaaaaagtagtctcagttcggattgaagtctgcaactcgacttcatgaagtcggaatcgctagtaatcgcaggtcagctatactgcggtgaatacgttctcgggttttgtacacaccgcccgtcacaccatgggagttggtaatgcccaaagtcggtgagttaacctcggagaccattacctaaggcaggaccgatgactggggtgaagtcgtaacaaggtatccctacgagaac

SEQ ID NO: 1321 - DNA, 1516 bp, Mycoplasma penetrans
tcaattttaagagtttgatcctggctcaggattaacgctagcgggatgcctaatacatgcaagtcggacgaagcacttgtgcttagtggcgaacgggtgagtaacacgtatctaacataccttttagtgggggataactggttgaaaaactagctaataccgcataggacattactatcgcatgagaaaatgtttaaagttgcgtttgcaacgctttaagattgaggtgtggcatatcagatagttggtagggtaacggcctaccaagtctatgacgtgtagctgtgctgagaggcaaaacagccacaatggaactgagacacggtccatacttctacgggaggcagcagtagggaatttttcacaatgggcgcaagcctgatggagcaatcccgcgtgaacgacgaaggttttttaaattgtaaagttcttttattggggacgaattgtaagaagaggaaatgctttttatttgactgtaccctttgaataagtatcggctaactatgtgccagcagccgcggtaatacataggatgcaagcgttatccggatttactgggcgtaaagcgagcgcaggcggatttacaagtctggtgttaaatatagctgcccaacagttatatgcattggaaactgtaagtctagagtgcagtagagagttttggaactccatgtggagcggtggaatgcgtagatatatggaagaacaccagaggcgaaggcgaaaacttaggctgttactgacgcttaggctcgaaagtgtggggagcaaataggattagataccctagtagtccacaccgtaaacgatggtaattaaatcttggtacgggatgtatcaggattgcagttaacacattaaattacccgcctgggtagtacattcgcaagaatgaaactcaaacggaattgacggggacccgcacaagtggtggagcatgttgcttaattcgacgatacacgtaaaaccttacctgggtttgacatcctctgcaaagctatagagatatagtggaggttaacagagtgacaggtggtgcatggttgtcgtcagctcgtgtcgtgagatgttgggttaagtcccgcaacgagcgcaacccttatcgttagttacttcatctagcgagactgccagcgtaagctggaggaaggtggggatgacgtcaaatcatcatgccctttatatccagggccgcaaacgtgctacaatggtcggtacaaactgttgccaatcagcaatgaggagctaatcagagaaagccgatctcagttcggatcgagggctgcaattcgtcctcgtgaagttggaatcactagtaatcgcaaatcagccatgttgcggtgaatacgttctcgggtcttgtacacaccgcccgtcaaactatgagagctggtaatacctaaaaccgttaagctaacctcgtgaggcttgcgtctagggtaggactggtaattggagttaagtcgtaacaaggtacccctacgggaatgtgggggtggatcacctcctttct

SEQ ID NO: 1322 - DNA, 1559 bp, Mycoplasma pneumoniae
tgttctttcaaaactggatgcaatctgtcaatttttctgagagtttgatcctggctcaggattaacgctggcggcatgcctaatacatgcaagtcgatcgaaagtagtaatactttagaggcgaacgggtgagtaacacgtatccaatctaccttataatgggggataactagttgaaagactagctaataccgcataagaactttggttcgcatgaatcaaagttgaaaggacctgcaagggttcgttatttgatgagggtgcgccatatcagctagttggtggggtaacggcctaccaaggcaatgacgtgtagctatgctgagaagtagaatagccacaatgggactgagacacggcccatactcctacgggaggcagcagtagggaatttttcacaatgagcgaaagcttgatggagcaatgccgcgtgaacgatgaaggtctttaagattgtaaagttcttttatttgggaagaatgactttagcaggtaatggctagagtttgactgtaccattttgaataagtgacgactaactatgtgccagcagtcgcggtaatacataggtcgcaagcgttatccggatttattgggcgtaaagcaagcgcaggcggattgaaaagtctggtgttaaaggcagctgcttaacagttgtatgcattggaaactattaatctagagtgtggtagggagttttggaatttcatgtggagcggtgaaatgcgtagatatatgaaggaacaccagtggcgaaggcgaaaacttaggccattactgacgcttaggcttgaaagtgtggggagcaaataggattagataccctagtagtccacaccgtaaacgatagatactagctgtcggggcgatcccctcggtagtgaagttaacacattaagtatctcgcctgggtagtacattcgcaagaatgaaactcaaacggaattgacggggacccgcacaagtggtggagcatgttgcttaattcgacggtacacgaaaaaccttacctagacttgacatccttggcaaagttatggaaacataatggaggttaaccgagtgacaggtggtgcatggttgtcgtcagctcgtgtcgtgagatgttgggttaagtcccgcaacgagcgcaacccttatcgttagttacattgtctagcgagactgctaatgcaaattggaggaaggaagggatgacgtcaaatcatcatgccccttatgtctagggctgcaaacgtgctacaatggccaatacaaacagtcgccagcttgtaaaagtgagcaaatctgtaaagttggtctcagttcggattgagggctgcaattcgtcctcatgaagtcggaatcactagtaatcgcgaatcagctatgtcgcggtgaatacgttctcgggtcttgtacacaccgcccgtcaaactatgaaagctggtaatatttaaaaacgtgttgctaaccattaggaagcgcatgtcaaggatagcaccggtgattggagttaagtcgtaacaaggtacccctacgagaacgtgggggtggatcacctcctttctaatggagtt

SEQ ID NO: 1323 - DNA, 1466 bp, Mycoplasma putrefaciens
ctggcggcatgcctaatacatgcaagtcgaacgggggtgcttgcaccccagtggcgaacgggtgagtaacacgtatctaacctaccttatagcgggggataacttttggaaacgaaagataataccgcatgtgaatcttattatcgcatgagaaaagattgaaagaaccgtttggttcactatgagatggggatgcggcgtattagctagtaggtgaggtaatggctcacctaggcgatgatacgtagccgaactgagaggttgatcggccacattgggactgagatacggcccagactcctacgggaggcagcagtagggaatttttcacaatggacgaaagtctgatgaagcaatgccgcgtgagtgatgacggccttcgggttgtaaagctctgttgtaagggaagaaaaaataaagtaggaaatgcctttatattgacggtaccttaccagaaagccacggctaactatgtgccagcagccgcggtaatacataggtggcaagcgttatccggatttattgggcgtatagggtgcgtaggcggttgtgcaagtttgaggttaaagtccggagctcaactccggttcgccttgaaaactgcattactagaatacaagagaggtaagcggaattccatgtgtagcggtgaaatgcgtagatatatggaagaacacctgtggcgaaagcggcttactggtttgttattgacgctgaggcacgaaagcgtggggagcaaataggattagataccctagtagtccacgccgtaaacgatgagtactaggtgttgggtgaactcagcgccgcagctaacgcattaagtactccgcctgagtagtatgctcgcaagagtgaaactcaaaggaattgacggggacccgcacaagtggtggagcatgtggtttaattcgaagcaacacgaagaaccttaccagggcttgacatccagtgcaaagctatagagatatagtagaggttaacattgagacaggtggtgcatggttgtcgtcagttcgtgccgtgaggtgttgggttaagtcccgcaacgaacgcaacccttgtcgttagttactaacattaagttgaggactctaacgagactgctagtgtaagctagaggaaggtggggatgacgtcaaatcatcatgccccttatgtcctgggctacacacgtgctacaatggctggtacaaagagtcgcaatctcgcgagggggagctaatctcaaaaaaccagtctcagttcggattgaagtctgcaactcgacttcatgaagccggaatcactagtaatcgcgaatcagctatgtcgcggtgaatacgttctcgggtcttgtacacaccgcccgtcacaccacgagagttggtaataccagaagtgggtagcttaaccgcaaggagagcgcctcccaaggtaggactagcgattggggtgaagtcgtaacaaggtatccgtacgggaac

SEQ ID NO: 1324 - DNA, 1474 bp, Mycoplasma salivarium
  modified_base (152)..(152): a, c, t, g, unknown or other
  modified_base (188)..(188): a, c, t, g, unknown or other
  modified_base (329)..(330): a, c, t, g, unknown or other
  modified_base (486)..(486): a, c, t, g, unknown or other
  modified_base (541)..(541): a, c, t, g, unknown or other
  modified_base (553)..(554): a, c, t, g, unknown or other
  modified_base (760)..(760): a, c, t, g, unknown or other
  modified_base (890)..(891): a, c, t, g, unknown or other
  modified_base (896)..(952): a, c, t, g, unknown or other
  modified_base (1041)..(1041): a, c, t, g, unknown or other
  modified_base (1168)..(1168): a, c, t, g, unknown or other
  modified_base (1437)..(1437): a, c, t, g, unknown or other
  modified_base (1439)..(1439): a, c, t, g, unknown or other
  modified_base (1470)..(1470): a, c, t, g, unknown or other
aattttaagagtttgatcctggctcaggatgaacgctggctgtgtgcctaatacatgcatgtcgagcggaagtagcaatactttagcggcgaatgggtgagtaacacgtgcttaatctacctcttagattggaatacctaatggaaacattngttaatgccggatacgcatggagtcgcatgactccnttgtgaaaggggcctttaaagctccactaagagatgagggtgcggaacattagctagttggtgaggtaacggcccaccaaggctatgatgtttagccgggtcgagagactgaacggccacattgggactgagatacggccnnaactcctacgggaggcagcagtagggaatattccacaatgagcgaaagcttgatggagcgacacagcgtgcacgatgaaggtcttatggattgtaaagtgctgttgctagggaagaaaaagtagttgaggaaatgcttctacattgacggtacctngttagaaagcgatggctaactatgtgccagcagccgcggtaatacataggtcgcnagcgttatccgnnattattgggcgtaaagcgttcgtaggctgtttattaagtctggagtcaaatcccagggctcaaccctggctcgctttggatactggtaaactagagttggatagaggtaagcggaattccatgtgaagcggtgaaatgcgtagatatatggaagaacaccaaaggcgaaggcagcttactgggtttatactgacgctgaggaacgnaagcgtggggagcaaacaggattagataccctggtagtccacgccgtaaacgatgatcattagtcggcagagaactgttgacgcagctaacgcattaaatgatccgcctgagtagtatgctcgcaagagnnaaacnnnnnnnnnnnnnnnnnnnnnnnnnnnnnnnnnnnnnnnnnnnnnnnnnnnnnnnnntacgcggagaaccttacccactcttgacatccttcgcaaagctatagagatatagtggaggttaacggagtgacagatggtgcatggtngtcgtcagctcgtgtcgtgagatgtttggtcaagtcctgcaacgagcgcaacccctatctttagttactaacgagtcatgtcgaggactctagagatactgcctgggtaactgggaggaaggtgggnatgacgtcaaatcatcatgcctcttacgagtggggcaacacacgtgctacaatggtcggtacaaagagaagcaatatggcgacatggagcaaatctcaaaaagccgatctcagttcggattgaagtctgcaattcgacttcatgaagtcggaatcgctagtaatcgcagatcagctatgctgcggtgaatacgttctcgggtcttgtacacaccgcccgtcacaccatgggagctggtaatacccaaagtcggtttgctaaccgtccgngnaggcgactgcctaaggtaggactggtgactngggt

SEQ ID NO: 1325 - DNA, 1290 bp, Mycoplasmataceae sp.
  P1 oral clone MB1_G23
gattaacgctggcggtacgtctaatacatgcaagtcgaacgagtggcgaacgggtgagtaacacgtaggtaacctgcctacaagttggggataacacaaggaaacttgtgctaataccgaataattaaagctgcttgaagaggggcctgcggcgcattagttagttggtaaggtaatggcttaccaagacgatgatgcgtagctggactgagaggttgaacagccacattgggactgagaaacggcccagactcctacgggaggcagcagtagagaatcttcggcaatgggggaaaccctgaccgagcgataccgcgtgagtgatgaaatacttcggtatgtaaaattcttttattaaagaagatgacgttatttaatgaataagtcccggctaactatgtgccagcagccgcggtaatacataggggacgagcgttatccggaataattgggcgtaaagggtgcgtaggcggtgtgttaagttcaaggtttaatcgtagggctcaaccctatatcgctttgaaaactggcacactagagtaagatagaggcaagtggaattccatgtgtagcggtaaaatgcgtaaatatatggcagaacaccagaggcgaaggcggcttgctgggtctaccgacgctgaggcacgaaagcgtggggagcaaacaggattagataccctggtagtccacgccgtaaacgatgagcactaaaagtcgggttcggctttcaagttaacgcgataagtgctccgcctgagtagtacgtacgcaagtataaaactcaaaggaattggcgggacctcgcacaagcggtggatcatgttgtttaattcgttgatacgcgatgaaccttaccaggccttgacatatacaggtggtgcatggttgtcgtcagctcgtgtcgtgagatgttaggttaagtcctgcaacgagcgcaactcttattgctatttgccatcatgggcactatagtgagactgccagtgataaactggaggaaggtgggaatgacgtcaaatcatcatgccccttatggcctgggccacaaacgtgatacaatggttgtcaaaaggatgctagaaagtgattttaggcaaatccttacaatctcagttcggatgaagtctgcaactcgacttcagaagtcggaatcgctagtaatcgtagatcagaacgctacggtgaatacgttctcgaggtttgcacacaccgcccgtcaaaccacgaaagttaacaatacccaaaaccggtgcctaaggagccgtctaaggtagggttaatgattggggt

SEQ ID NO: 1326 - DNA, 1484 bp, Myroides odoratimimus
agcggcaggcctaacacatgcaagtcgaggggtagaaagagcttgcttttttgagaccggcgcacgggtgagtaacgcgtatgcaacctaccttatacaggggaatagcccgaagaaattcggattaatgctccatggtttatcgatatggcatcgtattgataataaagatttatcggtataagatgggcatgcgtatcattagctagttggtgtggtaacggcataccaaggcaacgatgattaggggtcctgagagggagatcccccacactggtactgagacacggaccagactcctacgggaggcagcagtgaggaatattggtcaatggaggcaactctgaaccagccatgccgcgtgcaggatgacggtcctatggattgtaaactgcttttgtacaggaagaaacctccctacgagtagggacttgacggtactgtaagaataaggatcggctaactccgtgccagcagccgcggtaatacggaggatccgagcgttatccggaattattgggtttaaagggttcgtaggcggctttgtaagtcagtggtgaaatttcctagcttaactaggacactgccattgatactgcagagcttgaataatatggaagtaactagaatatgtagtgtagcggtgaaatgcttagatattacatggaataccaattgcgaaggcaggttactacgtatttattgacgctgatgaacgaaagcgtggggagcgaacaggattagataccctggtagtccacgccgtaaacgatggatactagctgttcggttttcggactgagtggctaagcgaaagtgataagtatcccacctggggagtacgttcgcaagaatgaaactcaaaggaattgacgggggcccgcacaagcggtggagcatgtggtttaattcgatgatacgcgaggaaccttaccagggcttaaatgtagattgacagatttggaaacagatttttcttcggacaatttacaaggtgctgcatggttgtcgtcagctcgtgccgtgaggtgtcaggttaagtcctataacgagcgcaacccctattgttagttaccagcgcgtagaggcggggactctagcaagactgccggtgcaaaccgtgaggaaggtggggatgacgtcaaatcatcacggcccttacgtcctgggctacacacgtgctacaatggcaagtacagaaagcagctacctggcaacaggatgcgaatctccaaagcttgtctcagttcggattggagtctgcaactcgactctatgaagctggaatcgctagtaatcggatatcagccatgatccggtgaatacgttcccgggccttgtacacaccgcccgtcaagccatggaagctgggggtacctgaagtcggtgaccgcaaggagctgcctagggtaaaactagtaactagggctaagtcgtaacaaggtagccgtaccggaaggtgcggctggatcacctcctttcta

SEQ ID NO: 1327 - DNA, 1481 bp, Myroides sp.
  MY15
agagtttgatcctggctcaggatgaacgctagcggcaggcctaacacatgcaagtcgaggggtatattgagcttgcttaatagagaccggcgcacgggtgagtaacgcgtatgcaacctaccttctacaggggaatagcccgaagaaattcggattaatgctccatggtttaattgaatggcatcatttaattaataaagatttatcggtagaagatgggcatgcgtatcattagctagttggtgtggtaacggcataccaaggcgacgatgattaggggtcctgagagggagatcccccacactggtactgagacacggaccagactcctacgggaggcagcagtgaggaatattggtcaatggaggcaactctgaaccagccatgccgcgtgcaggatgacggtcctatggattgtaaactgcttttgtacaggaagaaacctcgctacgagtagcgatttgacggtactgtaagaataaggatcggctaactccgtgccagcagccgcggtaatacggaggatccgagcgttatccggaattattgggtttaaagggttcgtaggcggttggataagtcagtggtgaaatttcttagcttaactaagacccggccattgatactgtttgacttgaatagtatggaagtaactagaatatgtagtgtagcggtgaaatgcttagatattacatggaataccaattgcgaaggcagggttactacgtacttattgacgctgatgaacgaaagcgtggggagcgaacaggattagataccctggtagtccacgccgtaaacgatggatactagctgttcggttttcggactgagtggctaagcgaaagtgataagtatcccacctggggagtacgttcgcaagaatgaaactcaaaggaattgacgggggcccgcacaagcggtggagcatgtggtttaattcgatgatacgcgaggaaccttaccagggcttaaatgtagattgacaggtttggaaacagacttttcttcggacaatttacaaggtgctgcatggttgtcgtcagctcgtgccgtgaggtgtcaggttaagtcctataacgagcgcaacccctattgttagttaccatcgagtaatgtcgggaactctagcaagactgccggtgcaaaccgtgaggaaggtggggatgacgtcaaatcatcacggcccttacgtcctgggctacacacgtgctacaatggtcagtacagaaagcagctacctggcgacaggatgcgaatctcaaaagctgatcacagttcggattggagtctgcaactcgactccatgaagctggaatcgctagtaatcggatatcagccatgatccggtgaatacgttcccgggccttgtacacaccgcccgtcaagccatggaagctgggggtacctgaagtcggtgaccgcaaggagctgcctagggtaaaactagtaactagggctaagtcgtaacaaggtaacca

SEQ ID NO: 1328 - DNA, 1545 bp, Neisseria bacilliformis
ttgaacataagagtttgatcctggctcagattgaacgctggcggcatgctttacacatgcaagtcggacggcagcacagagaagcttgcttcttgggtggcgagtggcgaacgggtgagtaacgcatcggaacgtaccgagtaatgggggataactgtccgaaaggacagctaataccgcatacgccctgagggggaaagcgggggatcttaggacctcgcgttattcgagcggccgatgtctgattagctggttggcggggtaaaggcccaccaaggcgacgatcagtagcgggtctgagaggatgatccgccacactgggactgagacacggcccagactcctacgggaggcagcagtggggaattttggacaatgggcgcaagcctgatccagccatgccgcgtgtctgaagaaggccttcgggttgtaaaggacttttgtcagggaagaaaaggggcatgttaataccgtgctctgatgacggtacctgaagaataagcaccggctaactacgtgccagcagccgcggtaatacgtagggtgcgagcgttaatcggaattactgggcgtaaagcgggcgcagacggttacttaagcgggatgtgaaatccccgggctcaacccgggaactgcgttccgaactgggtggctagagtgtgtcagaggggggtagaattccacgtgtagcagtgaaatgcgtagagatgtggaggaataccgatggcgaaggcagccccctgggataacactgacgttcatgcccgaaagcgtgggtagcaaacaggattagataccctggtagtccacgccctaaacgatgtcgattagctgttggggcacttgatgccttagtagcgtagctaacgcgtgaaatcgaccgcctggggagtacggtcgcaagattaaaactcaaaggaattgacggggacccgcacaagcggtggatgatgtggattaattcgatgcaacgcgaagaaccttacctggtcttgacatgtacggaaccttccagagacggaagggtgccttcgggagccgtaacacaggtgctgcatggctgtcgtcagctcgtgtcgtgagatgttgggttaagtcccgcaacgagcgcaacccttgtcattagttgccatcatttggttgggcactctaatgagactgccggtgacaaaccggaggaaggtggggatgacgtcaagtcctcatggcccttatgaccagggcttcacacgtcatacaatggtcggtacagagggtagccaagccgcgaggcggagccaatcccagaaaaccgatcgtagtccggattgcactctgcaactcgagtgcatgaagtcggaatcgctagtaatcgcaggtcagcatactgcggtgaatacgttcccgggtcttgtacacaccgcccgtcacaccatgggagtgggggataccagaagcaggtaggctaaccgcaagggggccgcttgccacggtatgcttcatgactggggtgaagtcgtaacaaggtagccgtaggggaacctgcggctggatcacctcctttct

SEQ ID NO: 1329 - DNA, 1549 bp, Neisseria cinerea
tgaacataagagtttgatcctggctcagattgaacgctggcggcatgctttacacatgcaagtcggacggcagcacagagaagcttgcttcttgggtggcgagtggcgaacgggtgagtaacatatcggaacgtaccgagtagtgggggataactgatcgaaagatcagctaataccgcatacgtcttgagagggaaagcaggggaccttcgggccttgcgctattcgagcggccgatatctgattagctagttggtggggtaaaggcctaccaaggcgacgatcagtagcgggtctgagaggatgatccgccacactgggactgagacacggcccagactcctacgggaggcagcagtggggaattttggacaatgggcgcaagcctgatccagccatgccgcgtgtctgaagaaggccttcgggttgtaaaggacttttgtcagggaagaaaaggctgttgctaatatcagcggctgatgacggtacctgaagaataagcaccggctaactacgtgccagcagccgcggtaatacgtagggtgcgagcgttaatcggaattactgggcgtaaagcgagcgcagacggttacttaagcaggatgtgaaatccccgggctcaacctgggaactgcgttctgaactgggtgactagagtgtgtcagagggaggtagaattccacgtgtagcagtgaaatgcgtagagatgtggaggaataccgatggcgaaggcagcctcctgggataacactgacgttcatgctcgaaagcgtgggtagcaaacaggattagataccctggtagtccacgccctaaacgatgtcaattagctgttgggcaacttgattgttcagtagcgtagctaacgcgtgaaattgaccgcctggggagtacggtcgcaagattaaaactcaaaggaattgacggggacccgcacaagcggtggatgatgtggattaattcgatgcaacgcgaagaaccttacctggtcttgacatgtacggaatcctccagagacggaggagtgccttcgggagccgtaacacaggtgctgcatggctgtcgtcagctcgtgtcgtgagatgttgggttaagtcccgcaacgagcgcaacccttgtcattagttgccatcattcagttgggcactctaatgagactgccggtgacaagccggaggaaggtggggatgacgtcaagtcctcatggcccttatgaccagggcttcacacgtcatacaatggtcggtacagagggtagccaagccgcgaggtggagccaatctcacaaaaccgatcgtagtccggattgcactctgcaactcgagtgcatgaagtcggaatcgctagtaatcgcaggtcagcatactgcggtgaatacgttcccgggtcttgtacacaccgcccgtcacaccatgggagtgggggataccagaagtaggtaggataaccgcaaggggtccgcttaccacggtatgcttcatgactggggtgaagtcgtaacaaggtagccgtaggggaacctgcggctggatcacctcctttctagaga

SEQ ID NO: 1330 - DNA, 1544 bp, Neisseria elongata
ttgaacataagagtttgatcctggctcagattgaacgctggcggcatgctttacacatgcaagtcggacggcagcggggtagtgcttgcactactgccggcgagtggcgaacgggtgagtaatatattggaacgtaccgagtaatgggggataaccaatcgaaagattggctaataccgcatacgctctgaggaggaaagcaggggaccttcgggccttgcgttattcgagcggccaatatctgattagctagttggtggggtaaaggcctaccaaggcgacgatcagtagcgggtctgagaggatgatccgccacactgggactgagacacggcccagactcctacgggaggcagcagtggggaattttggacaatgggcgcaagcctgatccagccatgccgcgtgtctgaagaaggccttcgggttgtaaaggacttttgttagggaagaaaaggaacggttaatacccgtttctgctgacggtacctaaagaataagcaccggctaactacgtgccagcagccgcggtaatacgtagggtgcgagcgttaatcggaattactgggcgtaaagcgagcgcagacggttacttaagcaggatgtgaaatccccgggctcaacctgggaactgcgttctgaactgggtagctagagtatgtcagaggggggtagaattccacgtgtagcagtgaaatgcgtagagatgtggaggaataccgatggcgaaggcagccccctgggataatactgacgttcatgctcgaaagcgtgggtagcaaacaggattagataccctggtagtccacgccctaaacgatgtcgattagctgttgggcagcttgactgcttagtagcgtagctaacgcgtgaaatcgaccgcctggggagtacggtcgcaagattaaaactcaaaggaattgacggggacccgcacaagcggtggatgatgtggattaattcgatgcaacgcgaagaaccttacctggtcttgacatgtacggaaccttccagagacggaagggtgccttcgggagccgtaacacaggtgctgcatggctgtcgtcagctcgtgtcgtgagatgttgggttaagtcccgcaacgagcgcaacccttgtcattagttgccatcatttagttgggcactctaatgagactgccggtgacaaaccggaggaaggtggggatgacgtcaagtcctcatggcccttatgaccagggcttcacacgtcatacaatggtcggtacaaagggtagccaagccgcgaggcggagccaatctcataaaaccgatcgtagtccggattgcactctgcaactcgagtgcatgaagtcggaatcgctagtaatcgcaggtcagcatactgcggtgaatacgttcccgggtcttgtacacaccgcccgtcacaccatgggagtgggggataccagaagtaggtagggtaaccgtaaggagcccgcttaccacggtatgcttcatgactggggtgaagtcgtaacaaggtagccgtaggggaacctgcggctggatcacctcctttct

SEQ ID NO: 1331 - DNA, 1549 bp, Neisseria flavescens
tgaacataagagtttgatcctggctcagattgaacgctggcggcatgctttacacatgcaagtcggacggcagcacagagaagcttgcttcttgggtggcgagtggcgaacgggtgagtaatatatcggaacgtaccgagtaatgggggataactaatcgaaagattagctaataccgcatattctctgaggaggaaagcaggggaccttcgggccttgcgttattcgagcggccgatatctgattagctagttggtggggtaaaggcctaccaaggcgacgatcagtagcgggtctgagaggatgatccgccacactgggactgagacacggcccagactcctacgggaggcagcagtggggaattttggacaatgggcgcaagcctgatccagccatgccgcgtgtctgaagaaggccttcgggttgtaaaggacttttgtcagggaagaaaaggctgttgctaatatcgacagctgatgacggtacctgaagaataagcaccggctaactacgtgccagcagccgcggtaatacgtagggtgcgagcgttaatcggaattactgggcgtaaagcgagcgcagacggttacttaagcaggatgtgaaatccccgggctcaacctgggaactgcgttctgaactgggtgactagagtgtgtcagagggaggtagaattccacgtgtagcagtgaaatgcgtagagatgtggaggaataccgatggcgaaggcagcctcctgggataacactgacgttcatgctcgaaagcgtgggtagcaaacaggattagataccctggtagtccacgccctaaacgatgtcaattagctgttgggcaacttgattgcttagtagcgtagctaacgcgtgaaattgaccgcctggggagtacggtcgcaagattaaaactcaaaggaattgacggggacccgcacaagcggtggatgatgtggattaattcgatgcaacgcgaagaaccttacctggtcttgacatgtacggaatcctccagagacggaggagtgccttcgggagccgtaacacaggtgctgcatggctgtcgtcagctcgtgtcgtgagatgttgggttaagtcccgcaacgagcgcaacccttgtcattagttgccatcatttagttgggcactctaatgagactgccggtgacaagccggaggaaggtggggatgacgtcaagtcctcatggcccttatgaccagggcttcacacgtcatacaatggtcggtacagagggtagccaagccgcgaggtggagccaatctcacaaaaccgatcgtagtccggattgcactctgcaactcgagtgcatgaagtcggaatcgctagtaatcgcaggtcagcatactgcggtgaatacgttcccgggtcttgtacacaccgcccgtcacaccatgggagtgggggataccagaagtaggtagggtaaccgcaaggagcccgcttaccacggtatgcttcatgactggggtgaagtcgtaacaaggtagccgtaggggaacctgcggctggatcacctcctttctagaga

SEQ ID NO: 1332 - DNA, 1278 bp, Neisseria sp.
  P2 oral clone MB5_P15
attgaacgctggcggcatgctttacacatgcaagtcgaacgagtggcgaacgggtgagtaacatattggaacgtaccgagtagtgggggataactaatcgaaagattagctaataccgcatacggaaagacgctatttgagcggccaatatcggattagctagttggtggggtaaaggcctaccaaggcgacgatccgtagcgggtctgagaggacgatccgccgcattgggactgagacacggcccaaactcctacgggaggcagcagtggggaattttggacaatgggggcaaccctgatccagccatgccgcgtgtctgaagaaggccttcgggttgtaaaggacttttgctagggaagatgacggtacctaaagaataagcaccggctaactacgtgccagcagccgcggtaatacgtagggtgcgagcgttaatcggaattactgggcgtaaagcgagcgcagacggtttgtcaagcaggatgtgaaatccccgagctcaacttgggaactgcgttctgaactggcaggctagagtatgtcagaggggggtagaattccacgtgtagcagtgaaatgcgtagagatgtggaggaataccgatggcgaaggcagccccctggggtaactgacgttcatgctcgaaagcgtgggtagcaaacaggattagataccctggtagtccacgccctaaacgatgtcaattagctgttgggcgcttagtagcgaagctaacgcgtgaaattgaccgcctggggagtacggtcgcaagattaaaactcaaaggaattgacggggacccgcacaagcggtggatgatgtggattaattcgatgcaacgcgaagaaccttacctggtcttgacatgcacaggtgctgcatggctgtcgtcagctcgtgtcgtgagatgttgggttaagtcccgcaacgagcgcaacccttgtcattagttgccatcatgggcactctaatgagactgccggtgacaaaccggaggaaggtggggatgacgtcaagtcctcatggcccttatgaccagggcttcacacgtcatacaatggttggcagagggtagccaaatcgcgagatggagccaatcccagccaatcgtagtccggatgcactctgcaactcgagtgcagaagtcggaatcgctagtaatcgcaggtcagcatactgcggtgaatacgttcccgggtcttgtacacaccgcccgtcacaccatgggagtgggggataccagaagtaggtggctaggccgcttaccacggtatg

SEQ ID NO: 1333 - DNA, 1553 bp, Neisseria gonorrhoeae
gattgaacataagagtttgatcctggctcagattgaacgctggcggcatgctttacacatgcaagtcggacggcagcacagggaagcttgcttctcgggtggcgagtggcgaacgggtgagtaacatatcggaacgtaccgggtagcgggggataactgatcgaaagatcagctaataccgcatacgtcttgagagggaaagcaggggaccttcgggccttgcgctatccgagcggccgatatctgattagctggttggcggggtaaaggcccaccaaggcgacgatcagtagcgggtctgagaggatgatccgccacactgggactgagacacggcccagactcctacgggaggcagcagtggggaattttggacaatgggcgcaagcctgatccagccatgccgcgtgtctgaagaaggccttcgggttgtaaaggacttttgtcagggaagaaaaggccgttgccaatatcggcggccgatgacggtacctgaagaataagcaccggctaactacgtgccagcagccgcggtaatacgtagggtgcgagcgttaatcggaattactgggcgtaaagcgggcgcagacggttacttaagcaggatgtgaaatccccgggctcaacccgggaactgcgttctgaactgggtgactcgagtgtgtcagagggaggtggaattccacgtgtagcagtgaaatgcgtagagatgtggaggaataccgatggcgaaggcagcctcctgggataacactgacgttcatgtccgaaagcgtgggtagcaaacaggattagataccctggtagtccacgccctaaacgatgtcaattagctgttgggcaacttgattgcttggtagcgtagctaacgcgtgaaattgaccgcctggggagtacggtcgcaagattaaaactcaaaggaattgacggggacccgcacaagcggtggatgatgtggattaattcgatgcaacgcgaagaaccttacctggttttgacatgtgcggaatcctccggagacggaggagtgccttcgggagccgtaacacaggtgctgcatggctgtcgtcagctcgtgtcgtgagatgttgggttaagtcccgcaacgagcgcaacccttgtcattagttgccatcattcggttgggcactctaatgagactgccggtgacaagccggaggaaggtggggatgacgtcaagtcctcatggcccttatgaccagggcttcacacgtcatacaatggtcggtacagagggtagccaagccgcgaggcggagccaatctcacaaaaccgatcgtagtccggattgcactctgcaactcgagtgcatgaagtcggaatcgctagtaatcgcaggtcagcatactgcggtgaatacgttcccgggtcttgtacacaccgcccgtcacaccatgggagtgggggataccagaagtaggtagggtaaccgcaaggagcccgcttaccacggtatgcttcatgactggggtgaagtcgtaacaaggtagccgtaggggaacctgcggctggatcacctcctttctagagaa

SEQ ID NO: 1334 - DNA, 1549 bp, Neisseria lactamica
tgaacataagagtttgatcctggctcagattgaacgctggcggcatgctttacacatgcaagtcggacggcagcggggtagtgcttgcactactgccggcgagtggcgaacgggtgagtaacatatcggaacgtaccgggcagtgggggataactgatcgaaagatcagctaataccgcatattttctgaggaagaaagcaggggaccttcgggccttgcgctatccgagcggccgatatctgattagctggttggcggggtaaaggcccaccaaggcgacgatcagtagcgggtctgagaggacgatccgccacactgggactgagacacggcccagactcctacgggaggcagcagtggggaattttggacaatgggcgcaagcctgatccagccatgccgcgtgtctgaagaaggccttcgggttgtaaaggacttttgtcggggaagaaaaggtcggggttaataccctcggctgatgacggtacccgaagaataagcaccggctaactacgtgccagcagccgcggtaatacgtagggtgcgagcgttaatcggaattactgggcgtaaagcgggcgcagacggttacttaagcaggatgtgaaatccccgggctcaacccgggaattgcgttctgaactgggtggctagagtgtgtcagagggaggtagaattccacgtgtagcagtgaaatgcgtagagatgtggaggaataccgatggcgaaggcagcctcctgggataacactgacgttcatgcccgaaagcgtgggtagcaaacaggattagataccctggtagtccacgccctaaacgatgtcgattagctgttgggcagcctgactgcttggtagcgaagctaacgcgtgaaatcgaccgcctggggagtacggtcgcaagattaaaactcaaaggaattgacggggacccgcacaagcggtggatgatgtggattaattcgatgcaacgcgaagaaccttacccggttttgacatgtacggaatcctccggagacgggggagtgccttcgggagccgtaacacaggtgctgcatggctgtcgtcagctcgtgtcgtgagatgttgggttaagtcccgcaacgagcgcaacccttgtcattagttgccatcattcagttgggcactctaatgagactgccggtgacaagccggaggaaggtggggatgacgtcaagtcctcatggcccttatgaccggggcttcacacgtcatacaatggtcggtacagagggtagccaagccgcgaggcggagccaatctcacaaaaccgatcgtagtccggattgcactctgcaactcgagtgcatgaagtcggaatcgctagtaatcgcaggtcagcatactgcggtgaatacgttcccgggtcttgtacacaccgcccgtcacaccatgggagtgggggataccagaagcaggtaggctaaccgcaaggaggccgcttgccacggtatgcttcatgactggggtgaagtcgtaacaaggtagccgtaggggaacctgcggctggatcacctcctttctagaga

SEQ ID NO: 1335 - DNA, 1529 bp, Neisseria macacae
agagtttgatcctggctcagattgaacgctggcggcatgctttacacatgcaagtcggacggcagcacagagaagcttgcttcttgggtggcgagtggcgaacgggtgagtaacatatcggaacgtaccgagcagtgggggataactaatcgaaagattagctaataccgcatatattctgaggaagaaagcaggggaccatttggccttgcgctgtttgagcggccgatatctgattagctagttggtggggtaaaggcctaccaaggcgacgatcagtagcgggtctgagaggatgatccgccacactgggactgagacacggcccagactcctacgggaggcagcagtggggaattttggacaatgggcgcaagcctgatccagccatgccgcgtgtctgaagaaggccttcgggttgtaaaggacttttgtcagggaagaaaagggcggggttaatacccctgtctgatgacggtacctgaagaataagcaccggctaactacgtgccagcagccgcggtaatacgtagggtgcgagcgttaatcggaattactgggcgtaaagcgggcgcagacggttacttaagcaggatgtgaaatccccgggctcaacctgggaactgcgttctgaactgggtgactagagtgtgtcagagggaggtagaattccacgtgtagcagtgaaatgcgtagagatgtggaggaataccgatggcgaaggcagcctcctgggataacactgacgttcatgcccgaaagcgtgggtagcaaacaggattagataccctggtagtccacgccctaaacgatgtcgattagctgttgggcagcatgactgcttagtagcgaagctaacgcgtgaaatcgaccgcctggggagtacggtcgcaagattaaaactcaaaggaattgacggggacccgcacaagcggtggatgatgtggattaattcgatgcaacgcgaagaaccttacctggtcttgacatgtacggaaccctccagagacggaggggtgccttcgggagccgtaacacaggtgctgcatggctgtcgtcagctcgtgtcgtgagatgttgggttaagtcccgcaacgagcgcaacccttgtcattagttgccatcattaagttgggcactctaatgagactgccggtgacaagccggaggaaggtggggatgacgtcaagtcctcatggcccttatgaccagggcttcacacgtcatacaatggtcggtacagagggtagccaagccgcgaggtggagccaatctcacaaaaccgatcgtagtccggattgcactctgcaactcgagtgcatgaagtcggaatcgctagtaatcgcaggtcagcatactgcggtgaatacgttcccgggtcttgtacacaccgcccgtcacaccatgggagtgggggataccagaagtaggtagggtaaccgcaaggagcccgcttaccacggtatgcttcatgactggggtgaagtcgtaacaaggtagccgtaggggaacctgcggctggatcacct

SEQ ID NO: 1336 - DNA, 1549 bp, Neisseria meningitidis
tgaacataagagtttgatcctggctcagattgaacgctggcggcatgctttacacatgcaagtcggacggcagcacagagaagcttgcttctcgggtggcgagtggcgaacgggtgagtaacatatcggaacgtaccgagtagtgggggataactgatcgaaagatcagctaataccgcatacgtcttgagagagaaagcaggggaccttcgggccttgcgctattcgagcggccgatatctgattagctagttggtggggtaaaggcctaccaaggcgacgatcagtagcgggtctgagaggatgatccgccacactgggactgagacacggcccagactcctacgggaggcagcagtggggaattttggacaatgggcgcaagcctgatccagccatgccgcgtgtctgaagaaggccttcgggttgtaaaggacttttgtcagggaagaaaaggctgttgctaatatcagcggctgatgacggtacctgaagaataagcaccggctaactacgtgccagcagccgcggtaatacgtagggtgcgagcgttaatcggaattactgggcgtaaagcgggcgcagacggttacttaagcaggatgtgaaatccccgggctcaacccgggaactgcgttctgaactgggtgactcgagtgtgtcagagggaggtagaattccacgtgtagcagtgaaatgcgtagagatgtggaggaataccgatggcgaaggcagcctcctgggacaacactgacgttcatgcccgaaagcgtgggtagcaaacaggattagataccctggtagtccacgccctaaacgatgtcaattagctgttgggcaacctgattgcttggtagcgtagctaacgcgtgaaattgaccgcctggggagtacggtcgcaagattaaaactcaaaggaattgacggggacccgcacaagcggtggatgatgtggattaattcgatgcaacgcgaagaaccttacctggtcttgacatgtacggaatcctccggagacggaggagtgccttcgggagccgtaacacaggtgctgcatggctgtcgtcagctcgtgtcgtgagatgttgggttaagtcccgcaacgagcgcaacccttgtcattagttgccatcattcagttgggcactctaatgagactgccggtgacaagccggaggaaggtggggatgacgtcaagtcctcatggcccttatgaccagggcttcacacgtcatacaatggtcggtacagagggtagccaagccgcgaggcggagccaatctcacaaaaccgatcgtagtccggattgcactctgcaactcgagtgcatgaagtcggaatcgctagtaatcgcaggtcagcatactgcggtgaatacgttcccgggtcttgtacacaccgcccgtcacaccatgggagtgggggataccagaagtaggtaggataaccacaaggagtccgcttaccacggtatgcttcatgactggggtgaagtcgtaacaaggtagccgtaggggaacctgcggctggatcacctcctttctagaga

SEQ ID NO: 1337 - DNA, 1547 bp, Neisseria mucosa
aacataagagtttgatcctggctcagattgaacgctggcggcatgctttacacatgcaagtcggacggcagcacagagaagcttgcttcttgggtggcgagtggcgaacgggtgagtaacatatcggaacgtaccgagcagtgggggataactaatcgaaagattagctaataccgcatatattctgaggaagaaagcaggggaccatttggccttgcgctgtttgagcggccgatatctgattagctagttggtggggtaaaggcctaccaaggcgacgatcagtagcgggtctgagaggatgatccgccacactgggactgagacacggcccagactcctacgggaggcagcagtggggaattttggacaatgggcgcaagcctgatccagccatgccgcgtgtctgaagaaggccttcgggttgtaaaggacttttgtcagggaagaaaaggatagggttaatacccctgtctgatgacggtacctgaagaataagcaccggctaactacgtgccagcagccgcggtaatacgtagggtgcgagcgttaatcggaattactgggcgtaaagcgggcgcagacggttacttaagcaggatgtgaaatccccgggctcaacctgggaactgcgttctgaactgggtgactagagtgtgtcagagggaggtagaattccacgtgtagcagtgaaatgcgtagagatgtggaggaataccgatggcgaaggcagcctcctgggataacactgacgttcatgcccgaaagcgtgggtagcaaacaggattagataccctggtagtccacgccctaaacgatgtcgattagctgttgggcagcttgactgcttagtagcgaagctaacgcgtgaaatcgaccgcctggggagtacggtcgcaagattaaaactcaaaggaattgacggggacccgcacaagcggtggatgatgtggattaattcgatgcaacgcgaagaaccttacctggtcttgacatgtacggaaccctccagagacggaggggtgccttcgggagccgtaacacaggtgctgcatggctgtcgtcagctcgtgtcgtgagatgttgggttaagtcccgcaacgagcgcaacccttgtcattagttgccatcattaagttgggcactctaatgagactgccggtgacaagccggaggaaggtggggatgacgtcaagtcctcatggcccttatgaccagggcttcacacgtcatacaatggtcggtacagagggtagccaagccgcgaggtggagccaatctcacaaaaccgatcgtagtccggattgcactctgcaactcgagtgcatgaagtcggaatcgctagtaatcgcaggtcagcatactgcggtgaatacgttcccgggtcttgtacacaccgcccgtcacaccatgggagtgggggataccagaagtaggtagggtaaccgcaaggagcccgcttaccacggtatgcttcatgactggggtgaagtcgtaacaaggtagccgtaggggaacctgcggctggatcacctcctttctagaga

SEQ ID NO: 1338 - DNA, 1352 bp, Neisseria pharyngis
cacagagaagcttgcttcttgggtggcgagtggcgaacgggtgagtaacatatcggaacgtaccgagcagtgggggataactaatcgaaagattagctaataccgcatatattctgaggaagaaagcaggggaccatttggccttgcgctgtttgagcggccgatatctgattagctggttggtggggtaaaggcctaccaaggcgacgatcagtagcgggtctgagaggatgatccgccacactgggactgagacacggcccagactcctacgggaggcagcagtggggaattttggacaatgggcgcaagcctgatccagccatgccgcgtgtctgaagaaggccttcgggttgtaaaggacttttgtcagggaagaaaaggacagggttaatacccctgtctgatgacggtacctgaagaataagcaccggctaactacgtgccagcagccgcggtaatacgtagggtgcgagcgttaatcggaattactgggcgtaaagcgggcgcagacggttacttaagcaggatgtgaaatccccgggctcaacctgggaactgcgttctgaactgggtgactagagtgtgtcagagggaggtagaattccacgtgtagcagtgaaatgcgtagagatgtggaggaataccgatggcgaaggcagcctcctgggataacactgacgttcatgcccgaaagcgtgggtagcaaacaggattagataccctggtagtccacgccctaaacgatgtcgattagctgttgggcagcttgactgcttagtagcgaagctaacgcgtgaaatcgaccgcctggggagtacggtcgcaagattaaaactcaaaggaattgacggggacccgcacaagcggtggatgatgtggattaattcgatgcaacgcgaagaaccttacctggtcttgacatgtacggaaccctccagagacggaggggtgccttcgggagccgtaacacaggtgctgcatggctgtcgtcagctcgtgtcgtgagatgttgggttaagtcccgcaacgagcgcaacccttgtcattagttgccatcattaagttgggcactctaatgagactgccggtgacaagccggaggaaggtggggatgacgtcaagtcctcatggcccttatgaccagggcttcacacgtcatacaatggtcggtacagagggtagccaagccgcgaggtggagccaatctcacaaaaccgatcgtagtccggattgcactctgcaactcgagtgcatgaagtcggaatcgctagtaatcgcaggtcagcatactgcggtgaatacgttcccgggtcttgtacacaccgcccgtcacaccatgggagtggggg

SEQ ID NO: 1339 - DNA, 1545 bp, Neisseria polysaccharea
ttgaacataagagtttgatcctggctcagattgaacgctggcggcatgctttacacatgcaagtcggacggcagcacagagaagcttgcttcttgggtggcgagtggcgaacgggtgagtaacatatcggaacgtaccgagtagtgggggataactgatcgaaagatcagctaataccgcatacgtcttgagagggaaagcaggggaccttcggaccttgcgctattcgagcggccgatatctgattagctagttggtggggtaaaggcctaccaaggcgacgatcagtagcgggtctgagaggatgatccgccacactgggactgagacacggcccagactcctacgggaggcagcagtggggaattttggacaatgggcgcaagcctgatccagccatgccgcgtgtctgaagaaggccttcgggttgtaaaggacttttgtcagggaagaaaaggctgttgctaatatcagcggctgatgacggtacctgaagaataagcaccggctaactacgtgccagcagccgcggtaatacgtagggtgcgagcgttaatcggaattactgggcgtaaagcgggcgcagacggttacttaagcaggatgtgaaatccccgggctcaacccgggaactgcgttctgaactgggtgactcgagtgtgtcagagggaggtagaattccacgtgtagcagtgaaatgcgtagagatgtggaggaataccgatggcgaaggcagcctcctgggataacactgacgttcatgcccgaaagcgtgggtagcaaacaggattagataccctggtagtccacgccctaaacgatgtcaattagctgttgggcaacttgattgcttggtagcgtagctaacgcgtgaaattgaccgcctggggagtacggtcgcaagattaaaactcaaaggaattgacggggacccgcacaagcggtggatgatgtggattaattcgatgcaacgcgaagaaccttacctggtcttgacatgtacggaatcctccagagacggaggagtgccttcgggagccgtaacacaggtgctgcatggctgtcgtcagctcgtgtcgtgagatgttgggttaagtcccgcaacgagcgcaacccttgtcattagttgccatcattcggttgggcactctaatgagactgccggtgacaagccggaggaaggtggggatgacgtcaagtcctcatggcccttatgaccagggcttcacacgtcatacaatggtcggtacagagggtagccaagccgcgaggtggagccaatctcacaaaaccgatcgtagtccggattgcactctgcaactcgagtgcatgaagtcggaatcgctagtaatcgcaggtcagcatactgcggtgaatacgttcccgggtcttgtacacaccgcccgtcacaccatgggagtgggggataccagaagtgggtaggataaccgcaaggggtccgcttaccacggtatgcttcatgactggggtgaagtcgtaacaaggtagccgtaggggaacctgcggctggatcacctcctttct

SEQ ID NO: 1340 - DNA, 1549 bp, Neisseria sicca
tgaacataagagtttgatcctggctcagattgaacgctggcggcatgctttacacatgcaagtcggacggcagcacagagaagcttgcttcttgggtggcgagtggcgaacgggtgagtaacatatcggaacgtaccgagcagtgggggataactaatcgaaagattagctaataccgcatatcttctgaggaagaaagcaggggaccatttggccttgcgctgtttgagcggccgatatctgattagctagttggtggggtaaaggcctaccaaggcgacgatcagtagcgggtctgagaggatgatccgccacactgggactgagacacggcccagactcctacgggaggcagcagtggggaattttggacaatgggcgcaagcctgatccagccatgccgcgtgtctgaagaaggccttcgggttgtaaaggacttttgtcagggaagaaaagggcggggttaatacccctgtctgatgacggtacctgaagaataagcaccggctaactacgtgccagcagccgcggtaatacgtagggtgcgagcgttaatcggaattactgggcgtaaagcgggcgcagacggttacttaagcaggatgtgaaatccccgggctcaacttgggaactgcgttctgaactgggtgactagagtgtgtcagagggaggtagaattccacgtgtagcagtgaaatgcgtagagatgtggaggaataccgatggcgaaggcagcctcctgggataacactgacgttcatgcccgaaagcgtgggtagcaaacaggattagataccctggtagtccacgccctaaacgatgtcgattagctgttgggcagcatgactgcttagtagcgaagctaacgcgtgaaatcgaccgcctggggagtacggtcgcaagattaaaactcaaaggaattgacggggacccgcacaagcggtggatgatgtggattaattcgatgcaacgcgaagaaccttacctggtcttgacatgtacggaaccctccagagacggaggggtgccttcgggagccgtaacacaggtgctgcatggctgtcgtcagctcgtgtcgtgagatgttgggttaagtcccgcaacgagcgcaacccttgtcattagttgccatcattaagttgggcactctaatgagactgccggtgacaagccggaggaaggtggggatgacgtcaagtcctcatggcccttatgaccagggcttcacacgtcatacaatggtcggtacagagggtagccaagccgcgaggtggagccaatctcacaaaaccgatcgtagtccggattgcactctgcaactcgagtgcatgaagtcggaatcgctagtaatcgcaggtcagcatactgcggtgaatacgttcccgggtcttgtacacaccgcccgtcacaccatgggagtgggggataccagaagtaggtagggtaaccgcaaggagcccgcttaccacggtatgcttcatgactggggtgaagtcgtaacaaggtagccgtaggggaacctgcggctggatcacctcctttctagaga

SEQ ID NO: 1341 - DNA, 1254 bp, Neisseria sp.
  KEM232
ctttacacatgcaagtcggacgagtggcgaacgggtgagtaatgtattggaacgtaccgagtaatgggggataaccaatcgaaagattggctaataccgcatacggaaaggcgttattcgagcggccaatatctgattagctggttggtggggtaaaggcctaccaaggcgacgatcagtagcgggtctgagaggatgatccgccacactgggactgagacacggcccagactcctacgggaggcagcagtggggaattttggacaatgggcgcaagcctgatccagccatgccgcgtgtctgaagaaggccttcgggttgtaaaggacttttgtcagggaagatgacggtacctgaagaataagcaccggctaactacgtgccagcagccgcggtaatacgtagggtgcgagcgttaatcggaattactgggcgtaaagcgggcgcagacggtttgttaagcaggatgtgaaatccccgggctcaacccgggaactgcgttctgaactggcaggctagagtgtgtcagaggggggtagaattccacgtgtagcagtgaaatgcgtagagatgtggaggaataccgatggcgaaggcagccccctgggataactgacgttcatgcccgaaagcgtgggtagcaaacaggattagataccctggtagtccacgccctaaacgatgtcgattagctgttgggcgcttagtagcgtagctaacgcgtgaaatcgaccgcctggggagtacggtcgcaagattaaaactcaaaggaattgacggggacccgcacaagcggtggatgatgtggattaattcgatgcaacgcgaagaaccttacctggtcttgacatgcacaggtgctgcatggctgtcgtcagctcgtgtcgtgagatgttgggttaagtcccgcaacgagcgcaacccttgtcattagttgccatcatgggcactctaatgagactgccggtgacaaaccggaggaaggtggggatgacgtcaagtcctcatggcccttatgaccagggcttcacacgtcatacaatggtcggcagagggtagccaagccgcgaggcggagccaatcccagccgatcgtagtccggatgcactctgcaactcgagtgcagaagtcggaatcgctagtaatcgcaggtcagcatactgcggtgaatacgttcccgggtcttgtacacaccgcccgtcacaccatgggagtgggggataccagaagcaggtggctaggccgcttgccacg

SEQ ID NO: 1342 - DNA, 1406 bp, Neisseria sp.
  SMC-A9199
gcaagtcggacggcagcgaggaagtgcttgcacttctgtcggcgagtggcgaacgggtgagtaacatatcggaacgtaccgagtagtgggggataactaatcgaaagattagctaataccgcatacgtcttgagagagaaagcaggggaccttcgggccttgcgctattcgagcggccgatatctgattagctagttggtggggtaaaggcccaccaaggcgacgatcagtagcgggtctgagaggatgatccgccacactgggactgagacacggcccagactcctacgggaggcagcagtggggaattttggacaatgggcgcaagcctgatccagccatgccgcgtgtatgaagaaggccttcgggttgtaaagtacttttgtcagggaagaaaaggccggtgttaataccattggctcatgacggtacctgaagaataagcaccggctaactacgtgccagcagccgcggtaatacgtagggtgcgagcgttaatcggaattactgggcgtaaagcgagcgcagacggtttgttaagcaggatgtgaaatccccgggctcaacctgggaactgcgttctgaactggcaagctagagtgtgtcagaggggggtagaattccacgtgtagcagtgaaatgcgtagagatgtggaggaataccgatggcgaaggcagccccctgggataacactgacgttcatgctcgaaagcgtgggtagcaaacaggattagataccctggtagtccacgccctaaacgatgtcaattagctgttgggcaacttgattgcttagtagcgtagctaacgcgtgaaattgaccgcctggggagtacggtcgcaagattaaaactcaaaggaattgacggggacccgcacaagcggtggatgatgtggattaattcgatgcaacgcgaagaaccttacctggtcttgacatgtacggaatcctccagagacggaggagtgccttcgggagccgtaacacaggtgctgcatggctgtcgtcagctcgtgtcgtgagatgttgggttaagtcccgcaacgagcgcaacccttgtcattagttgccatcattcagttgggcactctaatgagactgccggtgacaagccggaggaaggtggggatgacgtcaagtcctcatggcccttatgaccagggcttcacacgtcatacaatggtcggtacagagggtagccaagccgcgaggtggagccaatctcacaaaaccgatcgtagtccggattgcactctgcaactcgagtgcatgaagtcggaatcgctagtaatcgcaggtcagcatactgcggtgaatacgttcccgggtcttgtacacaccgcccgtcacaccatgggagtgggggataccagaagtaggtaggataaccttcgggagtccgct

SEQ ID NO: 1343 - DNA, 1363 bp, Neisseria sp.
  TM10_1
  modified_base (1352)..(1352): a, c, t, g, unknown or other
cacagagaagcttgcttcttgggtggcgagtggcgaacgggtgagtaacatatcggaacgtaccgagcagtgggggataactaatcgaaagattagctaataccgcatatcttctgaggaagaaagcaggggaccatttggccttgcgctgtttgagcggccgatatctgattagctagttggtggggtaaaggcctaccaaggcgacgatcagtagcgggtctgagaggatgatccgccacactgggactgagacacggcccagactcctacgggaggcagcagtggggaattttggacaatgggcgcaagcctgatccagccatgccgcgtgtctgaagaaggccttcgggttgtaaaggacttttgtcagggaagaaaagggcggggttaatacccctgtctgatgacggtacctgaagaataagcaccggctaactacgtgccagcagccgcggtaatacgtagggtgcgagcgttaatcggaattactgggcgtaaagcgggcgcagacggttacttaagcaggatgtgaaatccccgggctcaacctgggaactgcgttctgaactgggtgactagagtgtgtcagagggaggtagaattccacgtgtagcagtgaaatgcgtagagatgtggaggaataccgatggcgaaggcagcctcctgggataacactgacgttcatgcccgaaagcgtgggtagcaaacaggattagataccctggtagtccacgccctaaacgatgtcgattagctgttgggcagcatgactgcttagtagcgaagctaacgcgtgaaatcgaccgcctggggagtacggtcgcaagattaaaactcaaaggaattgacggggacccgcacaagcggtggatgatgtggattaattcgatgcaacgcgaagaaccttacctggtcttgacatgtacggaatcctccagagacggaggagtgccttcgggagccgtaacacaggtgctgcatggctgtcgtcagctcgtgtcgtgagatgttgggttaagtcccgcaacgagcgcaacccttgtcattagttgccatcattaagttgggcactctaatgagactgccggtgacaagccggaggaaggtggggatgacgtcaagtcctcatggcccttatgaccagggcttcacacgtcatacaatggtcggtacagagggtagccaagccgcgaggcggagccaatctcacaaaaccgatcgtagtccggattgcactctgcaactcgagtgcatgaagtcggaatcgctagtaatcgcaggtcagcatactgcggtgaatacgttcccgggtcttgtacacaccgcccgtcacaccatgggagtggggngatacagaagt

SEQ ID NO: 1344 - DNA, 1499 bp, Neisseria sp.
  oral clone AP132
agagtttgatatggctcagattgaacgctggcggcatgctttacacatgcaagtcggacggcagcggggagtgcttgcactctgccggcgagtggcgaacgggtgagtaatgcatcggaacgtaccgagtaatgggggataactgtccgaaaggacagctaataccgcatacgccctgagggggaaagcgggggatcttaggacctcgcgttattcgagcggccgatgtctgattagctagttggtggggtaaaggcctaccaaggcgacgatcagtagcgggtctgagaggacgatccgccacactgggactgagacacggcccagactcctacgggaggcagcagtggggaattttggacaatgggcgcaagcctgatccagccatgccgcgtgtctgaagaaggccttcgggttgtaaaggacttttgtcagggaagaaaaggcgggtgctaataccatctgctgatgacggtacctgaagaataagcaccggctaactacgtgccagcagccgcggtaatacgtagggtgcgagcgttaatcggaattactgggcgtaaagcgggcgcagacggttacttaagcaggatgtgaaatccccgggctcaacctgggaactgcgttctgaactgggtgactagagtgtgtcagagggaggtagaattccacgtgtagcagtgaaatgcgtagagatgtggaggaataccgatggcgaaggcagcctcctgggataacgctgacgttcatgcccgaaagcgtgggtagcaaacaagattagataccctggtagtccacgccctaaacgatgtcgattagctgctgggcagcttgactgcttagtagcgaagctaacgcgtgaaatcgaccgcctggggagtacggtcgcaagattaaaactcaaaggaattgacggggacccgcacaagcggtggatgatgtggattaattcgatgcaacgcgaagaaccttacctggtcttgacatgtacggaaccctccagagacggaggggtgccttcgggagccgtaacacaggtgctgcatggctgtcgtcagctcgtgtcgtgagatgttgggttaagtcccgcaacgagcgcaacccttgtcattagttgccatcattaagttgggcactctaatgagactgccggtgacaagccggaggaaggtggggatgacgtcaagtcctcatggcccttatgaccagggcttcacacgtcatacaatggtcggtacagagggtagccaagccgcgaggtggagccaatctcacaaaaccgatcgtagtccggattgcactctgcaactcgagtgcgtgaagtcggaatcgctagtaatcgcaggtcagcatactgcggtgaatacgttcccgggtcttgtacacaccgcccgtcacaccatgggagtgggggataccagaagtaggtagggtaaccgcaaggagcccgcttaccacggtatgcttcatgactggggtgaagtcgtaacaagggtarc

SEQ ID NO: 1345 - DNA, 1363 bp, Neisseria sp.
  oral clone JC012
gagtttgattctggctcagattgaacgcgggcgccatgctttacacatgcaagtcgaacgagtggcgaacgggtgagtaacatattggaacgtaccgagtaaagggggataactatccgaaaggatagctaataccgcatacggaaagacgttattcgagcggccaatatctgattagctagttggtggggtaaaggcctaccaaggcgacgatcagtagcgggtctgagaggacgatccgccacactgggactgagacacggcccagactcctacgggaggcagcagtggggaattttggacaatgggcgcaagcctgatccagccatgccgtgtgtctgaagaaggccttcgggttgtaaaggacttttgttagggaagatgacggtacctaaagaataagcaccggctaactacgtgccagcagccgcggtaatacgtagggtgcgagcgttaatcggaattactgggcgtaaagcgagcgcagacggtttgttaagcaggatgtgaaatccccaggctcaacttgggaactgcgttctgaactggcaagctagagtgtgtcagaggggggtagaattccacgtgtagcagtgaaatgcgtagagatgtggaggaataccgatggcgaaggcagccccctgggataactgacgttcatgctcgaaagcgtgggtagcaaacaggattagataccctggtagtccacgccctaaacgatgtcaattagctgttgggcgcttagtagcgtagctaacgcgtgaaattgaccgcctggggagtacggtcgcaagattaaaactcaaaggaattgacggggacccgcacaagcggtggatgatgtggattaattcgatgcaacgcgaagaaccttacctggtcttgacatgcacaggtgctgcatggctgtcgtcagctcgtgtcgtgagatgttgggttaagtcccgcaacgagcgcaacccttgtcattagttgccatcatgggcactctaatgagactgccggtgacaaaccggaggaaggtggggatgacgtcaagtcctcatggcccttatgaccagggcttcacacgtcatacaatggtcggcagagggtcgccaagccgcgaggtggagccaatctcacccgatcgtagtccggatgcactctgcaactcgagtgcagaagtcggaatcgctagtaatcgcaggtcagcatactgcggtgaatacgttcccgggtcttgtacacaccgcccgtcacaccatgggagtgggggataccagaagtaggtggctaggccgcttaccacggtatgtttcatgactggggtgaagtcgtaacaaggtagccgtaggggaacctgcggctggaacacctcctt

SEQ ID NO: 1346 - DNA, 1473 bp, Neisseria sp.
  oral strain B33KA
gattgaacgctggcggcatgctttacacatgcaagtcggacggcagcacagagaagcttgcttcttgggtggcgagtggcgaacgggtgagtaatgtattggaacgtaccgagtaatgggggataaccaatcgaaagattggctaataccgcatacgtcctgagggggaaagcgggggatcttcggacctcgcgttattcgagcggccaatatctgattagctggttggtggggtaaaggcctaccaaggcgacgatcagtagcgggtctgagaggatgatccgccacactgggactgagacacggcccagactcctacgggaggcagcagtggggaattttggacaatgggcgcaagcctgatccagccatgccgcgtgtctgaagaaggccttcgggttgtaaaggacttttgtcagggaagaaaaggcttttgataataccaggagctgatgacggtacctgaagaataagcaccggctaactacgtgccagcagccgcggtaatacgtagggtgcgagcgttaatcggaattactgggcgtaaagcgggcgcagacggtttgttaagcaggatgtgaaatccccgggctcaacccgggaactgcgttctgaactggcaggctagagtgtgtcagaggggggtagaattccacgtgtagcagtgaaatgcgtagagatgtggaggaataccgatggcgaaggcagccccctgggataacactgacgttcatgcccgaaagcgtgggtagcaaacaggattagataccctggtagtccacgccctaaacgatgtcgattagctgttgggcagcttgactgcttagtagcgtagctaacgcgtgaaatcgaccgcctggggagtacggtcgcaagattaaaactcaaaggaattgacggggacccgcacaagcggtggatgatgtggattaattcgatgcaacgcgaagaaccttacctggtcttgacatgtacggaatcctccagagacggaggagtgccttcgggagccgtaacacaggtgctgcatggctgtcgtcagctcgtgtcgtgagatgttgggttaagtcccgcaacgagcgcaacccttgtcattagttgccatcattaagttgggcactctaatgagactgccggtgacaaaccggaggaaggtggggatgacgtcaagtcctcatggcccttatgaccagggcttcacacgtcatacaatggtcggtacagagggtagccaagccgcgaggcggagccaatcccagaaaaccgatcgtagtccggattgcactctgcaactcgagtgcatgaagtcggaatcgctagtaatcgcaggtcagcatactgcggtgaatacgttcccgggtcttgtacacaccgcccgtcacaccatgggagtgggggataccagaagcaggtaggctaaccgcaaggaggccgcttgccacggtatgcttcatgactggggtgaagtcgtaa

SEQ ID NO: 1347 - DNA, 1545 bp, Neisseria sp.
  oral taxon 014
ttgaacataagagtttgatcctggctcagattgaacgctggcggcatgctttacacatgcaagtcggacggcagcggggtagtgcttgcactactgccggcgagtggcgaacgggtgagtaacatatcggaacgtaccgagcagtgggggataactaatcgaaagattagctaataccgcatatattctgaggaagaaagcaggggacctttgggccttgcgctgtttgagcggccgatatctgattagctggttggtggggtaaaggcctaccaaggcgacgatcagtagcgggtctgagaggatgatccgccacactgggactgagacacggcccagactcctacgggaggcagcagtggggaattttggacaatgggggcaaccctgatccagccatgccgcgtgtctgaagaaggccttcgggttgtaaaggacttttgtccgggaagaaaagcgcgatgttaataccattgcgtgctgacggtaccggaagaataagcaccggctaactacgtgccagcagccgcggtaatacgtagggtgcgagcgttaatcggaattactgggcgtaaagcgggcgcagacggttacttaagcaggatgtgaaatccccgggctcaacctgggaattgcgttctgaactgggtggctagagtgtgtcagaggggggtagaattccacgtgtagcagtgaaatgcgtagagatgtggaggaataccgatggcgaaggcagccccctgggatagcactgacgttcatgcccgaaagcgtgggtagcaaacaggattagataccctggtagtccacgccctaaacgatgtcgattagctgttgggcaacttgattgcttggtagcgaagctaacgcgtgaaatcgaccgcctggggagtacggtcgcaagattaaaactcaaaggaattgacggggacccgcacaagcggtggatgatgtggattaattcgatgcaacgcgaagaaccttacctggtcttgacatgtacggaaccttccggagacggaagggtgccttcgggagccgtaacacaggtgctgcatggctgtcgtcagctcgtgtcgtgagatgttgggttaagtcccgcaacgagcgcaacccttgtcattagttgccatcatttggttgggcactctaatgagactgccggtgacaagccggaggaaggtggggatgacgtcaagtcctcatggcccttatgaccagggcttcacacgtcatacaatggtcggtacagagggtagccaagccgcgaggtggagccaatcccaaaaaaccgatcgtagtccggattgcactctgcaactcgagtgcatgaagtcggaatcgctagtaatcgcaggtcagcatactgcggtgaatacgttcccgggtcttgtacacaccgcccgtcacaccatgggagtgggggataccagaagcaggtaggctaaccgcaagggggccgcttgccacggtatgcttcatgactggggtgaagtcgtaacaaggtagccgtaggggaacctgcggctggatcacctcctttct

SEQ ID NO: 1348 - DNA, 1549 bp, Neisseria subflava
tgaacataagagtttgatcctggctcagattgaacgctggcggcatgctttacacatgcaagtcggacggcagcacagagaagcttgcttcttgggtggcgagtggcgaacgggtgagtaatatatcggaacgtaccgagtaatgggggataactaatcgaaagattagctaataccgcatattctctgaggaggaaagcaggggaccttcgggccttgcgttattcgagcggccgatatctgattagctagttggtggggtaaaggcctaccaaggcgacgatcagtagcgggtctgagaggatgatccgccacactgggactgagacacggcccagactcctacgggaggcagcagtggggaattttggacaatgggcgcaagcctgatccagccatgccgcgtgtctgaagaaggccttcgggttgtaaaggacttttgtcagggaagaaaaggctgttgctaataccgacagctgatgacggtacctgaagaataagcaccggctaactacgtgccagcagccgcggtaatacgtagggtgcgagcgttaatcggaattactgggcgtaaagcgagcgcagacggttacttaagcaggatgtgaaatccccgggctcaacctgggaactgcgttctgaactgggtgactagagtgtgtcagagggaggtagaattccacgtgtagcagtgaaatgcgtagagatgtggaggaataccgatggcgaaggcagcctcctgggataacactgacgttcatgctcgaaagcgtgggtagcaaacaggattagataccctggtagtccacgccctaaacgatgtcaattagctgttgggcaacttgattgcttagtagcgtagctaacgcgtgaaattgaccgcctggggagtacggtcgcaagattaaaactcaaaggaattgacggggacccgcacaagcggtggatgatgtggattaattcgatgcaacgcgaagaaccttacctggtcttgacatgtacggaatcctccagagacggaggagtgccttcgggaaccgtaacacaggtgctgcatggctgtcgtcagctcgtgtcgtgagatgttgggttaagtcccgcaacgagcgcaacccttgtcattagttgccatcatttagttgggcactctaatgagactgccggtgacaagccggaggaaggtggggatgacgtcaagtcctcatggcccttatgaccagggcttcacacgtcatacaatggtcggtacagagggtagccaagccgcgaggtggagccaatctcacaaaaccgatcgtagtccggattgcactctgcaactcgagtgcatgaagtcggaatcgctagtaatcgcaggtcagcatactgcggtgaatacgttcccgggtcttgtacacaccgcccgtcacaccatgggagtgggggataccagaagtaggtagggtaaccgcaaggagcccgcttaccacggtatgcttcatgactggggtgaagtcgtaacaaggtagccgtaggggaacctgcggctggatcacctcctttctagaga

SEQ ID NO: 1349 - DNA, 1495 bp, Neorickettsia risticii
atttgagagtttgatcctggctcagaacgaacgctagcggtaggcttaacacatgcaagtcgaacggaatcagggctgcttgcagccttggtcccgtggcagacgggtgcgtaacgcgtgggaacttgcctggtagtagggaataaccagtggaaacattgggcaacaccctatacgccctgagggggaaaatttattgctatcagataggcccgcgttagattagctagttggtggggtaatggcctaccaaggcgacgatctatagctggtctgagaggatgatcagccacactggaactgagacacggtccagactcctacgggaggcagcagtgaggaatattggacaatgggcgaaagcctgatccagccataccgcatgagtgatgaaggcccttgggttgtaaagctcttttagtggggaagataatgacggtacccacagaagaagtcccggctaactccgtgccagcagccgcggtaatacggagggggctagcgttgttcggaattactgggcgtaaagggtgcgtaggcggtcccgtaagttaggtgtgaaatccttgggcttaacccaagaactgcatttaaaactgtgggactcgaacgtgagagagggcaatggaatttttggtgtaggggtgaaatccgtagatatcaagaggaacgtcaggggcgaaagcgattgcctggatcacagttgacgctgaggcacgaaagcgtggggagcaaacaggattagataccctggtagtccacgctgtaaacgatgagtgttaaaagtgggttattttatctgctttgtagctaacgcgttaaacactccgcctggggactacggtcgcaagactaaaactcaaaggaattgacggggactcgcacaagcggtggagtatgtggtttaattcgatgcaacgcgaaaaaccttaccataccttgacatgtggattgtatccctctgaagggagggagtcagttcggctggatccaacacaggtgttgcatggctgtcgtcagctcgtgtcgtgagatgttgggttaagtcccgcaacgagcgcaaccctcatccttagttgccagcggttcggccgggaactttaaggaaactgccagtgacaagctggaggaaggtggggacgacgtcaagtcatcatggcccttatggtatgggctacacacgtactacaatggcaactacaatgagctagctacaccgtaaggtgacgccaatctcttaaaggttgtctcagtacggattgccttctgcaactcgaaggcatgaagttggaatcgctagtaatcgcagatcagcatgctgcggtgaatacgttctcgggtcttgtacacactgcccgtcaggccatgggagttcatcttactcgaagctagtgagctgaccgcaaggaggcagctatctacggtggggtgggtgactggggttaagtcgtaacaaggtagccgtaggtgaacctgcggctggattacctccttt

SEQ ID NO: 1350 - DNA, 1495 bp, Neorickettsia sennetsu
atttgagagtttgatcctggctcagaacgaacgctagcggtaggcttaacacatgcaagtcgaacggaatcaaagctgcttgcagccttggtcccgtggcagacgggtgcgtaacgcgtgggaacttgcctggtagtagggaataaccagtggaaacattgggcaacaccctatacgccctgagggggaaaatttattgctatcagataggcccgcgttagattagctagttggtggggtaatggcctaccaaggcgacgatctatagctggtctgagaggatgatcagccacactggaactgagacacggtccagactcctacgggaggcagcagtgaggaatattggacaatgggcgaaagcctgatccagccataccgcatgagtgatgaaggcccttgggttgtaaagctcttttagtggggaagatagtgacggtacccacagaagaagtcccggctaactccgtgccagcagccgcggtaatacggagggggctagcgttgttcggaattactgggcgtaaagggtgcgtaggcggtcccgtaagttaggtgtgaaatccttgggcttaacccaggaactgcatttaaaactgcgggactcgaacgtgagagagggcaatggaatttttggtgtaggggtgaaatccgtagatatcaagaggaacgtcaggggcgaaagcgattgcctggatcacagttgacgctgaggcacgaaagcgtggggagcaaacaggattagataccctggtagtccacgctgtaaacgatgagtgttaaaagtgggttattttatctgctttgtagctaacgcgttaaacactccgcctggggactacggtcgcaagactaaaactcaaaggaattgacggggactcgcacaagcggtggagtatgtggtttaattcgatgcaacgcgaaaaaccttaccataccttgacatgtggatcgtatccctctgaagggagggagtcagttcggctggatccaacacaggtgttgcatggctgtcgtcagctcgtgtcgtgagatgttgggttaagtcccgcaacgagcgcaaccctcatccttagttgccagcggttcggccgggaactttaaggaaactgccagtgacaagctggaggaaggtggggacgacgtcaagtcatcatggcccttatggtatgggctacacacgtactacaatggcaactacaatgggctagctacaccgtaaggtgatgcaaatctcctaaaagttgtctcagtacggattgccttctgcaactcgaaggcatgaagttggaatcgctagtaatcgcagatcagcatgctgcggtgaatacgttctcgggtcttgtacacactgcccgtcaggccatgggagttcatcttactcgaagctagtgagctgaccgcaaggaggcagctatctacggtggggtgggtgactggggttaagtcgtaacaaggtagccgtaggtgaacctgcggctggattacctccttt

SEQ ID NO: 1351 - DNA, 1530 bp, Nocardia brasiliensis
tcttcaacggagagtttgatcctggctcaggacgaacgctggcggcgtgcttaacacatgcaagtcgagcggtaaggcccttcggggtacacgagcggcgaacgggtgagtaacacgtgggtgatctgcctcgcacttcgggataagcctgggaaactgggtctaataccggatatgacctttcagtgcatgctgttgggtggaaagatttatcggtgcgagatgggcccgcggcctatcagcttgttggcggggtaacggcccaccaaggcgacgacgggtagccgacctgagagggtgaccggccacactgggactgagacacggcccagactcctacgggaggcagcagtggggaatattgcacaatgggcggaagcctgatgcagcgacgccgcgtgagggatgacggccttcgggttgtaaacctctttcgacagggacgaagcgcaagtgacggtacctgtagaagaagcaccggccaactacgtgccagcagccgcggtaatacgtagggtgcgagcgttgtccggaattactgggcgtaaagagcttgtaggcggtttgtcgcgtcgtccgtgaaaacttggggctcaaccccaagcttgcgggcgatacgggcagacttgagtacttcaggggagactggaattcctggtgtagcggtgaaatgcgcagatatcaggaggaacaccggtggcgaaggcgggtctctgggaagtaactgacgctgagaagcgaaagcgtgggtagcgaacaggattagataccctggtagtccacgccgtaaacggtgggtactaggtgtgggtttccttccacgggatccgtgccgtagctaacgcattaagtaccccgcctggggagtacggccgcaaggctaaaactcaaaggaattgacgggggcccgcacaagcggcggagcatgtggattaattcgatgcaacgcgaagaaccttacctgggtttgacatacaccggaaacctgcagagatgtaggcccccttgtggtcggtgtacaggtggtgcatggctgtcgtcagctcgtgtcgtgagatgttgggttaagtcccgcaacgagcgcaacccttgtcctgtgttgccagcggattatgccggggactcgcaggagactgccggggtcaactcggaggaaggtggggacgacgtcaagtcatcatgccccttatgtccagggcttcacacatgctacaatggccggtacagagggctgcgataccgtgaggtggagcgaatcccttaaagccggtctcagttcggatcggggtctgcaactcgaccccgtgaagttggagtcgctagtaatcgcagatcagcaacgctgcggtgaatacgttcccgggccttgtacacaccgcccgtcacgtcatgaaagtcggtaacacccgaagccggtggcctaaccccttgtgggagggagccgtcgaaggtgggattggcgattgggacgaagtcgtaacaaggtagccgtaccggaaggtgcggctggatcacctcctttctaaggag

SEQ ID NO: 1352 - DNA, 1434 bp, Nocardia cyriacigeorgica
ttaacacatgcaagtcgagcggtaaggcccttcggggtacacgagcggcgaacgggtgagtaacacgtgggtgatctgcctcgcactctgggataagcctgggaaactgggtctaataccggatatgaccttacatcgcatggtgtttggtggaaagatttatcggtgcgagatgggcccgcggcctatcagcttgttggtggggtaatggcctaccaaggcgacgacgggtagccggcctgagagggcgaccggccacactgggactgagacacggcccagactcctacgggaggcagcagtggggaatattgcacaatgggcgaaagcctgatgcagcgacgccgcgtgagggatgacggccttcgggttgtaaacctctttcgacagggacgaagcgcaagtgacggtacctgtagaagaagcaccggccaactacgtgccagcagccgcggtaatacgtagggtgcgagcgttgtccggaattactgggcgtaaagagcttgtaggcggcttgtcgcgtcgatcgtgaaaacttggggctcaaccccaagcttgcggtcgatacgggcaggcttgagtacttcaggggagactggaattcctggtgtagcggtgaaatgcgcagatatcaggaggaacaccggtggcgaaggcgggtctctgggaagtaactgacgctgagaagcgaaagcgtgggtagcgaacaggattagataccctggtagtccacgccgtaaacggtgggtactaggtgtgggtttccttccacgggatccgtgccgtagctaacgcattaagtaccccgcctggggagtacggccgcaaggctaaaactcaaaggaattgacgggggcccgcacaagcggcggagcatgtggattaattcgatgcaacgcgaagaaccttacctgggtttgacatacaccggaaacctgcagagatgtaggcccccttgtggtcggtgtacaggtggtgcatggctgtcgtcagctcgtgtcgtgagatgttgggttaagtcccgcaacgagcgcaacccttatcttatgttgccagcgcgtaatggcggggactcgtgagagactgccggggtcaactcggaggaaggtggggacgacgtcaagtcatcatgccccttatgtccagggcttcacacatgctacaatggccggtacagagggctgcgataccgtgaggtggagcgaatcccttaaagccggtctcagttcggatcggggtctgcaactcgaccccgtgaagttggagtcgctagtaatcgcagatcagcaacgctgcggtgaatacgttcccgggccttgtacacaccgcccgtcacgtcatgaaagtcggtaacacccgaagccggtggcctaaccccttgtgggagggagccgtcgaaggtgggatcggcgattgggacgaagtcgtaacaag

SEQ ID NO: 1353 - DNA, 1522 bp, Nocardia farcinica
cttcaacggagagtttgatcctggctcaggacgaacgctggcggcgtgcttaacacatgcaagtcgagcggtaaggcccttcggggtacacgagcggcgaacgggtgagtaacacgtgggtgatctgccctgtacttcgggataagcctgggaaactgggtctaataccggatatgaccttacatcgcatggtgtttggtggaaagatttatcggtacaggatgggcccgcggcctatcagcttgttggtggggtaatggcctaccaaggcgacgacgggtagccggcctgagagggcgaccggccacactgggactgagacacggcccagactcctacgggaggcagcagtggggaatattgcacaatgggcgaaagcctgatgcagcgacgccgcgtgagggatgacggccttcgggttgtaaacctctttcgacagggacgaagcgcaagtgacggtacctgtagaagaagcaccggccaactacgtgccagcagccgcggtaatacgtagggtgcgagcgttgtccggaattactgggcgtaaagagcttgtaggcggtttgtcgcgtcgtccgtgaaaacttggggctcaactccaagcttgcgggcgatacgggcagacttgagtactgcaggggagactggaattcctggtgtagcggtgaaatgcgcagatatcaggaggaacaccggtggcgaaggcgggtctctgggcagtaactgacgctgagaagcgaaagcgtgggtagcgaacaggattagataccctggtagtccacgccgtaaacggtgggcgctaggtgtgggtttccttccacgggatccgtgccgtagctaacgcattaagcgccccgcctggggagtacggccgcaaggctaaaactcaaaggaattgacgggggcccgcacaagcggcggagcatgtggattaattcgatgcaacgcgaagaaccttacctgggtttgacatacaccggaaacctgcagagatgtaggcccccttgtggtcggtgtacaggtggtgcatggctgtcgtcagctcgtgtcgtgagatgttgggttaagtcccgcaacgagcgcaaccttgtcctgtgttgccagcgcgttatggcggggactcgcaggagactgccggggtcaactcggaggaaggtggggacgacgtcaagtcatcatgccccttatgtccagggcttcacacatgctacaatggccggtacagagggctgcgataccgtgaggtggagcgaatcccttaaagccggtctcagttcggatcggggtctgcaactcgaccccgtgaagttggagtcgctagtaatcgcagatcagcaacgctgcggtgaatacgttcccgggccttgtacacaccgcccgtcacgtcatgaaagtcggtaacacccgaagccggtggcctaaccccttgtgggagggagccgtcgaaggtgggatcggcgattgggacgaagtcgtaacaaggtagccgtaccggaaggtgcggctggatcacctcctttct

SEQ ID NO: 1354 - DNA, 1328 bp, Nocardia puris
aacacatgcaagtcgagcgagcggcgaacgggtgagtaacacgtgggtgatctgccctgcactctgggataagcctgggaaactgggtctaataccggatatggaaagtcggtgcaggatgggcccgcggcctatcagcttgttggtggggtaatggcctaccaaggcgacgacgggtagccggcctgagagggcgaccggccacactgggactgagacacggcccagactcctacgggaggcagcagtggggaatattgcacaatgggcggaagcctgatgcagcgacgccgcgtgagggatgacggccttcgggttgtaaacctctttcgacagggacgatgacggtacctgtagaagaagcaccggccaactacgtgccagcagccgcggtaatacgtagggtgcgagcgttgtccggaattactgggcgtaaagagcttgtaggcggcttgtcgcgtcgatcgtgaaaacttggggctcaaccccaagcttgcggtcgatacgggcaggcttgagtactgcaggggagactggaattcctggtgtagcggtgaaatgcgcagatatcaggaggaacaccggtggcgaaggcgggtctctgggcagactgacgctgagaagcgaaagcgtgggtagcgaacaggattagataccctggtagtccacgccgtaaacggtgggcgctaggtgtgggttgatccgtgccgtagctaacgcattaagcgccccgcctggggagtacggccgcaggctaaaactcaaaggaattgacgggggcccgcacaagcggcggagcatgtggattaattcgatgcaacgcgaagaaccttacctgggtttgacatatacaggtggtgcatggctgtcgtcagctcgtgtcgtgagatgttgggttaagtcccgcaacgagcgcaacccttgtcctgtgttgccagcaattggggactcgcaggagactgccggggtcaactcggaggaaggtggggacgacgtcaagtcatcatgccccttatgtccagggcttcacacatgctacaatggccggcagagggctgcgataccgtgaggtggagcgaatcccttccggtctcagttcggacggggtctgcaactcgaccccggaagttggagtcgctagtaatcgcagatcagcaacgctgcggtgaatacgttcccgggccttgtacacaccgcccgtcacgtcatgaaagtcggtaacacccgaagccggtgcccagggagccgtcgaaggtgggatcggcgattgggacgaagtcgtaacaaggtagccgtaccggaaggtgcggctggatcacctcctttct

SEQ ID NO: 1355 - DNA, 1375 bp, Nocardia sp.
  01-Je-025
cggtaaggcccttcggggtacacgagcggcgaacgggtgagtaacacgtgggtgatctgcctcgcacttcgggataagcctgggaaactgggtctaataccggatatgaccgactagtgcatgctggttggtggaaagatttatcggtgcgagatgggcccgcggcctatcagcttgttggtgaggtaacggctcaccaaggcgacgacgggtagccgacctgagagggtgaccggccacactgggactgagacacggcccagactcctacgggaggcagcagtggggaatattgcacaatgggcgaaagcctgatgcagcgacgccgcgtggaggatgacggccttcgggttgtaaactcctttcgacagggacgaagcgaaagtgacggtacctgtagaagaagcaccgggccaactacgtgccagcagccgcggtaatacgtagggtgcgagcgttgtccggaattactgggcgtaaagagcttgtaggcggtctgtcgcgtcttctgtgaaaacttggggctcaaccttaagcttgcaggcgatacgggcagactagagtacttcaggggagactggaattcctggtgtagcggtgaaatgcgcagatatcaggaggaacaccggtggcgaaggcgggtctctgggaagtaactgacgctgagaagcgaaagcatgggtagcaaacaggattagataccctggtagtccatgccgtaaacggtgggtactaggtgtgggtttccttccacgggatccgtgccgyagctaacgcattaagtaccccgcctggggagtacggccgcaaggctaaaactcaaagaaattgacgggggcccgcacaagcggcggagcatgtggattaattcgatgcaacgcgaagaaccttacctgggtttgacatacaccggaaacctgcagagatgtaggcccccttgtggtcggtgtacaggtggtgcatggctgtcgtcagctcgtgtcgtgagatgttgggttaagtcccgcaacgagcgcaacccttatcttatgttgccagcgcgtaatggcggggactcgtgagagactgccggggtcaactcggaggaaggtggggacgacgtcaagtcatcatgccccttatgtccagggcttcacacatgctacaatggccagtacagagggctgcgagaccgcgaggtggagcgaatcccttaaagctggtctcagttcggatcggggtctgcaactcgaccccgtgaagttggagtcgctagtaatcgcagatcagcaacgctgcggtgaatacgttcccgggccttgtacacaccgcccgtcacgtcatgaaagtcggtaacacccgaagccggtggcctaaccccttgtgggagggagcc

SEQ ID NO: 1356 - DNA, 1528 bp, Nocardiopsis dassonvillei
tttatggagagtttgatcctggctcaggacgaacgctggcggcgtgcttaacacatgcaagtcgagcggtaaggcccttcggggtacacgagcggcgaacgggtgagtaacacgtgagcaacctgcccctgactctgggataagcggtggaaacgccgtctaataccggatacgacccgccacctcatggtggagggtggaaagtttttcggtcagggatgggctcgcggcctatcagcttgttggtggggtaacggcctaccaaggcgattacgggtagccggcctgagagggcgaccggccacactgggactgagacacggcccagactcctgcgggaggcagcagtggggaatattgcgcaatgggcgaaagcctgacgcagcgacgccgcgtgggggatgacggccttcgggttgtaaacctcttttaccaccaacgcaggcttccagttctctggaggttgacggtaggtggggaataaggaccggctaactacgtgccagcagccgcggtaatacgtagggtccgagcgttgtccggaattattgggcgtaaagagctcgtaggcggcgtgtcgcgtctgctgtgaaagaccggggcttaactccggttctgcagtggatacgggcatgctagaggtaggtaggggagactggaattcctggtgtagcggtgaaatgcgcagatatcaggaggaacaccggtggcgaaggcgggtctctgggccttacctgacgctgaggagcgaaagcatggggagcgaacaggattagataccctggtagtccatgccgtaaacgttgggcgctaggtgtggggactttccacggtttccgcgccgtagctaacgcattaagcgccccgcctggggagtacggccgcaggctaaaactcaaggaattgacgggggcccgcacaagcggcggagcattgttgcttaattcgacgcagcgcgaagaaccttaccaaggtttgacatcacccgtggactcgcagagatgtgaggtcatttagttggcgggtgacaggtggggcatggctgtcgtcagctcgtgtcgtgagatgttgggttagtcccgcaacgagcgcaatccttgttcatgttgtcagcatgtatggtggggactcttgggagactggccggggtcaactcggagaagggtggggatgacgtcagtctcatgccccttatgtctgggctgcaaacatgctacaatggccggtacaatgggcgtgcgatacgtaaggtggagcgaatccctaaaagccggtctcagttcggattggggtctgcaactcgaccccatgaaggtggagtcgctagtaatcgcggatcagcaacgccgcggtgaatacgttcccgggccttgtacacaccgcccgtcacgtcatgaaagtcggcaacacccgaaacttgcggcctaaccccttgtgggagggagtgagtgaaggtggggctggcgattgggacgaagtcgtaacaaggtagccgtaccggaaggtgcggctggatcacctcctttct

SEQ ID NO: 1357 - DNA, 1486 bp, Novosphingobium aromaticivorans
aacttgagagtttgatcctggctcagaacgaacgctggcggcatgcctaacacatgcaagtcgaacgaacccttcggggttagtggcgcacgggtgcgtaacgcgtgggaatctgccctttgcttcggaataacagttagaaatgactgctaataccggatgatgtcttcggaccaaagatttatcggcaagggatgagcccgcgtaggattaggtagttggtggggtaaaggcctaccaagccgacgatccttagctggtctgagaggatgatcagccacactgggactgagacacggcccagactcctacgggaggcagcagtggggaatattggacaatgggcgcaagcctgatccagcaatgccgcgtgagtgatgaaggccttcgggtcgtaaagctcttttaccagggatgataatgacagtacctggagaataagctccggctaactccgtgccagcagccgcggtaatacggagggagctagcgttgttcggaattactgggcgtaaagcgcacgtaggcggctactcaagtcagaggtgaaagcccggggctcaaccccggaactgcctttgaaactaggtagctggaatcttggagaggtcagtggaattccgagtgtagaggtgaaattcgtagatattcggaagaacaccagtggcgaaggcgactgactggacaagtattgacgctgaggtgcgaaagcgtggggagcaaacaggattagataccctggtagtccacgccgtaaacgatgataactagctgtccggtcacttggtgattgggtggcgcagctaacgcattaagttatccgcctggggagtacggtcgcaagattaaaactcaaaggaattgacgggggcctgcacaagcggtggagcatgtggtttaattcgaagcaacgcgcagaaccttaccagcgtttgacatcccgcgctacttccagagatggaaggttcccttcggggacgcggtgacaggtgctgcatggctgtcgtcagctcgtgtcgtgagatgttgggttaagtcccgcaacgagcgcaaccctcgtccttagttgccatcatttagttgggcactctaaggaaaccgccggtgataagccggaggaaggtggggatgacgtcaagtcctcatggcccttacacgctgggctacacacgtgctacaatggcggtgacagtgggcagcaagcacgcgagtgtgagctaatctccaaaagccgtctcagttcggattgttctctgcaactcgagagcatgaaggcggaatcgctagtaatcgcggatcagcatgccgcggtgaatacgttcccaggccttgtacacaccgcccgtcacaccatgggagttgggttcacccgaaggcgttgcgctaactcgcaagagaggcaggcgaccacggtgggcttagcgactggggtgaagtcgtaacaaggtagccgtaggggaacctgcggctggatcacctcctttct

SEQ ID NO: 1358 - DNA, 1529 bp, Oceanobacillus caeni
agagtttgatcctggctcaggacgaacgctggcggcgtgcctaatacatgcaagtcgagcgctggaagctaatttcatcccttcgggatgaaattagtggaaagagcggcggacgggtgagtaacacgtgggcaacctacctataagactgggataactcgcggaaacgtgagctaataccggataatactttttattgcataataaggagtttgaaaggcggcgtaagctgtcacttatagatgggcccgcggcgcattagctagttggtgaggtaaaggctcaccaaggcaacgatgcgtagccgacctgagagggtgatcggccacactgggactgagacacggcccagactcctacgggaggcagcagtagggaatcttccgcaatggacgaaagtctgacggaacaacgccgcgtgagtgaagaaggttttcggatcgtaaaactctgttgttagggaagaacaagtcaggtagtaactgacctgaccttgacggtacctaaccagaaagccacggctaactacgtgccagcagccgcggtaatacgtaggtggcaagcgttgtccggatttattgggcgtaaagcgctcgcaggcggtcttttaagtctgatgtgaaagcccacggcttaaccgtggagggtcattggaaactggaggacttgagtgcagaagaggagagtggaattccatgtgtagcggtgaaatgcgtagagatatggaggaacaccagtggcgaaggcgactctctggtctgtaactgacgctgaggagcgaaagcgtgggtagcgaacaggattagataccctggtagtccacgccgtaaacgatgagtgctaggtgttagggggtttccgccccttagtgctgaagttaacgcattaagcactccgcctggggagtacggccgcaaggctgaaactcaaaagaattgacggggacccgcacaagcggtggagcatgtggtttaattcgaagcaacgcgaagaaccttaccaggtcttgacatcctttcgacctccctagagatagggatttcccttcggggacgaaagtgacaggtggtgcatggttgtcgtcagctcgtgtcgtgagatgttgggttaagtcccgcaacgagcgcaacccttgatcttagttgccagcattaagttgggcactctaaggtgactgccggtgacaaaccggaggaaggtggggatgacgtcaaatcatcatgccccttatgacctgggctacacacgtgctacaatggatggtacaaagggcagcgaaaccgcaaggtcaagcaaatcccataaaaccattctcagttcggattgtaggctgcaactcgcctacatgaagccggaatcgctagtaatcgcggatcagcatgccgcggtgaatacgttcccgggtcttgtacacaccgcccgtcacaccacgagagttggtaacacccgaagtcggtgaggtaaccttttggagccagccgccgaaggtgggaccaatgattggggtgaagtcgtaacaaggtaaccca

SEQ ID NO: 1359 - DNA, 1347 bp, Oceanobacillus sp.
  Ndiop
tcctggcaagaagatgaaaggcggcttttagctgtcacttacagatgggcccgcggcgcattagctagttggtgaggtaacggctcaccaaggcgacgatgcgtagccgacctgagagggtgatcggccacactgggactgagacacggcccagactcctacgggaggcagcagtagggaatcttccgcaatggacgaaagtctgacggagcaacgccgcgtgagtgatgaaggttttcggatcgtaaaactctgttgtcagggaagaacaagtgcgagagtaactgctcgcaccttgacggtacctgaccagaaagccacggctaactacgtgccagcagccgcggtaatacgtaggtggcaagcgttgtccggaattattgggcgtaaagcgctcgcaggcggtcttttaagtctgatgtgaaagcccacggcttaaccgtggagggtcattggaaactggaggacttgagtacagaagaggagagtggaattccacgtgtagcggtgaaatgcgtagagatgtggaggaacaccagtggcgaaggcgactctctggtctgtaactgacgctgaggagcgaaagcgtggggagcgaacaggattagataccctggtagtccacgccgtaaacgatgagtgctaggtgttagggggtttccgccccttagtgctgaagttaacgcattaagcactccgcctggggagtacggccgcaaggctgaaactcaaaagaattgacgggggcccgcacaagcggtggagcatgtggtttaattcgaagcaacgcgaagaaccttaccaggtcttgacatcctctgaccaccctagagatagggatttcccttcggggacagagtgacaggtggtgcatggttgtcgtcagctcgtgtcgtgagatgttgggttaagtcccgcaacgagcgcaacccttgatcttagttgccagcattcagttgggcactctaaggtgactgccggtgacaaaccggaggaaggtggggatgacgtcaaatcatcatgccccttatgacctgggctacacacgtgctacaatggatggaacaaagggaagcgaaaaccgcgaggtcaagcaaatcccataaaaccattctcagttcggattgcaggctgcaactcgcctgcatgaagccggaatcgctagtaatcgcggatcagcatgccgcggtgaatacgttcccgggccttgtacacaccgcccgtcacaccacgagagttggtaacacccgaagtcggtgaggtaaccttttggagccagccgccgaaggtgggactaatgattggggtgaagtcgtaacaaggtagccgtatcggaaggtgcggctg

SEQ ID NO: 1360 - DNA, 1487 bp, Ochrobactrum anthropi
ttcaacttgagagtttgatcctggctcagaacgaacgctggcggcaggcttaacacatgcaagtcgagcgccccgcaaggggagcggcagacgggtgagtaacgcgtgggaacgtaccttttgctacggaataactcagggaaacttgtgctaataccgtatgtgcccttcgggggaaagatttatcggcaaaggatcggcccgcgttggattagctagttggtgaggtaaaggctcaccaaggcgacgatccatagctggtctgagaggatgatcagccacactgggactgagacacggcccagactcctacgggaggcagcagtggggaatattggacaatgggcgcaagcctgatccagccatgccgcgtgagtgatgaaggccctagggttgtaaagctctttcaccggtgaagataatgacggtaaccggagaagaagccccggctaacttcgtgccagcagccgcggtaatacgaagggggctagcgttgttcggatttactgggcgtaaagcgcacgtaggcggacttttaagtcaggggtgaaatcccggggctcaaccccggaactgcctttgatactggaagtcttgagtatggtagaggtgagtggaattccgagtgtagaggtgaaattcgtagatattcggaggaacaccagtggcgaaggcggctcactggaccattactgacgctgaggtgcgaaagcgtggggagcaaacaggattagataccctggtagtccacgccgtaaacgatgaatgttagccgttggggagtttactcttcggtggcgcagctaacgcattaaacattccgcctggggagtacggtcgcaagattaaaactcaaaggaattgacgggggcccgcacaagcggtggagcatgtggtttaattcgaagcaacgcgcagaaccttaccagcccttgacataccggtcgcggacacagagatgtgtctttcagttcggctggaccggatacaggtgctgcatggctgtcgtcagctcgtgtcgtgagatgttgggttaagtcccgcaacgagcgcaaccctcgcccttagttgccagcatttagttgggcactctaaggggactgccggtgataagccgagaggaaggtggggatgacgtcaagtcctcatggcccttacgggctgggctacacacgtgctacaatggtggtgacagtgggcagcgagcacgcgagtgtgagctaatctccaaaagccatctcagttcggattgcactctgcaactcgagtgcatgaagttggaatcgctagtaatcgcggatcagcatgccgcggtgaatacgttcccgggccttgtacacaccgcccgtcacaccatgggagttggttttacccgaaggcgctgtgctaaccgcaaggaggcaggcgaccacggtagggtcagcgactggggtgaagtcgtaacaaggtagccgtaggggaacctgcggctggatcacctcctttct

SEQ ID NO: 1361 - DNA, 1493 bp, Ochrobactrum intermedium
aacttgagagtttgatcctggctcagaacgaacgctggcggcaggcttaacacatgcaagtcgagcgccccgcaaggggagcggcagacgggtgagtaacgcgtgggaacgtaccatttgctacggaataactcagggaaacttgtgctaataccgtatgagcccgaaaggggaaagatttatcggcaaatgatcggcccgcgttggattagctagttggtggggtaaaggcctaccaaggcgacgatccatagctggtctgagaggatgatcagccacactgggactgagacacggcccagactcctacgggaggcagcagtggggaatattggacaatgggcgcaagcctgatccagccatgccgcgtgagtgatgaaggccctagggttgtaaagctctttcaccggtgaagataatgacggtaaccggagaagaagccccggctaacttcgtgccagcagccgcggtaatacgaagggggctagcgttgttcggatttactgggcgtaaagcgcacgtaggcgggctaataagtcaggggtgaaatcccggggctcaaccccggaactgcctttgatactgttagtcttgagtatggtagaggtgagtggaattccgagtgtagaggtgaaattcgtagatattcggaggaacaccagtggcgaaggcggctcactggaccattactgacgctgaggtgcgaaagcgtggggagcaaacaggattagataccctggtagtccacgccgtaaacgatgaatgttagccgttggggagtttactcttcggtggcgcagctaacgcattaaacattccgcctggggagtacggtcgcaagattaaaactcaaaggaattgacgggggcccgcacaagcggtggagcatgtggtttaattcgaagcaacgcgcagaaccttaccagcccttgacatcccgatcgcggttagtggagacactatccttcagttcggctggatcggagacaggtgctgcatggctgtcgtcagctcgtgtcgtgagatgttgggttaagtcccgcaacgagcgcaaccctcgcccttagttgccagcattcagttgggcactctaaggggactgccggtgataagccgagaggaaggtggggatgacgtcaagtcctcatggcccttacgggctgggctacacacgtgctacaatggtggtgacagtgggcagcgagcacgcgagtgtgagctaatctccaaaagccatctcagttcggattgcactctgcaactcgagtgcatgaagttggaatcgctagtaatcgcggatcagcatgccgcggtgaatacgttcccgggccttgtacacaccgcccgtcacaccatgggagttggttttacccgaaggcgctgtgctaaccgcaaggaggcaggcgaccacggtagggtcagcgactggggtgaagtcgtaacaaggtagccgtaggggaacctgcggctggatcacctcctttctaaggaag

SEQ ID NO: 1362 - DNA, 1396 bp, Ochrobactrum pseudintermedium
gagagtttgatcctggctcagaacgaacgctggcggcaggcttaacacatgcaagtcgagcgcgtagcaatacgagcggcagacgggtgagtaacgcgtgggaatctacccatcactagggaataactcagggaaacttgtgctaataccctatacgaccgagaggtgaaagatttatcggtgatggatgagcccgcgttggattagctagttggtggggtaaaggcctaccaaggcgacgatccatagctggtctgagaggatgatcagccacactgggactgagacacggcccagactcctacgggaggcagcagtggggaatattggacaatgggcgcaagcctgatccagccatgccgcgtgagtgatgaaggccctagggttgtaaagctctttcaccggtgaagataatgacggtaaccggagaagaagccccggctaacttcgtgccagcagccgcggtaatacgaagggggctagcgttgttcggatttactgggcgtaaagcgcacgtaggcgggctaataagtcaggggtgaaatcccggggctcaaccccggaactgcctttgatactgttagtcttgagtatggaagaggtgagtggaattccgagtgtagaggtgaaatttgtagatattcggaggaacaccagtggcgaaggcggctcactggtccattactgacgctgaggtgcgaaagcgtggggagcaaacaggattagataccctggtagtccacgccgtaaacgatgaatgttagccgttggggagtttactcttcggtggcgcagctaacgcattaaacattccgcctggggagtacggtcgcaagattaaaactcaaaggaattgacgggggcccgcacaagcggtggagcatgtggtttaatttgaagcaacgcgcagaaccttaccagcccttgacatcccgatcgcggttagtggagacactttccttcagttcggctggatcggagacaggtgctgcatggctgtcgtcagctcgtgtcgtgagatgttgggttaagtcccgcaacgagcgcaaccctcgcccttagttgccagcattcagttgggcactctaaggggactgccggtgataagccgagaggaaggtggggatgacgtcaagtcctcatggcccttacgggctgggctacacacgtgctacaatggtggtgacagtgggcagcgagcacgcgagtgtgagctaatctccaaaagccatctcagttcggattgcactctgcaactcgagtgcatgaagttggaatcgctagtaatcgcggatcagcatgccgcggtgaatacgttcccgggccttgtacacaccgcccgtcacaccatgggagttggttttacccgaaggcgctgtgctaaccgcaaggaggc

SEQ ID NO: 1363 - DNA, 1317 bp, Odoribacter laneus
gatgaacgctagcgacaggcttaacacatgcaagtcgagggaccggcgcacgggtgagtaacgcgtatgcaacctgcctttgacagagggatagcccatggaaacgtggattaatacctcatagttaaaagtggtcaaagatgggcatgcgtcctattaggcagttggcggggtaacggcccaccaaaccgatgataggtaggggttctgagaggaaggtcccccacactggtactgagacacggaccagactcctacgggaggcagcagtgaggaatattggtcaatggtcgagagactgaaccagccaagtcgcgtgagggatgactgcctatgggttgtaaacctcttttctactgggagatgacagtacagtaggaataagcatcggctaactccgtgccagcagccgcggtaatacggaggatgcgagcgttatccggatttattgggtttaaagggtgcgtaggcggctttataagttagtggtaaaatttcggagcttcactccggtccgccattaaaactgtagagctagagaatggacgaggtaggcggaataagttaagtagcggtgaaatgcatagatataacttagaactccgatagcgaaggcagcttaccagaccaactgacgctgatgcacgagagcgtgggtagcgaacaggattagataccctggtagtccacgccgtaaacgatgctcaccggcccttagcgagttaggggttaattgaaagaattaagtgagccacctggggagtacgtcggcaacgatgaaactcaaaggaattgacgggggcccgcacaagcggaggaacatgtggtttaattcgatgatacgcgaggaaccttacctgggtttaaatgtacaaggtgctgcatggttgtcgtcagctcgtgccgtgaggtgtcgggttaagtcccataacgagcgcaacccttaccgttagttgctaacatatgagcactctagcgggactgccaccgtaaggtggaggaagggggggatgacgtcaaatcagcacggcccttacatccagggcgacacacgtgttacaatggccatcagcgggtagctaccgggtgaccggatgcaaatctcgatggtctaagttcggatggagtctgcaacccgactccagaagttggattcgctagtaatcgcgcatcagccatggcgcggtgaatacgttcccgggccttgtacacaccgcccgtcaagccatggaagctgggagtacctgaagtccgtatcggcctagggtaataccggtaactggggctaagtcgwaacaaggtagccgtaccggaagg

SEQ ID NO: 1364 - DNA, 1368 bp, Odoribacter splanchnicus
tcgaggggcagcatgaggtagcaataccttgatggcgaccggcgcacgggtgagtaacgcgtatgcaacctgcctgataccggggtatagcccatggaaacgtggattaacaccccatagtacttttatcctgcctgggatgggagttaaatgtttaaggtatcggatgggcatgcgtcctattagttagttggcggggtaacagcccaccaagacgatgataggtaggggttctgagaggaaggtcccccacattggaactgagacacggtccaaactcctacgggaggcagcagtgaggaatattggtcaatggacgtaagtctgaaccagccaagtcgcgtgagggaagactgccctatgggttgtaaacctcttttataagggaagaataagttctactgtaatgatgcctgtactgataagcatcggctatctgccagcagccgcggtaatacggaggatgcgagcgttatccggatttattgggtttaaagggtgcgtaggcggtttattaagttagtggttaaatatttgagctaaactcaattgtgccattaatactggtaaactggagtacagacgaggtaggcggaataagttaagtagcggtgaaatgcatagatataacttaaactccgatagcgaaggcagcttaccagactgtaactgacgtgatgcacgagagcgtgggtagcgaacaggattagataccctggtagtccacgccgtaaacgatgctcactggttctgtgcgatatattgtacgggattaagcgaaagtattaagtgagccacctggggagtacgtcggcaacgatgaaactcaaaggaattgacgggggcccgcacaagcggaggaacatgtggtttaattcgatgatacgcgaggaaccttacctgggtttaaatgggaaatgccgtatttggaaacagatattctcttcggagcgtttttcaaggtgctgcatggttgtcgtcagctcgtgccgtgaggtgtcgggttaagtcccataacgagcgcaacccttaccgttagttgctagcatgtaatgatgagcactctaacgggactgccaccgtaaggtgagaggaaggcggggatgacgtcaaatcagcacggcccttacacccagggctacacacgtgttacaatggccggtacagagggccgctaccaggtgactggatgccaatctcaaaagccggtcgtagttcggattggagtctgtaacccgactccatgaagttggattcgctagtaatcgcgcatcagccatggcgcggtgaatacgttcccgggccttgtacacaccgcccgtcaagccatggaagccgggggtgcctgaagtccgtaaccgcgaggat

SEQ ID NO: 1365 - DNA, 1398 bp, Okadaella gastrococcus
tgaagcttggtgcttgcaccgagcggatgagttgcgaacgggtgagtaacgcgtaggtaacctgcctcttagcgggggataactattggaaacgatagctaataccgcataaaagacgatatcgcatgatattgatttgaaaggtgcaattgcatcactaagagatggacctgcgttgtattagctagttggtgaggtaacggctcaccaaggcgacgatacatagccgacctgagagggtgatcggccacactgggactgagacacggcccagactcctacgggaggcagcagtagggaatcttcggcaatgggggcaaccctgaccgagcaacgccgcgtgagtgaagaaggttttcggatcgtaaagctctgttgtaagagaagaacgagtgtgagagtggaaagttcacactgtgacggtaacttaccagaaagggacggctaactacgtgccagcagccgcggtaatacgtaggtcccgagcgttatccggatttattgggcgtaaagcgagcgcaggcggttagataagtctgaagttaaaggctgtggcttaaccatagtacgctttggaaactgtttaacttgagtgcagaaggggagagtggaattccatgtgtagcggtgaaatgcgtagatatatggaggaacaccggtggcgaaagcggctctctggtctgtaactgacgctgaggctcgaaagcgtggggagcaaacaggattagataccctggtagtccacgccgtaaacgatgagtgctaggtgttgggtcctttccgggactcagtgccgcagctaacgcattaagcactccgcctggggagtacgaccgcaaggttgaaactcaaaggaattgacgggggcccgcacaagcggtggaacatgtggtttaattcgaagcaacgcgaagaaccttaccaggtcttgacatccctctgaccgctctagagatagagttttccttcgggacagaggtgacaggtggtgcatggttgtcgtcagctcgtgtcgtgagatgttgggttaagtcccgcaacgagcgcaacccctattgttagttgccatcattgagttgggcactctagcgagactgccggtaataaaccggaggaaggtggggatgacgtcaaatcatcatgccccttatgacctgggctacacacgtgctacaatggctggtacaacgagtcgcgagtcggtgacggcaagctaatctcttaaagccagtctcagttcggattgtaggctgcaactcgcctacatgaagtcggaatcgctagtaatcgcggatcagcacgccgcggtgaatacgttcccgggccttgtacacaccgcccgtcacaccacgagagtttgtaacacccgaagtcggtgaggtaaccgtaaggagccag

SEQ ID NO: 1366 - DNA, 1489 bp, Oligella ureolytica
attgaacgctagcgggatgctttacacatgcaagtcgaacggcagcacagaggaacttgttccttgggtggcgagtggcggacgggtgagtaatgtatcggaacgtgcccagtagtgggggataactacgcgaaagcgtggctaataccgcatattctctacggaggaaagggggggatcatttgacctctcgctattggagcggccgatattagattagctagttggtggggtaacggcctaccaaggcagtgatctatagctggtttgagaggacgaccagccacactgggactgagacacggcccagactcctacgggaggcagcagtggggaattttcgacaatggggggaaccctgatcgagccatcccgcgtgtgggacgaaggccttcgggttgtaaaccacttttctcaacgaagaaaagtcttaggctaataccttaagatgctgacggtagttgaggaataagcaccggctaactatgtgccagcagccgcggtaatacatagggtgcaagcgttaatcggaattactgggcgtaaagggtgcgcaggcggcttggaaagaacggtgtgaaatcccggggctcaacctcggaactgcactattaactatcaagctagagtatgtcagaggggggtggaattccgcgtgtagcagtgaaatgcgtagatatgcggaggaacaccaatggcgaaggcagccccctgggataatactgacgctcaggcacgaaagcgtgggtagcaaacaggattagataccctggtagtccacgccctaaacgatgtcaactagctgttgggccggttacggcttagtagcgcagctaacgcgtgaagttgaccgcctggggactacggtcgcaagactaaaactcaaaggaattgacggggacccgcacaagcggtggatgatgtggattaattcgatgcaacgcgaaaaaccttacctacccttgacatgcctggaagctttaagagattaaagtgtgctcgcaagagaaccggtgcacaggtgctgcatggctgtcgtcagctcgtgtcgtgagatgttgggttaagtcccgcaacgagcgcaacccttgtcattagttgctacgtaagagcactctagtgagactgccggtgacaaaccggaggaaggtggggatgacgtcaagtcctcatggcccttatgggtagggcttcacacgtcatacaatggtcgggacagagggttgccaagccgcgaggtggagctaatctcttaaacccgatcgtagtccggattgcaggctgcaactcgcctgcatgaagtcggaatcgctagtaatcgcagatcagaatgctgcggtgaatacgttcccgggtcttgtacacaccgcccgtcacaccatgggagtgggttttaccagaagtagttagtctaaccgcaagggggacgattaccacggtaggattcatgactggggtgaagtcgtaacaaggtagccgtaccggaagg

SEQ ID NO: 1367 - DNA, 1486 bp, Oligella urethralis
ttgatcctggctcagattgaacgctagcgggatgctttacacatgcaagtcgaacggcagcatgagagagcttgctctcttgatggcgagtggcggacgggtgagtaatgtatcggaacgtgcccggtagtgggggataactacgcgaaagcgtagctaataccgcatattctctacggaggaaagagggggatcgtaagacctcttgctaccggagcggccgatatcagattagctagttggtggggtaacggcctaccaaggcggtgatctgtagctggtttgagaggacgaccagccacactgggactgagacacggcccagactcctacgggaggcagcagtggggaattttcgacaatggggggaaccctgatcgagccatctcgcgtgtgggacgaaggccttcgggttgtaaaccacttttctcaacgaagaaaagtcttaggctaataccttaagatgctgacggtagttgaggaataagcaccggctaactacgtgccagcagccgcggtaatacgtagggtgcgagcgttaatcggaattactgggcgtaaagggtgcgcaggcggcttggaaagaacggtgtgaaatcccggggctcaacctcggaactgcactattaactgccaagctagagtatgtcagaggggggtggaattccgcgtgtagcagtgaaatgcgtagatatgcggaggaacaccgatggcgaaggcagccccctgggatggtactgacgctcaggcacgaaagcgtgggtagcgaacaggattagataccctggtagtccacgccctaaacgatgtcaactagctgttgggccggttacggcttagtagcgcagctaacgcgtgaagttgaccgcctggggactacggtcgcaagactaaaactcaaaggaattgacggggacccgcacaagcggtggatgatgtggattaattcgatgcaacgcgaaaaaccttacctacccttgacatgcccggaagcttcaagagattggagtgtgctcgcaagagaaccggagcacaggtgctgcatggctgtcgtcagctcgtgtcgtgagatgttgggttaagtcccgcaacgagcgcaacccttgtcattagttgctacgaaagggcactctaatgagactgccggtgacaaaccggaggaaggtggggatgacgtcaagtcctcatggcccttatgggtagggcttcacacgtcatacaatggtcaggacagcgggttgccaagccgcgaggtggagctaatctcttaaacctgatcgtagtccggattgcaggctgcaactcgcctgcatgaagtcggaatcgctagtaatcgcagatcagaatgctgcggtgaatacgttcccgggtcttgtacacaccgcccgtcacaccatgggagtgggttttaccagaagtagttagcctaaccgcaaggagggcgattaccacggtaggattcatgactggggtgaagtcgtaacaa

SEQ ID NO: 1368 - DNA, 1327 bp, Olsenella sp.
  C1
gatgaacgctggcggcgcgcctaacacatgcaagtcgaacgagtggcgaacggctgagtaacacgtgggcaatctgccctttgcatcgggacagcctcgggaaaccgtggttaataccggatactgaaaggcggcaagggatgggcccgcgccctgttagcttgttggtggggtaaaagcctaccaaggcaatgatgggtagccgggttgagagaccgaccggccagattgggactgagacacggcccagactcctacgggaggcagcagtggggaatcttgcacaatgggcgaaagcctgatgcagcgacgccgcgtgcgggatgaaggccttcgggttgtaaaccgctttcagcagggacgatgacggtacctgcagaagaagccccggctaactatgtgccagcagccgcggtaatacgtagggagcaagcgttatccggattcattgggcgtaaagcgcgcgtaggctgcccagtaggtcgagagttaaatccgggggctcaacccccgtccgctcccgataccgctgggttcgagtctggtaggggaaggtggaattcccagtgtagcggtggaatgcgcagatattgggaagaacaccggtggcgaaggcggccttctgggccaactgacgctgaggcgcgaaagctaggggagcgaacaggattagataccctggtagtcctagccgtaaacgatgggcactaggtgtggggatttccgtgccgacgctaacgcattaagtgccccgcctggggagtacggccgcaaggctaaaactcaaaggaattgacgggggcccgcacaagcagcggagcatgtggcttaattcgaagcaacgcgaagaaccttaccagggcttgacactacaggtggtgcatggctgtcgtcagctcgtgtcgtgagatgttgggttaagtcccgcaacgagcgcaaccctcgtcgcatgttgccagcggccgggcacccatgcgagaccgccggcgttaagccggaggaaggtggggacgacgtcaagtcatcatgccctctatgtcctgggctgcacacgtgctacaatggccggcagcggggtgccactgcgcgagcacaagcgaatccctccggtcccagttcggatggaggctgcaacccgcctccagaagtcggagttgctagtaatcgcggatcagcacgccgcggtgaatgcgttcccgggccttgtacacaccgcccgtcacaccacccgagtcgtctgcacccgaagtcgtcgcctagggaggcgccgaaggtgtggaaggtaaggggggtgaagtcgtaacaaggtaaccgtaagagaacctgc

SEQ ID NO: 1369 - DNA, 1428 bp, Olsenella profusa
gatgaacgctggcggcgcgcctaacacatgcaagtcgaacggttaaagcatcttcggatgtgcataaagtggcgaacggctgagtaacacgtgggcaacctgcccctcgcatcgggacagcctcgggaaaccgtggttaataccggatactccgccacccccgcatgggggaggcgggaaagcccagacggcgagggatgggcccgcggcctgttagcttgttggtggggcagtggcccaccaaggcgatgatgggtagccgggttgagagaccgaccggccagattgggactgagacacggcccagactcctacgggaggcagcagtggggaatcttgcacaatgggcgaaagcctgatgcagcgacgccgcgtgcgggacgaaggccttcgggtcgtaaaccgctttcagcagggacgaggccgcaaggtgacggtacctgcagaagaagccccggctaactacgtgccagcagccgcggtaatacgtagggggcgagcgttatccggattcattgggcgtaaagcgcgcgtaggcggcctgctaggtcgggagtcaaatccgggggctcaacccccgtccgctcccgataccggctggcttgagtctggtaggggaaggtggaattcccagtgtagcggtggaatgcgcagatattgggaagaacaccggtggcgaaggcggccttctgggccacgactgacgctgaggcgcgaaagctaggggagcgaacaggattagataccctggtagtcctagccgtaaacgatggacactaggtgtgggcggattgtccgtccgtgccgcagccaacgcattaagtgtcccgcctggggagtacggccgcaaggctaaaactcaaaggaattgacgggggcccgcacaagcagcggagcatgtggcttaattcgaagcaacgcgaagaaccttaccagggcttgacatctaggtgaagcggcggagacgccgtggccgagaggagcctagacaggtggtgcatggctgtcgtcagctcgtgtcgtgagatgttgggttaagtcccgcaacgagcgcaaccctcgtcgcatgttgccagcggttcggccgggcacccatgcgagaccgccggcgtcaagccggaggaaggtggggacgacgtcaagtcatcatgccccttatgtcctgggctgcacacgtgctacaatggccggcacaatgggctgccaccgcgcgagcgggagcgaatccccaaagccggccccagttcggactggaggctgcaacccgcctccacgaagtcggagttgctagtaatcgcggatcagcacgccgcggtgaatgcgttcccgggccttgtacacaccgcccgtcacaccacccgagtcgtctgcacccgaagtcgtcggcccaacccgcaagggagggaggcgccgaaggtgtggaaggta

SEQ ID NO: 1370 - DNA, 1489 bp, Olsenella sp.
  F0004
gagtttgatcctggctcaggatgaacgctggcggcgcgcctaacacatgcaagtcgaacggttaaagccccttcgggggtgcatagagtggcgaacggctgagtaacacgtgggcaacctgccccccgcaccgggacagcctcgggaaaccgtggttaataccggatactccgccacccccgcatgggggcggcgggaaagcccaggcggagggggatgggcccgcggcctgttagctcgttggcggggtaacggcccaccaaggcgatgatgggtagccgggttgagagaccgaccggccagattgggactgagacacggcccagactcctacgggaggcagcagtggggaatcttgcacaatgggcgaaagcctgatgcagcgacgccgcgtgcgggacgaaggccttcgggtcgtaaaccgctttcagcagggacgaggccgaaaggtgacggtacctgcagaagaagccccggctaactacgtgccagcagccgcggtaatacgtagggggcgagcgttatccggattcattgggcgtaaagcgcgcgcaggcggcctgctcggtcgggagtcaaatccgggggctcaacccccgcccgctcccgataccggcgggcttgagtctggtaggggaaggcggaattcccagtgtagcggtggaatgcgcagatattgggaagaacaccggtggcgaaggcggccttctgggccacgactgacgctgaggcgcgaaagctaggggagcgaacaggattagataccctggtagtcctagccgtaaacgatggacactaggtgtggggggaggatccctccgtgccgcagccaacgcattaagtgtcccgcctggggagtacggccgcaaggctaaaactcaaaggaattgacgggggcccgcacaagcagcggagcatgtggcttaattcgaagcaacgcgaagaaccttaccagggcttgacatgcgggtgaagcggcggagacgccgtggccgagaggagcccgcacaggtggtgcatggctgtcgtcagctcgtgtcgtgagatgttgggttaagtcccgcaacgagcgcaacccccgtcgcatgttgccagcggttaggccgggcacccatgcgagaccgccggcgtcaagccggaggaaggtggggacgacgtcaagtcatcatgccccttatgtcctgggctgcacacgtgctacaatggccggcacagcgggccgccaccgcgcgagcgggagcgaatccccaaagccggccccagttcggattggaggctgcaacccgcctccatgaagtcggagttgctagtaatcgcggatcagcacgccgcggtgaatgcgttcccgggccttgtacacaccgcccgtcacaccacccgagtcgtctgcacccgaagtcgccggcccaacccgcgagggggggaggcgccgaaggtgtggagggtaaggggggtgaagtcgtaacaaggtagccgtaccggaaggtgc

SEQ ID NO: 1371 - DNA, 1503 bp, Olsenella sp.
  oral taxon 809
agagttcgatcctggctcaggatgaacgctggcggcgcgcctaacacatgcaagtcgaacggttaagacgccttcgggcgtgtataaagtggcgaacggctgagtaacacgtgggcaacctgcccctcgcaccgggacagcctcgggaaaccgtggttaataccggatactccgcgcaccccgcatggggcgcgcgggaaagcccagacggcgagggatgggcccgcggcctgttagctagttggcggggcaacggcccaccaaggcgatgatgggtagccgggttgagagaccgaccggccagattgggactgagacacggcccagactcctacgggaggcagcagtggggaatcttgcacaatgggcgaaagcctgatgcagcgacgccgcgtgcgggacgaaggccttcgggtcgtaaaccgctttcagcagggacgaggccgcaaggtgacggtacctgcagaagaagccccggctaactacgtgccagcagccgcggtaatacgtagggggcgagcgttatccggattcattgggcgtaaagcgcgcgtaggcggcctgttaggtcgggagttaaatccgggggctcaacccccgtccgctcccgataccggcgggcttgagtctggtaggggaaggcggaattcccagtgtagcggtggaatgcgcagatattgggaagaacaccggtggcgaaggcggccttctgggccacgactgacgctgaggcgcgaaagctaggggagcgaacaggattagataccctggtagtcctagccgtaaacgatggacactaggtgtggggggacgatccctccgtgccgcagccaacgcattaagtgtcccgcctggggagtacggccgcaaggctaaaactcaaaggaattgacgggggcccgcacaagcagcggagcatgtggcttaattcgaagcaacgcgaagaaccttaccagggcttgacatctaggtgaagcggcggagacgccgtggccgagaggagcctagacaggtggtgcatggctgtcgtcagctcgtgtcgtgagatgttgggttaagtcccgcaacgagcgcaaccctcgtcgcatgttgccagcggtccggccgggcacccatgcgagaccgccggcgtcaagccggaggaaggtggggacgacgtcaagtcatcatgccccttatgtcctgggctgcacacgtgctacaatggccggcacaatgggctgccaccgcgcgagcgggagcgaatccccaaagccggccccagttcggactggaggctgcaacccgcctccacgaagtcggagttgctagtaatcgcggatcagcacgccgcggtgaatgcgttcccgggccttgtacacaccgcccgtcacaccacccgagtcgtctgcacccgaagtcgtcggcccaacccgcgagggggggaggcgccgaaggtgtggagggtaaggggggtgaagtcgtaacaaggtagccgtaccggaaggtgcggctggatcacct

SEQ ID NO: 1372 - DNA, 1503 bp, Olsenella uli
agagttcgatcctggctcaggatgaacgctggcggcgcgcctaacacatgcaagtcgaacggttaaagccccttcgggggtgcataaagtggcgaacggctgagtaacacgtgggcaacctgcccctcgcaccgggacagcctcgggaaaccgtggttaataccggatactcccgcacccccgcatgggggcgcggggaaagcccagacggcgagggatgggcccgcggcctgttagctcgttggcggggtaacggcccaccaaggcgatgatgggtagccgggttgagagaccgaccggccagattgggactgagacacggcccagactcctacgggaggcagcagtggggaatcttgcgcaatgggcggaagcctgacgcagcgacgccgcgtgcgggaaggaggccttcgggtcgtaaaccgctttcagcagggacgaggccgcgaggtgacggtacctgcagaagaagccccggctaactacgtgccagcagccgcggtaatacgtagggggcaagcgttatccggattcattgggcgtaaagcgcgcgtaggcggcctgttaggtcgggagtcaaatccgggggctcaacccccgcccgctcccgataccggcgggcttgagtctggcaggggaaggcggaattccaagtgtagcggtggaatgcgcagatatttggaagaacaccggtggcgaaggcggccttctgggccacgactgacgctgaggcgcgaaagctaggggagcgaacaggattagataccctggtagtcctagccgtaaacgatggacactaggtgtggggggacgatccctccgtgccgcagccaacgcattaagtgtcccgcctggggagtacggccgcaaggctaaaactcaaaggaattgacgggggcccgcacaagcagcggagcatgtggcttaattcgaagcaacgcgaagaaccttaccagggcttgacatccaggtgaagcggcggaaacgccgtggccggaaggagcctggacaggtggtgcatggctgtcgtcagctcgtgtcgtgagatgttgggttaagtcccgcaacgagcgcaacccccgtcgcatgttgccagcggtccggccgggcacccatgcgagaccgccggcgtcaagccggaggaaggtggggacgacgtcaagtcatcatgccccttatgccctgggctgcacacgtgctacaatggccggcacagcgggccgccaccgcgcgagcgggagcgaatccccaaagccggccccagttcggactggaggctgcaacccgcctccacgaagtcggagttgctagtaatcgcggatcagcacgccgcggtgaatgcgttcccgggccttgtacacaccgcccgtcacaccacccgagtcgtctgcacccgaagtcgtcggcccaacccgcgagggggggaggcgccgaaggtgtggagggtaaggggggtgaagtcgtaacaaggtagccgtaccggaaggtgcggctggatcacct

SEQ ID NO: 1373 - DNA, 1551 bp, Opitutus terrae
agagtttgatcctggctcagaatgaacgctggcggcgtggttaagacatgcaagtcgaacggtttttccggtgtagcaatacatcggaaagacagtggcgaacgggtgcgtaacacgtgaacaatctacctccaaatggggaatagctcggcgaaagccggattaataccgcatgtggttgcttctcgcatgagaggtataccaaagtcggggaccgcaaggcctgacgttaggagaggagttcgcggcctatcagctagttggcgaggtaacggctcaccaaggcaaagacgggtagctggtctgagaggatgatcagccacactggaactgagacacggtccagacacctacgggtggcagcagtttcgaatcattcacaatgggcgaaagcctgatggtgcgacgccgcgtgagggatgaaggtcttcggattgtaaacctctgtcaccggggaagaaacgctttatattaatcgtataaagcctgacttaacccggagaggaagcagtggctaactctgtgccagcagccgcggtaatacagagactgcgagcgttattcggattcactgggcgtaaagggtgcgcaggcggccgggtgtgtggggcgtgaaagcctggagcttaactccagaattgcgcctcaaactacacggctagagcattggagagggtagcggaattcacggtgtagcagtgaaatgcgtagatatcgtgaggaacaccagaggcgaaggcggctacctggacaattgctgacgctcaggcacgaaagcgtggggagcaaaagggattagatacccctgtagtccacgccctaaacggtgcacactaggtcttggcggattcgacccctccagggccccagctaacgcgttaagtgtgccgcctgaggactacggccgcaaggctaaaactcaaaggaattgacgggggcccgcacaagcggtggagtatgtggctcaattcgatgcaacgcgaagaaccttaccaagccttgacatgcattggacaggcgctgaaaggcgccctcccttcggggccggtgcacaggtgctgcatggctgtcgtcagctcgtgtcgtgagatgttgcgttaagtcgcgcaacgagcgcaacccctgtccttagttgccatcattcagttgggcactctagggagacaaaccctctttgagggtgggaaggtggggatgacgtcaagtcaggatggcccttacggcttgggctgcacacgtactacaatgcccggtacagagggacgcaataccgcgaggtggagcaaatcctcaaaaccgggcccagttcagattgtagtctgcaactcgactacatgaagttggaatcgctagtaatggcgcatcagctacggcgccgtgaatacgttcccgggccttgtacacaccgcccgtcacgtcatgaaagccggtttcgcccgaagtgcgtttgccaaccagcaatggaggcggcgccctaaggtgaggctggtgattgggacgaagtcgtaacaaggtagccgtaggggaacctgcggctggatcacctccttt

SEQ ID NO: 1374 - DNA, 1443 bp, Oribacterium sinus
ggaaagcttcggccggaagatacgttatctagtggcggacgggtgagtaacacgtgggtaacctgccttatggagggggataacagagagaaatcactgctaataccgcataagcacacagtaccgcatggtacagggtgaaaagatttatcgccataagatggacccgcgtctgattagccagttggcagggtaaaagcctaccaaagcaacgatcagtagccgatctgagaggatgaccggccacattgggactgagacacggcccaaactcctacgggaggcagcagtggggaatattgcacaatgggggaaaccctgatgcagcgacgccgcgtgagtgaagaagtatttcggtatgtaaagctctatcagcagggaagataatgacagtacctgactaagaagccccggctaactacgtgccagcagccgcggtaatacgtagggggcaagcgttatccggatttactgggtgtaaagggagcgtagacggaatggcaagtctgaagtgaaatacccgggctcaacctgggaactgctttggaaactgttgttctagagtgttggagaggtaagtggaattcctggtgtagcggtgaaatgcgtagatatcaggaagaacaccggaggcgaaggcggcttactggacaataactgacgttgaggctcgaaagcgtggggatcaaacaggattagataccctggtagtccacgctgtaaacgatgaatactaggtgtcggggtgcaaagcatctcggtgccgtcgctaacgcaataagtattccacctggggagtacgttcgcaagaatgaaactcaaaggaattgacggggacccgcacaagcggtggagcatgtggtttaattcgaagcaacgcgaagaaccttaccaagtcttgagatcccattgacagagtatgtaatgtactttcccttcggggcaatggtgacaggtggtgcatggttgtcgtcagctcgtgtcgtgagatgttgggttaagtcccgcaacgagcgcaacccctatagttagtagccagcagtaagatgggcactctaactagactgccagggataacctggaggaaggcggggatgacgtcaaatcatcatgccccttatgacttgggctacacacgtgctacaatggcgtaaacaaagggaagcaagagggtgaccttaagcaaatctcaaaaataacgtctcagttcggactgtagtctgcaacccgactacacgaagctggaatcgctagtaatcgcagatcagcatgctgcggtgaatacgttcccgggtcttgtacacaccgcccgtcacaccatgggagttggtaatgcccgaagtcagtgtcccaagaaagggagctgccgaaggcaggactgatgactggggtgaagtcgtaacaaggtagccgtatcggaaggtgcggctggatcacctcctt

SEQ ID NO: 1375 - DNA, 1378 bp, Oribacterium sp.
  ACB1
gatatgttatctagtggcggacgggtgagtaacacgtgggtaacctgccttatggagggggataacagagagaaatcactgctaataccgcataagcacacattgccgcatggcagagtgtgaaaagatttatcgccataagatggacccgcgtctgattagccagttggcagggtaaaagcctaccaaagcaacgatcagtagccgatctgagaggatgaccggccacattgggactgagacacggcccaaactcctacgggaggcagcagtggggaatattgcacaatgggggaaaccctgatgcagcgacgccgcgtgagtgaagaagtatttcggtatgtaaagctctatcagcagggaagataatgacagtacctgactaagaagccccggctaactacgtgccagcagccgcggtaatacgtagggggcaagcgttatccggatttactgggtgtaaagggagcgtagacggaatggcaagtctgaagtgaaaaccccgggctcaacctggggactgctttggaaactgttgttctagagtgttggagaggtaagtggaattcctggtgtagcggtgaaatgcgtagatatcaggaagaacaccggaggcgaaggcggcttactggacaataactgacgttgaggctcgaaagcgtggggatcaaacaggattagataccctggtagtccacgctgtaaacgatgaatactaggtgtcggggtgcaaagcatctcggtgccgtcgctaacgcaataagtattccacctggggagtacgttcgcaagaatgaaactcaaaggaattgacggggacccgcacaagcggtggagcatgtggtttaattcgaagcaacgcgaagaaccttaccaagtcttgagatcccattgacagagtgtgtaatgcactttcccttcggggcaatggtgacaggtggtgcatggttgtcgtcagctcgtgtcgtgagatgttgggttaagtcccgcaacgagcgcaacccctatagttagtagccagcagtaagatgggcactctaactagactgccagggataacctggaggaaggcggggatgacgtcaaatcatcatgccccttatgacttgggctacacacgtgctacaatggcgtaaacaaagggaagcaagagggtgaccttaagcaaatctcaaaaataacgtctcagttcggactgtagtctgcaacccgactacacgaagctggaatcgctagtaatcgcagatcagcatgctgcggtgaatacgttcccgggtcttgtacacaccgcccgtcacaccatgggagttggtaatgcccgaagtcagtgttccaaaagaggaagctgccgaaaggcaggactgatgactggggtgaa

SEQ ID NO: 1376 - DNA, 1436 bp, Oribacterium sp.
  ACB7
  modified_base (45)..(45): a, c, t, g, unknown or other
  modified_base (164)..(164): a, c, t, g, unknown or other
gcggcgtgcctaacacatgcaagtcgaacgagatgcgtattgganagcttcggccggaagatgcgttatctagtggcggacgggtgagtaacacgtgggtaacctgccttatggagggggataacagagagaaatcactgctaataccgcataagcacacagtnccgcatggcagagtgtgaaaagatttatcgccataagatggacccgcgtctgattagccagttggcagggtaaaagcctaccaaagcaacgatcagtagccgatctgagaggatgaccggccacattgggactgagacacggcccaaactcctacgggaggcagcagtggggaatattgcacaatgggggaaaccctgatgcagcgacgccgcgtgagtgaagaagtatttcggtatgtaaagctctatcagcagggaagataatgacagtacctgactaagaagccccggctaactacgtgccagcagccgcggtaatacgtagggggcaagcgttatccggatttactgggtgtaaagggagcgtagacggagtggcaagtctgaagtgaaaaccctgggcttaacctggggactgctttggaaactgttaatctagagtgttggagaggtaagtggaattcctggtgtagcggtgaaatgcgtagatatcaggaagaacaccggaggcgaaggcggcttactggacaataactgacgttgaggctcgaaagcgtggggatcaaacaggattagataccctggtagtccacgctgtaaacgatgaatactaggtgtcggggagcaaagcttctcggtgccgtcgctaacgcaataagtattccacctggggagtacgttcgcaagaatgaaactcaaaggaattgacggggacccgcacaagcggtggagcatgtggtttaattcgaagcaacgcgaagaaccttaccaagtcttgagatcccattgacagagtgtgtaatgcattttcccttcggggcaatggtgacaggtggtgcatggttgtcgtcagctcgtgtcgtgagatgttgggttaagtcccgcaacgagcgcaacccctatagttagtagccagcagtaagatgggcactctaactagactgccagggataacctggaggaaggcggggatgacgtcaaatcatcatgccccttatgacttgggctacacacgtgctacaatggcgtaaacaaagggaagcaagagggtgaccttaagcaaatctcaaaaataacgtctcagttcggactgtagtctgcaacccgactacacgaagctggaatcgctagtaatcgcagatcagcatgctgcggtgaatacgttcccgggtcttgtacacaccgcccgtcacaccatgggagttggtaatgcccgaagtcagtgtcccaagagagggagctgccgaaggcaggactgatgactggggtgaa

SEQ ID NO: 1377 - DNA, 1372 bp, Oribacterium sp.
  CM12
gctcaggatgaacgctggcggcgtgcctaacacatgcaagtcgaacgagatgcttatcggaaagcttcggccggaagatacgttatctagtggcggacgggtgagtaacacgtgggtaacctgccttatggagggggataacagagagaaatcactgctaataccgcataagcacacagtaccgcatggtacagggtgaaaagatttatcgccataagatggacccgcgtctgattagccagttggcagggtaaaagcctaccaaagcaacgatcagtagccgatctgagaggatgaccggccacattgggactgagacacggcccaaactcctacgggaggcagcagtggggaatattgcacaatgggggaaaccctgatgcagcgacgccgcgtgagtgaagaagtatttcggtatgtaaagctctatcagcagggaagataatgacagtacctgactaagaagccccggctaactacgtgccagcagccgcggtaatacgtagggggcaagcgttatccggatttactgggtgtaaagggagcgtagacggaatggcaagtctgaagtgaaatacccgggctcaacctgggaactgctttggaaactgttgttctagagtgttggagaggtaagtggaattcctggtgtagcggtgaaatgcgtagatatcaggaagaacaccggaggcgaaggcggcttactggacaataactgacgttgaggctcgaaagcgtggggatcaaacaggattagataccctggtagtccacgctgtaaacgatgaatactaggtgtcggggtgcaaagtatctcggtgccgtcgctaacgcaataagtattccacctggggagtacgttcgcaagaatgaaactcaaaggaattgacggggacccgcacaagcggtggagcatgtggtttaattcgaagcaacgcgaagaaccttaccaagtcttgagatcccattgacagagtatgtaatgtactttcccttcggggcaatggtgacaggtggtgcatggttgtcgtcagctcgtgtcgtgagatgttgggttaagtcccgcaacgagcgcaacccctatagttagtagccagcagtaagatgggcactctaactagactgccagggataacctggaggaaggcggggatgacgtcaaatcatcatgccccttatgacttgggctacacacgtgctacaatggcgtaaacaaagggaagcaagagggtgaccttaagcaaatctcaaaaataacgtctcagttcggactgtagtctgcaacccgactacacgaagctggaatcgctagtaatcgcagatcagcatgctgcggtgaatacgttcccgggtcttgtacacaccgcccgtc

SEQ ID NO: 1378 - DNA, 1425 bp, Oribacterium sp.
  ICM51
caggatgaacgctggcggcgtgcctaacacatgcaagtcgaacgagatgcgtatcggaaagcttcggccggaagatacgttatctagtggcggacgggtgagtaacacgtgggtaacctgccttatggagggggataacagagagaaatcactgctaataccgcataagcacacagtaccgcatggtacagggtgaaaagatttatcgccataagatggacccgcgtctgattagccagttggcagggtaaaagcctaccaaagcaacgatcagtagccgatctgagaggatgaccggccacattgggactgagacacggcccaaactcctacgggaggcagcagtggggaatattgcacaatgggggaaaccctgatgcagcgacgccgcgtgagtgaagaagtatttcggtatgtaaagctctatcagcagggaagataatgacagtacctgactaagaagccccggctaactacgtgccagcagccgcggtaatacgtagggggcaagcgttatccggatttactgggtgtaaagggagcgtagacggaatggcaagtctgaagtgaaatacccgggctcaacctgggaactgctttggaaactgttgttctagagtgttggagaggtaagtggaattcctggtgtagcggtgaaatgcgtagatatcaggaagaacaccggaggcgaaggcggcttactggacaataactgacgttgaggctcgaaagcgtggggatcaaacaggattagataccctggtagtccacgctgtaaacgatgaatactaggtgtcggggtgcaaagcatctcggtgccgtcgctaacgcaataagtattccacctggggagtacgttcgcaagaatgaaactcaaaggaattgacggggacccgcacaagcggtggagcatgtggtttaattcgaagcaacgcgaagaaccttaccaagtcttgagatcccattgacagagtatgtaatgtactttcccttcggggcaatggtgacaggtggtgcatggttgtcgtcagctcgtgtcgtgagatgttgggttaagtcccgcaacgagcgcaacccctatagttagtagccagcagtaagatgggcactctaactagactgccagggataacctggaggaaggcggggatgacgtcaaatcatcatgccccttatgacttgggctacacacgtgctacaatggcgtaaacaaagggaagcaagagggtgaccttaagcaaatctcaaaaataacgtctcagttcggactgtagtctgcaacccgactacacgaagctggaatcgctagtaatcgcagatcagcatgctgcggtgaatacgttcccgggtcttgtacacaccgcccgtcacaccatgggagttggtaatgcccgaagtcagtgtcccaagaaagggagctgccga

SEQ ID NO: 1379 - DNA, 1259 bp, Oribacterium sp.
  OBRC12
tcaggatgaacgctggcggcgtgcctaacacatgcaagtcgaacgagtggcggacgggtgagtaacacgtgggtaacctgccttatggagggggataacagagagaaatcactgctaataccgcataagaaaagtcgccataagatggacccgcgtctgattagccagttggcagggtaaaagcctaccaaagcaacgatcagtagccgatctgagaggatgaccggccacattgggactgagacacggcccaaactcctacgggaggcagcagtggggaatattgcacaatgggggaaaccctgatgcagcgacgccgcgtgagtgaagaagtatttcggtatgtaaagctctatcagcagggaagatgacagtacctgactaagaagccccggctaactacgtgccagcagccgcggtaatacgtagggggcaagcgttatccggatttactgggtgtaaagggagcgtagacggaatggcaagtctgaagtgaaatacccgggctcaacctgggaactgctttggaaactgttgttctagagtgttggagaggtaagtggaattcctggtgtagcggtgaaatgcgtagatatcaggaagaacaccggaggcgaaggcggcttactggacaaactgacgttgaggctcgaaagcgtggggatcaaacaggattagataccctggtagtccacgctgtaaacgatgaatactaggtgtcggggtctcggtgccgtcgctaacgcaataagtattccacctggggagtacgttcgcaagaatgaaactcaaaggaattgacggggacccgcacaagcggtggagcatgtggtttaattcgaagcaacgcgaagaaccttaccaagtcttgagatcgacaggtggtgcatggttgtcgtcagctcgtgtcgtgagatgttgggttaagtcccgcaacgagcgcaacccctatagttagtagccagcatgggcactctaactagactgccagggataacctggaggaaggcggggatgacgtcaaatcatcatgccccttatgacttgggctacacacgtgctacaatggcgtacaaagggaagcaagagggtgaccttaagcaaatctcaaaacgtctcagttcggatgtagtctgcaacccgactacagaagctggaatcgctagtaatcgcagatcagcatgctgcggtgaatacgttcccgggtcttgtacacaccgcccgtcacaccatgggagttggtaatgcccgaagtcagt

SEQ ID NO: 1380 - DNA, 1523 bp, Oribacterium sp.
  oral taxon 078
aatgagagttcgatcctggctcaggatgaacgctggcggcgtgcctaacacatgcaagtcgaacggagtccagcctttaagaccttcgggtcaaagaggggaagactgagtggcggacgggtgagtaacacgtgggcaacctggctcatagagggggataacagagagaaatttctgctaataccgcataagcacacactgccacatggcagagggtgaaaagagaatcgctatgagatggacccgcgtctgattagccagttggcagggtaagagcctaccaaagcgacgatcagtagccgatctgagaggatgaacggccacattgggactgagacacggcccaaactcctacgggaggcagcagtgggggatattgcacaatggggggaaccctgatgcagcgacgccgcgtgagtgaagaagtatttcggtatgtaaagctctatcagcagggaagataatgacagtacctgaataagaagccccggctaactacgtgccagcagccgcggtaatacgtagggggcaagcgttatccggatttactgggtgtaaagggagcgtagacggaatggcaagtctgaagtgaaatgcccgggctcaacccgggaactgctttggaaactgtcgatctggagtgttggagaggtaagtggaattcctggtgtagcggtgaaatgcgtagagatcaggaagaacaccggaggcgaaggcggcttactggacaaagactgacgttgaggctcgaaagcgtgggaagcaaacaggattagataccctggtagtccacgccgtaaacgatgaatactaggtgtcggtctccgaaggagatcggtgccgacgcaaacgcaataagtattccacctggggagtacgttcgcaagaatgaaactcaaaggaattgacggggacccgcacaagcggtggagcatgtggtttaattcgaagcaacgcgaagaaccttaccaggtcttgagatcccgatgacagaagatgtaatgccttttcccttcggggcattggagacaggtggtgcatggttgtcgtcagctcgtgtcgtgagatgttgggttaagtcccgcaacgagcgcaacccttatcgtcagtagccagcagtaagatgggcactctgatgagactgccggggataacccggaggaaggcggggatgacgtcaaatcatcatgccccttatgacctgggcgacacacgtgctacaatggcggaaacagagggaagcgagggggcgacccggagcaaatctcaaaaataccgtctcagttcggactgcagtctgcaactcgactgcacgaagccggaatcgctagtaatcgcggatcagcatgccgcggtgaatccgttcccgggtcttgtacacaccgcccgtcacaccatgggagtcggtaatgcccgaagtcagtgacccaaaagagggagctgccgaaggcaggacagataactggggtgaagtcgtaacaaggtagccgtatcggaaggtgcggctggatcacctcctttct

SEQ ID NO: 1381 - DNA, 1497 bp, Oribacterium sp.
  oral taxon 102
gagtttgatcctggctcaggatgaacgctggcggcgtgcctaacacatgcaagtcgaacggggttctatatcggaagttttcggatggaagagataggacccagtggcggacgggtgagtaacacgtgggtaacctgcctcatagagggggataacagagagaaatcactgctaataccgcataagcacacgggatcgcatgatcctgggtgaaaagatttatcgctatgagatggactcgcgtctgattagctggttggcggggtaaaggcccaccaaggcgacgatcagtagccgatctgagaggatggccggccacattgggactgagacacggcccagactcctacgggaggcagcagtgggggatattgcacaatggagggaactctgatgcagcaacgccgcgtgagtgaagaagtatttcggtatgtaaagctctatcagcagggaagatgatgacagtacctgaataagaagccccggctaactacgtgccagcagccgcggtaatacgtagggggcaagcgttatccggatttactgggtgtaaagggagcgtagacggcgaagcaagtctgaagtgaaaatccggggctcaactccggaagtgctttggaaactgttttgatagagtgtcggagaggtaagtggaattcctggtgtagcggtgaaatgcgtagatatcaggaagaacaccggaggcgaaggcggcttactggacgataactgacgttgaggctcgaaagcgtgggaagcaaacaggattagataccctggtagtccacgccgtaaacgatgaatactaggtgtcgggggcgaagcccttcggtgccgtcgcaaacgcaataagtattccacctggggagtacgttcgcaagaatgaaactcaaaggaattgacggggacccgcacaagcggtggagcatgtggtttaattcgaagcaacgcgaagaaccttaccaagtcttgacatcccattgacagagcatgtaatgtgctttcccctcggggcaatggagacaggtggtgcatggttgtcgtcagctcgtgtcgtgagatgttgggttaagtcccgcaacgagcgcaacccctatattcagtagccagcagtaagatgggcactctggagagactgccagggataacctggaggaaggcggggatgacgtcaaatcatcatgccccttatgacttgggcgacacacgtgctacaatggcgtaaacaaagggaagcgagctcgcgagagtaagcgaaactcaaaaataacgtctcagttcggactgtagtctgcaacccgactacacgaagctggaatcgctagtaatcgcagatcagcatgctgcggtgaatacgttcccgggtcttgtacacaccgcccgtcacaccatgggagtcggtaatgcccgaagccagtgaaccaagagagggagctgtcgaaggcaggactgataactggggtgaagtcgtaacaaggtagccgtatcggaaggtgc

SEQ ID NO: 1382 - DNA, 1527 bp, Oribacterium sp.
  oral taxon 108
tttattatgagagttcgatcctggctcaggatgaacgctggcggcgtgcctaacacatgcaagtcgaacgagatgcgtatcggaaagcttcggccggaagatacgttatctagtggcggacgggtgagtaacacgtgggtaacctgccttatggagggggataacagagagaaatcactgctaataccgcataagcacacattgccgcatggcagagtgtgaaaagatttatcgccataagatggacccgcgtctgattagccagttggcagggtaaaagcctaccaaagcaacgatcagtagccgatctgagaggatgaccggccacattgggactgagacacggcccaaactcctacgggaggcagcagtggggaatattgcacaatgggggaaaccctgatgcagcgacgccgcgtgagtgaagaagtatttcggtatgtaaagctctatcagcagggaagataatgacagtacctgactaagaagccccggctaactacgtgccagcagccgcggtaatacgtagggggcaagcgttatccggatttactgggtgtaaagggagcgtagacggaatggcaagtctgaagtgaaaaccctgggctcaacctggggactgctttggaaactgttgttctagagtgttggagaggtaagtggaattcttggtgtagcggtgaaatgcgtagatatcaggaagaacaccggaggcgaaggcggcttactggacaataactgacgttgaggctcgaaagcgtggggatcaaacaggattagataccctggtagtccacgctgtaaacgatgaatactaggtgtcggggagcaaagcatctcggtgccgtcgctaacgcaataagtattccacctggggagtacgttcgcaagaatgaaactcaaaggaattgacggggacccgcacaagcggtggagcatgtggtttaattcgaagcaacgcgaagaaccttaccaagtcttgagatcccattgacagagtgtgtaatgcattttcccttcggggcaatggtgacaggtggtgcatggttgtcgtcagctcgtgtcgtgagatgttgggttaagtcccgcaacgagcgcaacccctatagttagtagccagcagtaagatgggcactctaactagactgccagggataacctggaggaaggcggggatgacgtcaaatcatcatgccccttatgacttgggctacacacgtgctacaatggcgtaaacaaagggaagcaagagggtgaccttaagcaaatctcaaaaataacgtctcagttcggactgtagtctgcaacccgactacacgaagctggaatcgctagtaatcgcagatcagcatgctgcggtgaatacgttcccgggtcttgtacacaccgcccgtcacaccatgggagttggtaatgcccgaagtcaatgttccaagagaggaagctgccgaaggcaggactgatgactggggtgaagtcgtaacaaggtagccgtatcggaaggtgcggctggatcacctcctttct

SEQ ID NO: 1383 - DNA, 1506 bp, Orientia tsutsugamushi
tcaaacttaagagtttgatcctggctcagaacgaacgctggcggcatgcctaacacatgcaagtcgaacgaattaatgctgagcttgcttagcattaattagtggcaaacgggtgagtaacacgtgggaatctgcccatcagtacggaataacatttagaaataagtgctaataccgtatgccctctacaaggaggaaagatttatcgctgatggatgagcccgcggcagattaggtagttggtaaggtaatggcttaccaagcctgtgatctgtagctggtctgagaggacgaacagccacactgggactgagacacggcccagactcctacggggggcagcagtggggaatattggacaatgggcgaaagcctgatccagcaatgccgcgtgagtgatgaaggccttagggttgtaaagctcttttagtagggatgataatgacagtacctacagaaaaagccccggctaactccgtgccagcagccgcggtaagacggagggggctagcgttgttcggaattactgggcgtaaagggcgcgtaggcggtttaataagttaggagtgaaatcccggggcttaaccctggaactgcttctaaaactgttaggctagagtgtggtagaggatgatggaatttctagtgtagaggtaaaattcttagatattagaaggaacaccagtggcgaaagctgtcatctgggccattactgacgctgaggcgcgaaagcgtggggagcaaacaggattagataccctggtagtccacgctgtaaacgatgagtgctagatattgggggatttttctttcagtttcgtagctaacgcattaagcactccgcctggggagtacggtcgcaagattaaaactcaaaggaattgacgggggcccgcacaagcggtggagcatgcggtttaattcgatgatccgcgaaaaaccttaccaactcttgacatggtagtcgcgaaaaatggagacatttttcttcagtttggctggactacacacaggtgttgcatggctgtcgtcagctcgtgtcgtgagatgttgggttaagtcccgcaacgagcgcaacccttattcttatttgccagcgggtaatgccgggaactataggaaaactgccggtgctaagccggaggaaggtggggatgaggtcaagtcatcatggcccttatgagttgggctacacgcgtgctacaatggtacctacagaatgatgcaatacggtaacgtggagctaatcattaaaaggtatctcagttcggattgcactctgcaactcgagtgcatgaagtcggaatcgctagtaatcgcggatcagcatgccgcggtgaatacgttctcgggccttgtacacactgcccgtcgcaccatgggagtcagtggtacctgaagttggtgagctaacgtaagaggcagctaaccacggtagaactggtgactggggtaaagtcgtaacaaggtagccgtaggggaacctgcggctggattacctccttt

SEQ ID NO: 1384 - DNA, 1451 bp, Ornithinibacillus bavariensis
ccttcggggtgaaagtagtggatcgagcggcggacgggtgagtaacacgtgggcaacctgcctgtaagactgggataactcgcggaaacgcgagctaataccggataatactttttatcacatggtaagaagatgaaaggcggcgtaagctgtcacttacagatgggcccgcggcgcattagctagttggtgaggtaacggctcaccaaggcgacgatgcgtagccgacctgagagggtgatcggccacactgggactgagacacggcccagactcctacgggaggcagcagtagggaatcttccgcaatggacgaaagtctgacggagcaacgccgcgtgagtgatgaaggttttcggattgtaaaactctgttgttagggaagaacaagtacaagagtaactgcttgtaccttgacggtacctaaccagaaagccccggctaactacgtgccagcagccgcggtaatacgtagggggcgagcgttgtccggaattattgggcgtaaagcgcgcgcaggcggttctttaagtctgatgtgaaagcccacggcttaaccgtggagggtcattggaaactggaggacttgagtgcagaagaggagagtggaattccacgtgtagcggtgaaatgcgtagagatgtggaggaacaccagtggcgaaggcgactctctggtctgtaactgacgctgaggcgcgaaagcgtggggagcgaacaggattagataccctggtagtccacgccgtaaacgatgagtgctaggtgttagggggtttccgccccttagtgctgaagttaacgcattaagcactccgcctggggagtacggccgcaaggctgaaactcaaaagaattgacgggggccgcacaagcggtggagcatgtggtttaattcgaagcaacgcgaagaaccttaccaggtcttgacatcctctgaccaccctagagatagggctttcccttcggggacagagagacaggtggtgcatggttgtcgtcagctcgtgtcgtgagatgttgggttaagtcccgcaacgagcgcaacccttgatcttagttgccagcattcagttgggcactctaaggtgactgccggtgacaaaccggaggaaggtggggatgacgtcaaatcatcatgccccttatgacctgggctacacacgtgctacaatggatggtacaaagggcagcgaagccgcgaggtgaagcaaatcccataaaaccattctcagttcggattgcaggctgcaactcgcctgcatgaagccggaatcgctagtaatcgcggatcagcatgccgcggtgaatacgttcccgggccttgtacacaccgcccgtcacaccacgagagttggtaacacccgaagtcggtgaggtaaccttttggagccagccgcctaaggtgggaccaatgattggggtgaagtcgtaacaaggtagccgtgtcga

SEQ ID NO: 1385 - DNA, 1504 bp, Ornithinibacillus sp.
  7-10AIA
tggctcaggacgaacgctggcggcgtgcctaatacatgcaagtcgagcgagtgaaattaactgatcccttcggggtgacgttaatggatctagcggcggacgggtgagtaacacgtgggcaacctgcctgtaagactgggataactcgcggaaacgtgagctaataccggataacacttcgaaccacatggtttgaagatgaaaggcggcgcaagctgtcacttacagatgggcccgcggcgcattagctagttggtgaggtaacggctcaccaaggcgacgatgcgtagccgacctgagagggtgatcggccacactgggactgagacacggcccagactcctacgggaggcagcagtagggaatcttccgcaatggacgaaagtctgacggagcaacgccgcgtgagtgatgaaggttttcggattgtaaaactctgttgttagggaagaacaagtacaatagtaactgattgtaccttgacggtacctaaccagaaagccccggctaactacgtgccagcagccgcggtaatacgtagggggcaagcgttgtccggaattattgggcgtaaagcgcgcgcaggcggtcctttaagtctgatgtgaaagcccacggcttaaccgtggagggtcattggaaactggaggacttgagtgcagaagaggagagtggaattccacgtgtagcggtgaaatgcgtagagatgtggaggaacaccagtggcgaaggcgactctctggtctgtaactgacgctgaggcgcgaaagcgtggggagcgaacaggattagataccctggtagtccacgccgtaaacgatgagtgctaggtgttagggggtttccgccccttagtgctgaagttaacgcattaagcactccgcctggggagtacggccgcaaggctgaaactcaaaagaattgacgggggcccgcacaagcggtggagcatgtggtttaattcgaagcaacgcgaagaaccttaccaggtcttgacatcctctgaccaccctagagatagggctttcccttcggggacagagtgacaggtggtgcatggttgtcgtcagctcgtgtcgtgagatgttgggttaagtcccgcaacgagcgcaacccttattcttagttgccagcatttagttgggcactctaaggagactgccggtgacaaaccggaggaaggtggggatgacgtcaaatcatcatgccccttatgacctgggctacacacgtgctacaatggatggtacaaagggcagcaaaaccgcgaggtcgagcaaatcccataaaaccattctcagttcggattgcaggctgcaactcgcctgcatgaagccggaatcgctagtaatcgcggatcagcatgccgcggtgaatacgttcccgggccttgtacacaccgcccgtcacaccacgagagttggtaacacccgaagtcggtgaggtaaccttttggagccagccgcctaaggtgggaccaatgattggggtgaagtcgtaacaa

SEQ ID NO: 1386 - DNA, 1420 bp, Oscillibacter sp.
  G2
  modified_base (72)..(72): a, c, t, g, unknown or other
ggacctggctcaggacgaacgctggcggcgtgcttaacacatgcaagtcgaacggagcacccttgaatgagntttcggycaaaggaaaggaatgcttagtggcggactggtgagtaacgcgtgaggaacctgcctttcagagggggacaacagctggaaacggctgctaataccgcatgacgcattcggatggcatcatctgaatgccaaagatttatcgctgaaagatggcctcgcgtctgattagatagttggcggggtaacggcccaccaagtcgacgatcagtagccggactgagaggttgaccggccacattgggactgagatacggcccagactcctacgggaggcagcagtggggaatattgggcaatgggcgcaagcctgacccagcaacgccgcgtgaaggaagaaggctttcgggttgtaaacttcttttaagagggaagagcagaagacggtacctcttgaataagccacggctaactacgtgccagcagccgcggtaatacgtaggtggcaagcgttgtccggatttactgggtgtaaagggcgtgcagccgggtgygcaagtcagatgtgaaatctcagggctcaaccctgaaactgcatttgaaactgtgygtcttgagtgccggagaggtaatcggaattccttgtgtagcggtgaaatgcgtagatataaggaagaacaccagtggcgaaggcggattactggacggtaactgacggtgaggcgcgaaagcgtggggagcaaacaggattagataccctggtagtccacgctgtaaacgatcaatactaggtgtgcggggactgaccccctgcgtgccggagttaacacaataagtattgcacctggggagtacgatcgcaaggttgaaactcaaaggaattgacgggggcccgcacaagcggtggattatgtggtttaattcgaagcaacgcgagaaccttaccaggtcttgacatcctgctacgagtagagatacatcaggtgcccttcggggaaagcagagacaggtggtgcatggttgtcgtcagctcgtgtcgtgagatgttgggttaagtcccgcaacgagcgcaacccctattgttagttgctacgcaagagcactctagcgagactgccgttgacaaaacggaggaaggtggggacgacgtcaaatcatcatgccccttatgacctgggctacacacgtaatacaatggcggagaacaaagggatgcaaagccgcgaggcagagcgaaccccaaaaagccgtcccagttcggatcgcaggctgcaacccgcctgcgtgaagtcggaatcgctagtaatcgtgggtcagcataccacggtgaatacgttcccgggccttgtacacaccgcccgtcacaccatgagagtcgggaacacccgaagtccgtagcctaacc

SEQ ID NO: 1387 - DNA, 1534 bp, Oscillibacter valericigenes
atttatagagagtttgatcctggctcaggacgaacgctggcggcgtgcttaacacatgcaagtcgaacggagcacccttgattgaggtttcggccaaatgagaggaatgcttagtggcggactggtgagtaacgcgtgaggaacctgcctttcagagggggacaacagttggaaacgactgctaataccgcatgatacatttgggcgacatcgcttgaatgtcaaagatttatcgctgaaagatggcctcgcgtctgattagatagttggtgaggtaacggcccaccaagtcgacgatcagtagccggactgagaggttgaccggccacattgggactgagatacggcccagactcctacgggaggcagcagtggggaatattgggcaatggacgcaagtctgacccagcaacgccgcgtgaaggaagaaggctttcgggttgtaaacttcttttaagggggaagagtagaagacggtaccccttgaataagccacggctaactacgtgccagcagccgcggtaatacgtaggtggcaagcgttgtccggatttactgggtgtaaagggcgtgtagccgggaaggtaagtcagatgtgaaatctgggggctcaacctccaaactgcatttgaaactacttttcttgagtatcggagaggtaatcggaattccttgtgtagcggtgaaatgcgtagatataaggaagaacaccagtggcgaaggcggattactggacgacaactgacggtgaggcgcgaaagcgtggggagcaaacaggattagataccctggtagtccacgctgtaaacgatcaatactaggtgtgcggggactgaccccctgcgtgccgcagttaacacaataagtattgcacctggggagtacgatcgcaaggttgaaactcaaaggaattgacgggggcccgcacaagcggtggattatgtggtttaattcgaagcaacgcgaagaaccttaccaggacttgacatcctactaacgaggtagagatacgtcaggtgcccttcggggaaagtagagacaggtggtgcatggttgtcgtcagctcgtgtcgtgagatgttgggttaagtcccgcaacgagcgcaacccctattgttagttgctacgcaagagcactctagcgagactgccgttgacaaaacggaggaaggtggggacgacgtcaaatcatcatgccccttatgtcctgggctacacacgtaatacaatggcggtcaacagagggatgcaaagccgtgaggtggagcgaacccctaaaagccgtctcagttcggatcgcaggctgcaactcgcctgcgtgaagtcggaatcgctagtaatcgcggatcagaatgccgcggtgaatacgttcccgggccttgtacacaccgcccgtcacaccatgagagtcgggaacacccgaagtccgtagcctaacagcaatgagggcgcggccgaaggtgggtttgataattggggtgaagtcgtaacaaggtagccgtatcggaaggtgcggctggatcacctcctttcta

SEQ ID NO: 1388 - DNA, 1450 bp, Oscillospira guilliermondii
gacgaacgctggcggcgtgcttaacacatgcaagtcgaacggagcgccaaggaaggagttttcggacaacggatttggctgcttagtggcggactggtgagtaacgcgtgaggaacctgcccttgagtgggggacaacggttggaaacgactgctaataccgcatgatgtattgtcgggacatcccggcgataccaaagatttatcgctcaaggatggcctcgcgtctgattagatagttggtgaggtaacggctcaccaagtcgacgatcagtagccggactgagaggttggccggccacattgggactgagatacggcccagactcctacgggaggcagcagtggggaatattgggcaatggacgcaagtctgacccagcaacgccgcgtgaaggaagaaggctttcgggttgtaaacttcttttaagggggaagagcagaagacggtaccccttgaataagccacggctaactacgtgccagcagccgcggtaatacgtaggtggcgagcgttgtccggatttactgggtgtaaagggcgtgcagccgggtctgcaagtcagatgtgaaatccacgggcttaacccgtgaactgcatttgaaactgcgggtcttgagtatcggagaggtaatcggaattcctggtgtagcggtgaaacgcgtagatatcaggaagaacaccagtggcgaaggcggattactggacgacaactgacggtgaggcgcgaaagcgtggggagcaaacaggattagataccctggtagtccacgctgtaaacgatcaatactaggtgtgcggggactaacccctcgcgtgccggagtcaacacaataagtattgcacctggggagtacgatcgcaaggttgaaactcaaaggaattgacgggggcccgcacaagcggtggattatgtggtttaattcgaagcaacgcgaagaaccttaccaaggcttgacatggagaggctcggcttagagataggtctttcccttcggggacttctcacacaggtggtgcatggttgtcgtcagctcgtgtcgtgagatgttgggttaagtcccgcaacgagcgcaacccctattgttagttgctacgcaagagcactctagcgagactgccgttgacaaaacggaggaaggtggggacgacgtcaaatcatcatgccccttatgtcttgggctacacacgtaatacaatggcggatacaaagggatgcgaaaccgcgaggtggagcgaaccccgaaaagccgtctcagttcggatcgcaggctgcaacccgcctgcgtgaagtcggaatcgctagtaatcgtgggtcagcataccacggtgaatacgttcccgggccttgtacacaccgcccgtcacaccatgagagtcgggaacacccgaagtccgtagcctaaccgcaaggggggcgcggccgaaggtgggttcgataattggggtg

SEQ ID NO: 1389 - DNA, 1539 bp, Oxalobacter formigenes
tgaactgaagagtttgatcctggctcagattgaacgctggcggcatgctttacacatgcaagtcgaacggcagcatgggggcaaccctgatggcgagtggcgaacgggtgagtaatatatcggaacgtacccaagagtgggggacaaccagtcgaaagattggctaataccgcatacgatctaaggatgaaagtgggggaccttcgggcctcacgctcctggagcggccgatagctgattagctagttggtggggtaaaggcctaccaaggcgatgatcagtagctggtctgagaggacgatcagccacactgggactgagacacggcccagactcctacgggaggcagcagtggggaattttggacaatgggggaaaccctgatccagcaatgccgcgtgagtgaagaaggccttcgggttgtaaagctcttttgtcagggaagaaattgattgggctaatatcccgattagatgacggtacctgaagaataagcaccggctaactacgtgccagcagccgcggtaatacgtagggtgcgagcgttaatcggaattactgggcgtaaagcgtgcgcaggcggttgtgtaagacagatgtgaaatgcccgggctcaacctgggaattgcatttgtgactgcacggctagagtgtgtcagaggggggtagaattccacgtgtagcagtgaaatgcgtagatatgtggaggaataccgatggcgaaggcagccccctgggataacactgacgctcatgcacgaaagcgtggggagcaaacaggattagataccctggtagtccacgccctaaacgatgtcgactagttgttgggtcttaattgacttagtaacgcagctaacgcgtgaagtcgaccgcctggggagtacggtcgcaagattaaaactcaaaggaattgacggggacccgcacaagcggtggatgatgtggattaattcgatgcaacgcgaaaaaccttacctacccttgacatgtcaggaatcccgaagagatttgggagtgctcgaaagagagcctgaacacaggtgctgcatggctgtcgtcagctcgtgtcgtgagatgttgggttaagtcccgcaacgagcgcaacccttgtcattagttgctacgaaagggcactctaatgaaactgccggtgacaaaccggaggaaggtggggatgacgtcaagtcctcatggcccttatgggtagggcttcacacgtcatacaatggtgcatacagagggttgccaacccgagagggggagctaatctcagaaagtgcatcgtagtccggattgaagtctgcaactcgacttcatgaagttggaatcgctagtaatcgcggatcagcatgtcgcggtgaatacgttcccgggtcttgtacacaccgcccgtcacaccatgggagcgggttttaccagaagtaggtagcttaaccgtaaggagggcgcttaccacggtaggattcgtgactggggtgaagtcgtaacaaggtagccgtatcggaaggtgcggctggatcacctcctttctagaga

SEQ ID NO: 1390 - DNA, 1523 bp, Paenibacillus barcinonensis
aacgctggcggcatgcctaatacatgcaagtcgagcggacttgaagagaagcttgcttctctgatggttagcggcggacgggtgagtaacacgtaggcaacctgccctcaagcttgggacaactaccggaaacggtagctaataccgaatacttgttttcttcgcctgaagagaactggaaagacggagcaatctgtcacttgaggatgggcctgcggcgcattagctagttggtgaggtaacggctcaccaaggcgacgatgcgtagccgacctgagagggtgatcggccacactgggactgagacacggcccagactcctacgggaggcagcagtagggaatcttccgcaatgggcgaaagcctgacggagcaatgccgcgtgagtgatgaaggttttcggatcgtaaagctctgttgccagggaagaacgcttgggagagtaactgctcccaaggtgacggtacctgagaagaaagccccggctaactacgtgccagcagccgcggtaatacgtagggggcaagcgttgtccggaattattgggcgtaaagcgcgcgcaggcggtcatgtaagtctggtgtttaatcccggggctcaaccccggatcgcactggaaactgggtgacttgagtgcagaagaggagagtggaattccacgtgtagcggtgaaatgcgtagagatgtggaggaacaccagtggcgaaggcgactctctgggctgtaactgacgctgaggcgcgaaagcgtggggagcaaacaggattagataccctggtagtccacgccgtaaacgatgaatgctaggtgttaggggtttcgatacccttggtgccgaagttaacacattaagcattccgcctggggagtacggtcgcaagactgaaactcaaaggaattgacggggacccgcacaagcagtggagtatgtggtttaattcgaagcaacgcgaagaaccttaccaggtcttgacatccaactaacgaggtagagatacgttaggtgcccttcggggaaagttgagacaggtggtgcatggttgtcgtcagctcgtgtcgtgagatgttgggttaagtcccgcaacgagcgcaacccttgatcttagttgccagcatttcggatgggcactctaaggtgactgccggtgacaaaccggaggaaggtggggatgacgtcaaatcatcatgccccttatgacctgggctacacacgtactacaatggccggtacaacgggcagtgaaaccgcgaggtggaacgaatcctaaaaagccggtctcagttcggattgcaggctgcaactcgcctgcatgaagtcggaattgctagtaatcgcggatcagcatgccgcggtgaatacgttcccgggtcttgtacacaccgcccgtcacaccacgagagtttataacacccgaagtcggtggggtaaccgcaaggagccagccgccgaaggtgggatagatgattggggtgaagtcgtaacaaggtagccgtatcggaaggtgcggctggatcacctcttt

SEQ ID NO: 1391 - DNA, 931 bp, Paenibacillus barengoltzii
  modified_base (891)..(891): a, c, t, g, unknown or other
gcggagtttatcgggagcttgctcctgataaacttagcggcggacgggtgagtaacacgtaggcaacctgcccgtaagactgggataactaccggaaacggtagctaataccggatacgcaagtctctcgcatgaggggcttgggaaaggcggagcaatctgtcacttacggatgggcctgcggcgcattagctagttggtggggtaacggctcaccaaggcgacgatgcgtagccgacctgagagggtgaacggccacactgggactgagacacggcccagactcctacgggaggcagcagtagggaatcttccgcaatggacgaaagtctgacggagcaacgccgcgtgagtgatgaaggttttcggatcgtaaagctctgttgccagggaagaacgtccgttagagtaactgctaacggagtgacggtacctgagaagaaagccccggctaactacgtgccagcagccgcggtaatacgtagggggcgagcgttgtccggaattattgggcgtaaagcgcgcgcaggcggctgtttaagtctggtgtttaatcctggggctcaaccccgggtcgcactggaaactggacagcttgagtgcagaagaggagagtggaattccacgtgtagcggtgaaatgcgtagagatgtggaggaacaccagtggcgaaggcgactctctgggctgtaactgacgctgaggcgcgaaagcgtggggagcaaacaggattagataccctggtagtccacgccgtaaacgatgaatgctaggtgttaggggtttcgatacccttggtgccgaagttaacacattaagcattccgcctggggagtacggccgcaaggctgaaactcaaaggaattgacggggacccgcacaagcagtggngtatgtggtttaattcgaagcaacgcgaagaaccttacca

SEQ ID NO: 1392 - DNA, 968 bp, Paenibacillus chibensis
gcggacttgatggagagcttgctctcctgatggttagcggcggacgggtgagtaacacgtaggcaacctgcctgcaagaccgggataacccacggaaacgtgagctaataccggatatctcatttcctctcctgagggaatgatgaaagacggagcaatctgtcacttgcggatgggcctgcggcgcattagctagttggtgaggtaacggctcaccaaggcgacgatgcgtagccgacctgagagggtgaacggccacactgggactgagacacggcccagactcctacgggaggcagcagtagggaatcttccgcaatgggcgaaagcctgacggagcaacgccgcgtgagtgatgaaggttttcggatcgtaaagctctgttgccagggaagaacgtccggtagagtaactgctatcggagtgacggtacctgagaagaaagccccggctaactacgtgccagcagccgcggtaatacgtagggggcaagcgttgtccggaattattgggcgtaaagcgcgcgcaggcggtcatttaagtctggtgtttaaggccaaggctcaaccttggttcgcactggaaactgggtgacttgagtgcagaagaggagagtggaattccacgtgtagcggtgaaatgcgtagatatgtggaggaacaccagtggcgaaggcgactctctgggctgtaactgacgctgaggcgcgaaagcgtggggagcaaacaggattagataccctggtagtccacgccgtaaacgatgaatgctaggtgttaggggtttcgatacccttggtgccgaagttaacacattaagcattccgcctggggagtacggtcgcaagactgaaactcaaaggaattgacggggacccgcacaagcagtggagtatgtggtttaattcgaagcaacgcgaagaaccttaccaggtcttgacatccctctgaccggtctagagatagacc

SEQ ID NO: 1393 - DNA, 1408 bp, Paenibacillus cookii
  modified_base (8)..(8): a, c, t, g, unknown or other
cggagttngttttgaaagcttgctttcaaaacaacttagcggcggacgggtgagtaacacgtaggcaacctgccccttagactgggataactaccggaaacggtagctaataccggataatttcttttttctcctgaaggaagaatgaaagacggagcaatctgtcactgagggatgggcctgcggcgcattagctagttggtggggtaacggcccaccaaggcgacgatgcgtagccgacctgagagggtgaacggccacactgggactgagacacggcccagactcctacgggaggcagcagtagggaatcttccgcaatggacgaaagtctgacggagcaacgccgcgtgagtgatgaaggttttcggatcgtaaagctctgttgccagggaagaacgtccggtagagtaactgctaccggagtgacggtacctgagaagaaagccccggctaactacgtgccagcagccgcggtaatacgtagggggcaagcgttgtccggaattattgggcgtaaagcgcgcgcaggcggtcatttaagtctggtgtttaaaccttgggctcaacctaaggtcgcactggaaactgggtgacttgagtacagaagaggaaagtggaattccacgtgtagcggtgaaatgcgtagatatgtggaggaacaccagtggcgaaggcgactttctgggctgtaactgacgctgaggcgcgaaagcgtggggagcaaacaggattagataccctggtagtccacgccgtaaacgatgagtgctaggtgttaggggtttcgatacccttggtgccgaagttaacacagtaagcactccgcctggggagtacggtcgcaagactgaaactcaaaggaattgaggggacccgcacaagcagtggagtatgtggtttaattcgaagcaacgcgaagaaccttaccaggtcttgacatccctctgaatccactagagatagtggcggccttcgggacagaggagacaggtggtgcatggttgtcgtcagctcgtgtcgtgagatgttgggttaagtcccgcaacgagcgcaacccttaactttagttgccagcaggtaaggctgggcactctagagtgactgccggtgacaaaccggaggaaggtggggatgacgtcaaatcatcatgccccttatgacctgggctacacacgtactacaatggccggtacaacgggaagcgaagccgcgaggtggagccaatcccatcaaagccggtctcagttcggattgcaggctgcaactcgcctgcatgaagtcggaattgctagtaatcgcggatcagcatgccgcggtgaatacgttcccgggtcttgtacacaccgcccgtcacaccacgagagtttacaacacccgaagtcggtggggtaacccgcaagggagc

SEQ ID NO: 1394 - DNA, 1455 bp, Paenibacillus durus
  modified_base (103)..(103): a, c, t, g, unknown or other
  modified_base (141)..(142): a, c, t, g, unknown or other
agcggcggacgggtgagtaacacgtaggcaacctgccccttggactgggataactaccggaaacggtagctaataccggataattcctcttagctcctgctangaggctgaaaggcggagcaatctgtcaccaagggatgnncctgcggcgcattagctagttggtggggtaacggctcaccaaggcgacgatgcgtagccgacctgagagggtgaacggccacactgggactgagacacggcccagactcctacgggaggcagcagtagggaatcttccgcaatgggcgaaagcctgacggagcaacgccgcgtgagtgatgaaggttttcggatcgtaaagctctgttgccagggaagaacgtcttgtagagtaactgctacaagagtgacggtacctgagaagaaagccccggctaactacgtgccagcagccgcggtaatacgtagggggcaagcgttgtccggaattattgggcgtaaagcgcgcgcaggcggctgtttaagtctggtgtttaaaccatgggctcaacctgtggtcgcactggaaactggacagcttgagtgcagaagaggaaagtggaattccacgtgtagcggtgaaatgcgtagagatgtggaggaacaccagtggcgaaggcgactttctgggctgtaactgacgctgaggcgcgaaagcgtggggagcaaacaggattagataccctggtagtccacgccgtaaacgatgagtgctaggtgttaggggtttcgatacccttggtgccgaagttaacacagtaagcactccgcctggggagtacggtcgcaagactgaaactcaaaggaattgacggggacccgcacaagcagtggagtatgtggtttaattcgaagcaacgcgaagaaccttaccaggtcttgacatccctctgaatcgtctagagatgatggcgcggccttcgggacagaggagacaggtggtgcatggttgtcgtcagctcgtgtcgtgagatgttgggttaagtcccgcaacgagcgcaacccttgactttagttgccagcaggtcaagctgggcactctagagtgactgccgagtgacaaaccggaggaaggtggggatgacgtcaaatcatcatgccccttatgacctgggctacacacgtactacaatggccggtacaacgggaagcgaagcgcgaggcgggagccaatcttagaaagccggtctcagttcggattgcaggctgcaactcgcctgcatgaagtcggaattgctagctaatcgcggatcagcatgccgcggtgcaatgacgttcccgggtcttgtacacaccgcccgtcacaccacgagagtttacaacacccgaagtcggtggggtaaccgcaaggagccagccgccgaagtggggtagatgattggggtgaagtcgtaacaaggtagccgtatcggaaggtgcggctggatcacctcc

SEQ ID NO: 1395 - DNA, 1440 bp, Paenibacillus glucanolyticus
  modified_base (179)..(179): a, c, t, g, unknown or other
  modified_base (198)..(198): a, c, t, g, unknown or other
  modified_base (446)..(446): a, c, t, g, unknown or other
  modified_base (532)..(532): a, c, t, g, unknown or other
  modified_base (535)..(535): a, c, t, g, unknown or other
  modified_base (595)..(595): a, c, t, g, unknown or other
  modified_base (597)..(597): a, c, t, g, unknown or other
  modified_base (729)..(729): a, c, t, g, unknown or other
  modified_base (818)..(818): a, c, t, g, unknown or other
  modified_base (902)..(902): a, c, t, g, unknown or other
  modified_base (953)..(953): a, c, t, g, unknown or other
  modified_base (966)..(966): a, c, t, g, unknown or other
  modified_base (1072)..(1072): a, c, t, g, unknown or other
  modified_base (1125)..(1125): a, c, t, g, unknown or other
  modified_base (1363)..(1363): a, c, t, g, unknown or other
  modified_base (1400)..(1400): a, c, t, g, unknown or other
gagagtttgatcctggctcaggacgaacgctggcggcgtgcctaatacatgcaagtcgagcggacttgatggagtgcttgcactcttgagagttagcggcggacgggtgagtaacacgtaggcaacctgccctcaagactgggataactaccggaaacggtagctaataccggataatntattacatagcattatgtnataatgaaagacggagcaatctgtcacttggggatgggcctgcggcgcattagctagttggtggggtaacggcccaccaaggcgacgatgcgtagccgacctgagagggtgaacggccacactgggactgagacacggcccagtctcctacgggaggcagcagtagggaatcttccgcaatgggcgaaaaactgacggagcaacgccgcgtgagtgatgaaggttttcggatcgtaaagctctgttgncaaggaagaacgtcttctagagtaactgttatgagagtgacggtacttgagaagaaagccccggctaactacgtgccagcagccgnggnaatacgtagggggcaagcgttgtccggaattattgggcgtaaagcgcgcgcaggcggtcntntaagtctggtgtttaaacccggggctcaacttcgggtcgcactggaaactgggggacttgagtgcagaagaggagagtggaattccacgtgtagcggtgaaatgcgtagatatgtggaggaacaccagtggngaaggcgactctctgggctgtaactgacgctgaggcgcgaaagcgtggggagcaaacaggattagataccctggtagtccacgccgttnaaacgatgaatgctaggtgttaggggtttcgatacccttggtgccgaagttaacacattaagcattccgcctggggagtacggncgcaagcactgaaactcaaaggaattgacggggacccgcacaagcagtggngtatgtggtttanttcgaagcaacgcgaagaaccttaccaagtcttgacatccctctgaatctgctagagatagaggcggccttcgggacagaggagacaggtggtgcatggttgtcgncagctcgtgtcgtgagatgttgggttatgtcccgcaacgagcgcaacccttgnttttagttgccagcactaagggtgggcactctagaatgactgccggtgacaaaccggaggaaggcggcgtatgacgtcaaatcatcatgccccttatgacttgggctacacacgtactacaatggctggtacaacgggaagcgaagccgcgaggtggagccaatcctataaaagccagtctcagctcggattgcaggctgcaactcgcctgcatgaagtcggaattgctagtaatcgnggatcagcatgccgcggtgaatacgttcccgggtctngtacacaccgcccgtcacaccacgagagtttacaacaccc

SEQ ID NO: 1396 - DNA, 1395 bp, Paenibacillus lactis
ggagtgcttgcactcctgagatttagcggcggacgggtgagtaacacgtaggcaacctgccctcaagactgggataactaccggaaacggtagctaataccggataggatatttggctgcatggccgaatatggaaaggcggagcaatctgtcacttgaggatgggcctgcggcgcattagctagttggtggggtaatggcctaccaaggcgacgatgcgtagccgacctgagagggtgaacggccacactgggactgagacacggcccagactcctacgggaggcagcagtagggaatcttccgcaatggacgaaagtctgacggagcaacgccgcgtgagtgatgaaggttttcggatcgtaaagctctgttgccagggaagaacgccagagagagtaactgctctttgggtgacggtacctgagaagaaagccccggctaactacgtgccagcagccgcggtaatacgtagggggcaagcgttgtccggaattattgggcgtaaagcgcgcgcaggcggttctttaagtctggtgtttaaacccggagcttaacttcgggacgcactggaaactggggaacttgagtgcagaagaggagagtggaattccacgtgtagcggtgaaatgcgtagatatgtggaggaacaccagtggcgaaggcgactctctgggctgtaactgacgctgaggcgcgaaagcgtggggagcaaacaggattagataccctggtagtccacgccgtaaacgatgaatgctaggtgttaggggtttcgatacccttggtgccgaagttaacacattaagcattccgcctggggagtacggtcgcaagactgaaactcaaaggaattgacggggacccgcacaagcagtggagtatgtggtttaattcgaagcaacgcgaagaagcttaccaggtcttgacatccctttgacccctctagagatagaggtttccttcgggacagaggagacaggtggtgcatggttgtcgtcagctcgtgtcgtgagatgttgggttaagtcccgcaacgagcgcaacccttgatcttagttgccagcacgtaatggtgggcactctaaggtgactgccggtgacaaaccggaggaaggtggggatgacgtcaaatcatcatgccccttatgacctgggctacacacgtactacaatggctggtacaacgggaagcgaagccgcgaggtggagccaatcctaaaaagccagtctcagttcggattgcaggctgcaactcgcctgcatgaagtcggaattgctagtaatcgcggatcagcatgccgcggtgaatacgttcccgggtcttgtacacaccgcccgtcacaccacgagagtttacaacacccgaagtcggtggggtaaccgcaaggagcca

SEQ ID NO: 1397 - DNA, 1505 bp, Paenibacillus lautus
  modified_base (1118)..(1118): a, c, t, g, unknown or other
cgaacgctggcggcgtgcctaatacatgcaagtcgagcggacttgatggagtgcttgcactcctgaaggttagcggcggacgggtgagtaacacgtaggcaacctgccctcaagactgggataactaccggaaacggtagctaataccggataatttatttcacagcattgtggaataatgaaagacggagcaatctgtcacttggggatgggcctgcggcgcattagctagttggtggggtaacggcccaccaaggcgacgatgcgtagccgacctgagagggtgaacggccacactgggactgagacacggcccagactcctacgggaggcagcagtagggaatcttccgcaatgggcgaaagcctgacggagcaacgccgcgtgagtgatgaaggttttcggatcgtaaagctctgttgccaaggaagaacgtcttctagagtaactgctaggagagtgacggtacttgagaagaaagccccggctaactacgtgccagcagccgcggtaatacgtagggggcaagcgttgtccggaattattgggcgtaaagcgcgcgcaggcggttctttaagtctggtgtttaaacccgaggctcaacttcgggtcgcactggaaactgggggacttgagtgcagaagaggagagtggaattccacgtgtagcggtgaaatgcgtagatatgtggaggaacaccagtggcgaaggcgactctctgggctgtaactgacgctgaggcgcgaaagcgtggggagcaaacaggattagataccctggtagtccacgccgtaaacgatgaatgctaggtgttaggggtttcgatacccttggtgccgaagttaacacattaagcattccgcctggggagtacggtcgcaagactgaaactcaaaggaattgacggggacccgcacaagcagtggagtatgtggtttaattcgaagcaacgcgaagaaccttaccaagtcttgacatccctctgaatcctctagagatagaggcggccttcgggacagaggtgacaggtggtgcatggttgtcgtcagctcgtgtcgtgagatgttgggttaagtcccgcaacgagcgcaacccttgattttagttgccagcacttngggtgggcactctagaatgactgccggtgacaaaccggaggaaggcggggatgacgtcaaatcatcatgccccttatgacttgggctacacacgtactacaatggctggtacaacgggaagcgaagccgcgaggtggagccaatcctataaaagccagtctcagttcggattgcaggctgcaactcgcctgcatgaagtcggaattgctagtaatcgcggatcagcatgccgcggtgaatacgttcccgggtcttgtacacaccgcccgtcacaccacgagagtttacaacacccgaagtcggtggggtaacccgcaagggagccagccgccgaaggtggggtagatgattggggtgaagtcgtaacaaggtagccgtatcggaagg

SEQ ID NO: 1398 - DNA, 1500 bp, Paenibacillus pabuli
  modified_base (77)..(77): a, c, t, g, unknown or other
gatcctggctcaggacgaacgctggcggcatgcctaatacatgcaagtcgagcggagttgagagaaagcttgctttnttgatacttagcggcggacgggtgagtaacacgtaggcaacctgccctcaagtttgggacaactaccggaaacggtagctaataccgaatagttgttttcttcgcctgaagagaactggaaagacggagcaatctgtcacttggggatgggcctgcggcgcattagctagttggtggggtaacggctcaccaaggcgacgatgcgtagccgacctgagagggtgatcggccacactgggactgagacacggcccagactcctacgggaggcagcagtagggaatcttccgcaatgggcgaaagcctgacggagcaatgccgcgtgagtgatgaaggttttcggatcgtaaagctctgttgccagggaagaacgcttgggagagtaactgctctcaaggtgacggtacctgagaagaaagccccggctaactacgtgccagcagccgcggtaatacgtagggggcaagcgttgtccggaattattgggcgtaaagcgcgcgcaggcggtcatttaagtctggtgtttaatcccggggctcaaccccggatcgcactggaaactgggtgacttgagtgcagaagaggagagtggaattccacgtgtagcggtgaaatgcgtagatatgtggaggaacaccagtggcgaaggcgactctctgggctgtaactgacgctgaggcgcgaaagcgtggggagcaaacaggattagataccctggtagtccacgccgtaaacgatgagtgctaggtgttaggggtttcgatacccttggtgccgaagttaacacattaagcactccgcctggggagtacggtcgcaagactgaaactcaaaggaattgacggggacccgcacaagcagtggagtatgtggtttaattcgaagcaacgcgaagaaccttaccaggtcttgacatccctctgaccggtacagagatgtacctttccttcgggacagaggagacaggtggtgcatggttgtcgtcagctcgtgtcgtgagatgttgggttaagtcccgcaacgagcgcaacccttgatcttagttgccagcacttcgggtgggcactctaaggtgactgccggtgacaaaccggaggaaggtggggatgacgtcaaatcatcatgccccttatgacctgggctacacacgtactacaatggccggtacaacgggctgtgaagccgcgaggtggaacgaatcctaaaaagccggtctcagttcggattgcaggctgcaactcgcctgcatgaagtcggaattgctagtaatcgcggatcagcatgccgcggtgaatacgttcccgggtcttgtacacaccgcccgtcacaccacgagagtttataacacccgaagtcggtggggtaaccgcaaggagccagccgccgaaggtgggatagatgattggggtgaagtcgtaacaag

SEQ ID NO: 1399 - DNA, 1491 bp, Paenibacillus polymyxa
gacgaacgctggcggcgtgcctaatacatgcaagtcgagcggggttaattagaagcttgcttctaactaacctagcggcggacgggtgagtaacacgtaggcaacctgcccacaagactgggataactaccggaaacggtagctaatacccgatgcctccttttcctgcatgggagaaggaggaaaggcggagcaatctgtcacttgtggatgggcctgcggcgcattagctagttggtggggtaaaggcctaccaaggcgacgatgcgtagccgacctgagagggtgatcggccacactgggactgagacacggcccagactcctacgggaggcagcagtagggaatcttccgcaatgggcgaaagcctgacggagcaacgccgcgtgagtgatgaaggttttcggatcgtaaagctctgttgccagggaagaacgtcttgtagagtaactgctacaagagtgacggtacctgagaagaaagccccggctaactacgtgccagcagccgcggtaatacgtagggggcaagcgttgtccggaattattgggcgtaaagcgcgcgcaggcggctctttaagtctggtgtttaatcccgaggctcaacttcgggtcgcactggaaactggggagcttgagtgcagaagaggagagtggaattccacgtgtagcggtgaaatgcgtagagatgtggaggaacaccagtggcgaaggcgactctctgggctgtaactgacgctgaggcgcgaaagcgtggggagcaaacaggattagataccctggtagtccacgccgtaaacgatgaatgctaggtgttaggggtttcgatacccttggtgccgaagttaacacattaagcattccgcctggggagtacggtcgcaagactgaaactcaaaggaattgacggggacccgcacaagcagtggagtatgtggtttaattcgaagcaacgcgaagaaccttaccaggtcttgacatccctctgaccggtctagagataggacctttccttcgggacagaggagacaggtggtgcatggttgtcgtcagctcgtgtcgtgagatgttgggttaagtcccgcaacgagcgcaacccttatgcttagttgccagcaggtcaagctgggcactctaagcagactgccggtgacaaaccggaggaaggtggggatgacgtcaaatcatcatgccccttatgacctgggctacacacgtactacaatggccggtacaacgggaagagcgaaggagcgatctggagccaatcctagaaaagccggtctcagttcggattgtaggctgcaactcgcctacatgaagtcggaattgctagtaatcgcggatcagcatgccgcggtgaatacgttcccgggtcttgtacacaccgcccgtcacaccacgagagtttacaacacccgaagtcggtgaggtaaccgcaaggagccagccgccgaaggtggggtagatgattggggtgaagtcgtaacaa

SEQ ID NO: 1400 - DNA, 968 bp, Paenibacillus popilliae
  modified_base (51)..(52): a, c, t, g, unknown or other
  modified_base (54)..(54): a, c, t, g, unknown or other
  modified_base (59)..(59): a, c, t, g, unknown or other
  modified_base (112)..(112): a, c, t, g, unknown or other
  modified_base (114)..(114): a, c, t, g, unknown or other
cccggctaactacgtgccagcagccgcggtaatacgtagggggcaagcgtnntncgganttattgggcgtaaagcgcgcgcaggcggtcatttaagtctggtgtttaaaccntngggctcaacctaaggtcgcactggaaactgggtgacttgagtacagaagaggaaagtggaattccacgtgtagcggtgaaatgcgtagatatgtggaggaacaccagtggcgaaggcgactttctgggctgtaactgacgctgaggcgcgaaagcgtggggagcaaacaggattagataccctggtagtccacgccgtaaacgatgagtgctaggtgttaggggtttcgatacccttggtgccgaagttaacacagtaagcactccgcctggggagtacggtcgcaagactgaaactcaaaggaattgacggggacccgcacaagcagtggagtatgtggtttaattcgaagcaacgcgaagaaccttaccaggtcttgacatccctctgaatccactagagatagtggcggccttcgggacagaggagacaggtggtgcatggttgtcgtcagctcgtgtcgtgagatgttgggttaagtcccgcaacgagcgcaacccttaactttagttgccagcaggtaaggctgggcactctagagtgactgccggtgacaaaccggaggaaggtggggatgacgtcaaatcatcatgccccttatgacctgggctacacacgtactacaatggccggtacaacgggaagcgaagccgcgaggtggagccaatcccatcaaagccggtctcagttcggattgcaggctgcaactcgcctgcatgaagtcggaattgctagtaatcgcggatcagcatgccgcggtgaatacgttcccgggtcttgtacacaccgcccgtcacaccacgagagtttacaacacccgaagtcggtggggtaacccgcaagggagccagccg

SEQ ID NO: 1401 - DNA, 1496 bp, Paenibacillus sp.
  CIP 101062
tacatgcaagtcgagcggagttaatcgggagcttgctcctggttgacttagcggcggacgggtgagtaacacgtaggcaacctgcccgtaagaccgggataactagcggaaacgttagctaataccggataatcaagtttctcgcatgggggacttgggaaaggcggagcaatctgtcacttacggatgggcctgcggcgcattagctagttggtggggtaacggctcaccaaggcgacgatgcgtagccgacctgagagggtgaacggccacactgggactgagacacggcccagactcctacgggaggcagcagtagggaatcttccgcaatggacgaaagtctgacggagcaacgccgcgtgagtgaagaaggttttcggatcgtaaagctctgttgccagggaagaacgtccgctagagtaactgctagcggagtgacggtacctgagaagaaagccccggctaactacgtgccagcagccgcggtaatacgtagggggcaagcgttgtccggaattattgggcgtaaagcgcgcgcaggcggctatttaagtctggtgtttaatcctggggctcaaccccgggtcgcactggaaactgggtggcttgagtgcagaagaggagagtggaattccacgtgtagcggtgaaatgcgtagagatgtggaggaacaccagtggcgaaggcgactctctgggctgtaactgacgctgaggcgcgaaagcgtggggagcaaacaggattagataccctggtagtccacgccgtaaacgatgaatgctaggtgttaggggtttcgatacccttggtgccgaagttaacacattaagcattccgcctggggagtacggtcgcaagactgaaactcaaaggaattgacggggacccgcacaagcagtggagtatgtggtttaattcgaagcaacgcgaagaaccttaccaggtcttgacatccccctgaccggtacagagatgtacctttccttcgggacaggggagacaggtggtgcatggttgtcgtcagctcgtgtcgtgagatgttgggttaagtcccgcaacgagcgcaacccttgactttagttgccagcaggtcaagctgggcactctagagtgactgccggtgacaaaccggaggaaggtggggatgacgtcaaatcatcatgccccttatgacctgggctacacacgtactacaatggctggtacaacgggaagcgaaggagcgatccggagcgaatcctaaaaagccagtctcagttcggattgcaggctgcaactcgcctgcatgaagtcggaattgctagtaatcgcggatcagcatgccgcggtgaatacgttcccgggtcttgtacacaccgcccgtcacaccacgagagtttacaacacccgaagtcggtgaggtaaccgcaaggagccagccgccgaaggtggggtagatgattggggtgaagtcgtaacaaggtagccgtatcggaaggtgcggttggatcacc

SEQ ID NO: 1402 - DNA, 965 bp, Paenibacillus sp.
  HGF5
  modified_base (913)..(913): a, c, t, g, unknown or other
ggagtgcttgcactcctgagatttagcggcggacgggtgagtaacacgtaggcaacctgccctcaagactgggataactaccggaaacggtagctaataccggataggatatttggctgcatggccgaatatggaaaggcggagcaatctgtcacttgaggatgggcctgcggcgcattagctagttggtggggtaatggcctaccaaggcgacgatgcgtagccgacctgagagggtgaacggccacactgggactgagacacggcccagactcctacgggaggcagcagtagggaatcttccgcaatggacgaaagtctgacggagcaacgccgcgtgagtgatgaaggttttcggatcgtaaagctctgttgccagggaagaacgccagagagagtaactgctctttgggtgacggtacctgagaagaaagccccggctaactacgtgccagcagccgcggtaatacgtagggggcaagcgttgtccggaattattgggcgtaaagcgcgcgcaggcggttctttaagtctggtgtttaaacccggagcttaacttcgggacgcactggaaactggggaacttgagtgcagaagaggagagtggaattccacgtgtagcggtgaaatgcgtagatatgtggaggaacaccagtggcgaaggcgactctctgggctgtaactgacgctgaggcgcgaaagcgtggggagcaaacaggattagataccctggtagtccacgccgtaaacgatgaatgctaggtgttaggggtttcgatacccttggtgccgaagttaacacattaagcattccgcctggggagtacggtcgcaagactgaaactcaaaggaattgacggggacccgcacaagcagtggagtatgtggtttaattcgaagcaacgcgaagaancttaccaggtcttgacatccctttgacccctctagagatagaggtttccttc

SEQ ID NO: 1403 - DNA, 1556 bp, Paenibacillus sp.
  HGF7
ttatcggagagtttgatcctggctcaggacgaacgctggcggcgtgcctaatacatgcaagtcgagcggacttgatgagaagcttgcttctctgagagttagcggcggacgggtgagtaacacgtaggcaacctgcctgtaagatcgggataactaccggaaacggtagctaagaccggataatcggtatctccgcatggggagatcgtgaaacacggagcaatctgtggcttacggatgggcctgcggcgcattagctagttggtgaggtaacggctcaccaaggcgacgatgcgtagccgacctgagagggtgaacggccacactgggactgagacacggcccagactcctacgggaggcagcagtagggaatcttccgcaatggacgcaagtctgacggagcaacgccgcgtgagtgatgaaggttttcggatcgtaaagctctgttgccagggaagaacgccaaggagagtaactgctctttgggtgacggtacctgagaagaaagccccggctaactacgtgccagcagccgcggtaatacgtagggggcaagcgttgtccggaattattgggcgtaaagcgcgcgcaggcggttttttaagtctggtgtttaatcccgaggctcaacctcggttcgcaccggaaactgggagactggagtgcaggagaggaaagtggaattccacgtgtagcggtgaaatgcgtagagatgtggaggaacaccagtggcgaaggcgactttctggcctgtaactgacgctgaggcgcgaaagcgtggggagcaaacaggattagataccctggtagtccacgccgtaaacgatgcatgctaggtgttaggggtttcgatacccttggtgccgaagttaacacagtaagcatgccgcctggggagtacgctcgcaagagtgaaactcaaaggaattgacggggacccgcacaagcagtggagtatgtggtttaattcgaagcaacgcgaagaaccttaccaggtcttgacatccctctgaccggcttagagataagcctttccttcgggacagaggtgacaggtggtgcatggttgtcgtcagctcgtgtcgtgagatgttgggttaagtcccgcaacgagcgcaacccttgaacttagttgccagcaggttaagctgggcactctaagttgactgccggtgacaaaccggaggaaggcggggatgacgtcaaatcatcatgccccttatgacctgggctacacacgtactacaatggccggtacaacgggaagcgaaggagcgatctggagccaatcctagaaaagccggtctcagttcggattgcaggctgcaactcgcctgcatgaagtcggaattgctagtaatcgcggatcagcatgccgcggtgaatacgttcccgggtcttgtacacaccgcccgtcacaccacgagagtttacaacacccgaagtcggtgaggtaaccgcaaggggccagccgccgaaggtggggtagatgattggggtgaagtcgtaacaaggtagccgtatcggaaggtgcggctggatcacctcctttct

SEQ ID NO: 1404 - DNA, 1434 bp, Paenibacillus sp.
  JC66
atcctggctcaggacgaacgctggcggcgtgcstaatacatgcaagtcgagcggagcatatcgcgatcttcggatggcaatacgcttagcggcgaacgggtgagtaacacgtaggcaacctgcctgtaagatcgggataacttgcggaaacgtgagctaataccggatgtgcttgagtccacgcctgtgggtttaaggaaagacggagcaatctgtcacttacagatgggcctgcggcgcattagctagttggtgaggtaacggctcaccaaggcgacgatgcgtagccgacctgagagggtgaccggccacactgggactgagacacggcccagactcctacgggaggcagcagtagggaatcttcggcaatggacggaagtctgaccgagcaacgccgcgtgagtgaagaaggttttcggatcgtaaaactctgttgccagagaagaacgccaaggagagtaactgctctttgggtgacggtatctgagaagaaagccccggctaactacgtgccagcagccgcggtaatacgtagggggcaagcgttgtccggaattattgggcgtaaagcgcgcgcaggcggtgaattaagtctgatgtttaaacccggggctcaacctcgggtcgcattggaaactggttgactggagtgcaggagaggaaagtggaattccacgtgtagcggtgaaatgcgtagagatgtggaggaacaccagtggcgaaggcgactttctggcctgtaactgacgctgaggcgcgaaagcgtggggagcaaacaggattagataccctggtagtccacgccgtaaacgatgaatgctaggtgtcaggggtttcgatacccttggtgccgaagttaacacattaagcattccgcctggggagtacggtcgcaagactgaaactcaaaggaattgacggggacccgcacaagcagtggagtatgtggtttaattcgaagcaacgcgaagaaccttaccaggtcttgacatccctttgaccggtgcagagatgtgcctttccttcgggacagaggagacaggtggtgcatggttgtcgtcagctcgtgtcgtgagatgttgggttaagtcccgcaacgagcgcaacccttgatgctagttgccagcattcagttgggcactctaggatgactgccggtgacaaaccggaggaaggtggggatgacgtcaaatcatcatgccccttatgacctgggctacacacgtactacaatggccggtacaacgggcagcgaaggagcgatctggagcgaatcccaaaaagccggtctcagttcggattgcaggctgcaactcgcctgcatgaagtcggaattgctagtaatcgcggatcagcatgccgcggtgaatacgttcccgggtcttgtacacaccgcccgtcacaccacgagagtttacaacacccgaagtc

SEQ ID NO: 1405 - DNA, 1522 bp, Paenibacillus sp.
  R-27413
gacgaacgctggcggcgtgcctaatacatgcaagtcgagcggagcttagccttcctttggaaggctytggcttagcggcggacgggtgagtaacacgtaggcaacctgcccgtaagaccgggataacttgcggaaacgtgagctaataccggatagataggaagagcgcatgctyttcttaggaaagacggagcaatctgtcacttacggatgggcctgcggcgcattagctagttggtggggtaaaggcctaccaaggcgacgatgcgtagccgacctgagagggtgaccggccacactgggactgagacacggcccagactcctacgggaggcagcagtagggaatcttcggcaatggacggaagtctgaccgagcaacgccgcgtgagtgaagaaggttttcggatcgtaaaactctgttgccagagaagaaagctaaggagagtcactgctctttggttgacggtatctgagaagaaagccccggctaactacgtgccagcagccgcggtaatacgtagggggcaagcgttgtccggaattattgggcgtaaagcgcgcgcaggcggctgagtaagtctggtgtttaaacctggggctcaacctcgggtcgcattggaaactgcttggctggagtgcaggagaggaaagtggaattccacgtgtagcggtgaaatgcgtagagatgtggaggaacaccagtggcgaaggcgactttctggcctgtaactgacgctgaggcgcgaaagcgtggggagcaaacaggattagataccctggtagtccacgccgtaaacgatgaatgctaggtgtcaggggtttcgatacccttggtgccgaagttaacacattaagcattccgcctggggagtacggtcgcaagactgaaactcaaaggaattgacggggacccgcacaagcagtggagtatgtggtttaattcgaagcaacgcgaagaaccttaccaggtcttgacatccctctgaccgtyctagagatagggcttcccttcggggcagaggagacaggtggtgcatggttgtcgtcagctcgtgtcgtgagatgttgggttaagtcccgcaacgagcgcaacccttgatcttagttgccagcattgagttgggcactctaggatgactgccggtgacaaaccggaggaaggtggggatgacgtcaaatcatcatgccccttatgacctgggctacacacgtactacaatggccggtacaacgggcagcgaaggagcgatccggagcgaatcccaaaaagccggtctcagttcggattgcaggctgcaactcgcctgcatgaagtcggaattgctagtaatcgcggatcagcatgccgcggtgaatacgttcccgggtcttgtacacaccgcccgtcacaccacgaaagtttacaacacctgaagtcggtgaggtaaccgcaaggagccagccgccgaaggtggggtagatgattggggtgaagtcgtaacaaggtagccgtatcggaaggtgcggctggatcacctcct

SEQ ID NO: 1406 - DNA, 1004 bp, Paenibacillus sp.
  R-27422
  modified_base (31)..(33): a, c, t, g, unknown or other
  modified_base (54)..(54): a, c, t, g, unknown or other
agagagagtaactgctctttgggtgacggtnnngagaagaaagccccggctaantacgtgccagcagccgcggtaatacgtagggggcaagcgttgtccggaattattgggcgtaaagcgcgcgcaggcggttctttaagtctggtgtttaaacccggagcttaacttcgggacgcactggaaactggggaacttgagtgcagaagaggagagtggaattccacgtgtagcggtgaaatgcgtagatatgtggaggaacaccagtggcgaaggcgactctctgggctgtaactgacgctgaggcgcgaaagcgtggggagcaaacaggattagataccctggtagtccacgccgtaaacgatgaatgctaggtgttaggggtttcgatacccttggtgccgaagttaacacattaagcattccgcctggggagtacggtcgcaagactgaaactcaaaggaattgacggggacccgcacaagcagtggagtatgtggtttaattcgaagcaacgcgaagaaccttaccaggtcttgacatccctttgacccctctagagatagaggtttccttcgggacagaggagacaggtggtgcatggttgtcgtcagctcgtgtcgtgagatgttgggttaagtcccgcaacgagcgcaacccttgatcttagttgccagcacgtaatggtgggcactctaaggtgactgccggtgacaaaccggaggaaggtggggatgacgtcaaatcatcatgccccttatgacctgggctacacacgtactacaatggctggtacaacgggaagcgaagccgcgaggtggagccaatcctaaaaagccagtctcagttcggattgcaggctgcaactcgcctgcatgaagtcggaattgctagtaatcgcggatcagcatgccgcggtgaatacgttcccgggtcttgtacacaccgcccgtcacaccacgagagtttacaacacccgaagtcggtggggtaaccgcaaggagcca

SEQ ID NO: 1407 - DNA, 1515 bp, Paenibacillus sp.
  oral taxon F45
agagtttgatcctggctcaggacgaacgctggcggcatgcctaatacatgcaagtcgagcggagttgacgagaagcttgcttctctgatgcttagcggcggacgggtgagtaacacgtaggcaacctgcctttcagactgggataacttccggaaacggatgctaataccggatacatcgtttcttcgcatgaagagacgaggaaagacggcgcaagctgtcactgagagatggacctgcggcgcattagctagttggtggggtaatggcccaccaaggcgacgatgcgtagccgacctgagagggtgaacggccacactgggactgagacacggcccagactcctacgggaggcagcagtagggaatcttccacaatgggcgaaagcctgatggagcaatgccgcgtgagtgatgaaggttttcggatcgtaaagctctgttgccagggaagaacgtttcgtagagtaactgctgcggaagtgacggtacctgagaagaaagccccggctaactacgtgccagcagccgcggtaatacgtagggggcaagcgttgtccggaattattgggcgtaaagcgcgtgcaggcggcttcttaagttgggtgtttaagaccggggctcaaccccggctcgcacccaaaactgggaagcttgagtgtaggagaggaaagtggaattccacgtgtagcggtgaaatgcgtagagatgtggaggaacaccagtggcgaaggcgactttctggcctataactgacgctgaggcgcgaaagcgtggggagcaaacaggattagataccctggtagtccacgccgtaaacgatgagtgctaggtgttcggggtttcgataccctgggtgccgaagttcacgcattaagcactccgcctggggagtacggccgcaaggctgaaactcaaaggaattgacggggacccgcacaagcagtggagtatgtggtttaattcgaagcaacgcgaagaaccttaccaggtcttgacatccctctgaccggtctagagatagaccttcccttcggggtagaggagacaggtggtgcatggttgtcgtcagctcgtgtcgtgagatgttgggttaagtcccgcaacgagcgcaacccttgactttagttgccagcatttcggatgggcactctagagtgattgccggtgacaaaccggaggaaggcggggatgacgtcaaatcatcatgccccttatgacctgggctacacacgtactacaatggccggtacagagggtcgcgaagccgcgaggtggagccaatcccagaaagccggtctcagttcggattgcaggctgcaactcgcctgcatgaagtcggaattgctagtaatcgcggatcagcatgccgcggtgaatacgttcccgggtcttgtacacaccgcccgtcacaccacgagagtttacaacacccgaagtcggtgaggtaaccgcaaggagccagccgccgaaggtggggtagatgattggggtgaagtcgtaacaaggtagccgt

SEQ ID NO: 1408 - DNA, 1541 bp, Paenibacillus timonensis
gacgaacgctggcggcgtacctaatacatgcaagtcgagcggagttaatcgggagcttgctcctgattagcttagcggcggacgggtgagtaacacgtaggcaacctgcccgtaagactgggataactaccggaaacggtagctaataccggatacgcaaattcctcgcatgggggatttgggaaaggcggagcaatctgtcacttacggatgggcctgcggcgcattagctagttggtgaggtaacggctcaccaaggcgacgatgcgtagccgacctgagagggtgaacggccacactgggactgagacacggcccagactcctacgggaggcagcagtagggaatcttccgcaatggacgaaagtctgacggagcaacgccgcgtgagtgatgaaggttttcggatcgtaaagctctgttgccagggaagaacgtcctctagagtaactgctaggggagtgacggtacctgagaagaaagccccggctaactacgtgccagcagccgcggtaatacgtagggggcgagcgttgtccggaattattgggcgtaaagcgcgcgcaggcggctgtttaagtctggtgtttaatcctggggctcaactccgggtcgcactggaaactgggcagcttgagtgcagaagaggagagtggaattccacgtgtagcggtgaaatgcgtagagatgtggaggaacaccagtggcgaaggcgactctctgggctgtaactgacgctgaggcgcgaaagcgtggggagcaaacaggattagataccctggtagtccacgccgtaaacgatgaatgctaggtgttaggggtttcgatacccttggtgccgaagttaacacattaagcattccgcctggggagtacggccgcaaggctgaaactcaaaggaattgacggggacccgcacaagcagtggagtatgtggtttaattcgaagcaacgcgaagaaccttaccaggtcttgacatccccctgaccggtctagagataggcctttccttcgggacaggggagacaggtggtgcatggttgtcgtcagctcgtgtcgtgagatgttgggttaagtcccgcaacgagcgcaacccttgactttagttgccagcaggtaaggttgggcactctagagtgactgccggtgacaaaccggaggaaggtggggatgacgtcaaatcatcatgccccttatggcctgggctacacacgtactacaatggccggtacaacgggaagcgaagccgcgaggtggagcgaatcctagaaaagccggtctcagttcggattgcaggctgcaactcgcctgcatgaagtcggaattgctagtaatcgcggatcagcatgccgcggtgaatacgttcccgggtcttgtacacaccgcccgtcacaccacgagagtttacaacacccgaagtcggtgaggtaacctgagctaccccaaaaagtgaagattatgctgcgaagcgtattccgagtacttttcggggaccccggtttggagccagccgccgaaggtggggtagatgattggggtg

SEQ ID NO: 1409 - DNA, 1504 bp, Pantoea agglomerans
agagtttgatccctggctcagattgaacgctggcggcaggcctaacacatgcaagtcgaacggtagcacagagagcttgctctcgggtgacgagtggcggacgggtgagtaatgtctgggaaactgcctgatggagggggataactactggaaacggtagctaataccgcataacgtcgcaagaccaaagagggggaccttcgggcctcttgccatcagatgtgcccagatgggattagctagtaggtggggtaacggctcacctaggcgacgatccctagctggtctgagaggatgaccagccacactggaactgagacacggtccagactcctacgggaggcagcagtggggaatattgcacaatgggcgcaagcctgatgcagccatgccgcgtgtatgaagaaggccttcgggttgtaaagtactttcagcggggaggaaggtgttgtggttaataaccgcagcaattgacgtacccgcagaagaagcaccggctaactccgtgccagcagccgcggtaatacggagggtgcaagcgttaatcggaattactgggcgtaaagcgcacgcaggcggtctgtcaagtcggatgtgaaatccccgggctcaacctgggaactgcattcgaaactggcaggctagagtcttgtagaggggggtagaattccaggtgtagcggtgaaatgcgtagagatctggaggaataccggtggcgaaggcggccccctggacaaagactgacgctcaggtgcgaaagcgtggggagcaaacaggattagataccctggtagtccacgccgtaaacgatgtcgacttggaggttgtgcccttgaggcgtggcttccggagctaacgcgttaagtcgaccgcctggggagtacggccgcaaggttaaaactcaaatgaattgacgggggcccgcacaagcggtggagcatgtggtttaattcgatgcaacgcgaagaaccttacctactcttgacatccagagaactttccagagatggtttggtgccttcgggaactctgagacaggtgctgcatggctgtcgtcagctcgtgttgtgaaatgttgggttaagtcccgcaacgagcgcaacccttatcctttgttgccagcggtccggccgggaactcaaaggagactgccagtgataaactggaggaaggtggggatgacgtcaagtcatcatggcccttacgagtagggctacacacgtgctacaatggcgcatacaaagagaagcgaactcgcgagagcaagcggacctcataaagtgcgtcgtagtccggattggagtctgcaactcgactccatgaagtcggaatcgctagtaatcgtagatcagaatgctacggtgaatacgttcccgggccttgtacacaccgcccgtcacaccatgggagtgggttgcaaaagaagtaggtagcttaaccttcgggagggcgcttaccactttgtgattcatgactggggtgaagtcgtaacaaggtaaccgta

SEQ ID NO: 1410 - DNA, 1542 bp, Pantoea ananatis
taaattgaagagtttgatcatggctcagattgaacgctggcggcaggcctaacacatgcaagtcggacggtagcacagaggagcttgctcctctggtgacgagtggcggacgggtgagtaatgtctggggatctgcccgatagagggggataaccactggaaacggtggctaataccgcataacgtcgcaagaccaaagagggggaccttcgggcctctcactatcggatgaacccagatgggattagctagtaggcggggtaacggcccacctaggcgacgatccctagctggtctgagaggatgaccagccacactggaactgagacacggtccagactcctacgggaggcagcagtggggaatattgcacaatgggcgcaagcctgatgcagccatgccgcgtgtatgaagaaggccttcgggttgtaaagtactttcagcggggaggaaggcgatgtggttaataaccgcattgattgacgttacccgcagaagaagcaccggctaactccgtgccagcagccgcggtaatacggagggtgcaagcgttaatcggaattactgggcgtaaagcgcacgcaggcggtctgttaagtcagatgtgaaatccccgggcttaacctgggaactgcatttgaaactggcaggcttgagtctcgtagaggggggtagaattccaggtgtagcggtgaaatgcgtagagatctggaggaataccggtggcgaaggcggccccctggacgaagactgacgctcaggtgcgaaagcgtggggagcaaacaggattagataccctggtagtccacgccgtaaacgatgtcgacttggaggttgttcccttgaggagtggcttccggagctaacgcgttaagtcgaccgcctggggagtacggccgcaaggttaaaactcaaatgaattgacgggggcccgcacaagcggtggagcatgtggtttaattcgatgcaacgcgaagaaccttacctactcttgacatccacggaatttggcagagatgccttagtgccttcgggaaccgtgagacaggtgctgcatggctgtcgtcagctcgtgttgtgaaatgttgggttaagtcccgcaacgagcgcaacccttatcctttgttgccagcgattcggtcgggaactcaaaggagactgccggtgataaaccggaggaaggtggggatgacgtcaagtcatcatggcccttacgagtagggctacacacgtgctacaatggcgcatacaaagagaagcgacctcgcgagagcaagcggacctcataaagtgcgtcgtagtccggatcggagtctgcaactcgactccgtgaagtcggaatcgctagtaatcgtggatcagaatgccacggtgaatacgttcccgggccttgtacacaccgcccgtcacaccatgggagtgggttgcaaaagaagtaggtagcttaaccttcgggagggcgcttaccactttgtgattcatgactggggtgaagtcgtaacaaggtaaccgtaggggaacctgcggttggatcacctcctt

SEQ ID NO: 1411 - DNA, 1344 bp, Pantoea brenneri
ggacgggtgagtaatgtctggggatctgcccgatagagggggataaccactggaaacggtggctaataccgcataacgtcgcaagaccaaagagggggaccttcgggcctctcactatcggatgaacccagatgggattagctagtaggcggggtaatggcccacctaggcgacgatccctagctggtctgagaggatgaccagccacactggaactgagacacggtccagactcctacgggaggcagcagtggggaatattgcacaatgggcgcaagcctgatgcagccatgccgcgtgtatgaagaaggccttcgggttgtaaagtactttcagcggggaggaaggcgatgyggttaataaccgcgtcgattgacgttacccgcagaagaagcaccggctaactccgtgccagcagccgcggtaatacggagggtgcaagcgttaatcggaattactgggcgtaaagcgcacgcaggcggtctgttaagtcagatgtgaaatccccgggcttaacctgggaactgcatttgaaactggcaggcttgagtctygtagaggggggtagaattccaggtgtagcggtgaaatgcgtagagatctggaggaataccggtggcgaaggcggccccctggacraagactgacgctcaggtgcgaaagcgtggggagcaaacaggattagataccctggtagtccacgccgtaaacgatgtcgacttggaggttgttcccttgaggagtggcttccggagctaacgcgttaagtcgaccgcctggggagtacggccgcaaggttaaaactcaaatgaattgacgggggcccgcacaagcggtggagcatgtggtttaattcgatgcaacgcgaagaaccttacctactcttgacatccagcgaactttccagagatggattggtgccttcgggaacgctgagacaggtgctgcatggctgtcgtcagctcgtgttgtgaaatgttgggttaagtcccgcaacgagcgcaacccttatcctttgttgccagcgattcggtcgggaactcaaaggagactgccggtgataaaccggaggaaggtggggatgacgtcaagtcatcatggcccttacgagtagggctacacacgtgctacaatggcgcatacaaagagaagcgacctcgcgagagcaagcggacctcacaaagtgcgtcgtagtccggatcggagtctgcaactcgactccgtgaagtcggaatcgctagtaatcgtggatcagaatgccacggtgaatacgttcccgggccttgtacacaccgcccgtcacaccatgggagtgggttgcaaaagaagtaggtagcttaacct

SEQ ID NO: 1412 - DNA, 1422 bp, Pantoea citrea
attgaacgctggcggcaggcctaacacatgcaagtcgaacggtagcacagaggagcttgctccttgggtgacgagtggcggacgggtgagtaatgtctgggaaactgcctgatggrgggggataactactggaaacggtagctaataccgcataacgtcgcaagaccaaagtgggggaccttcgggcctcacaccatcggatgtgcccagatgggattagctagtaggtggggtaacggctcacctaggcgacgatccctagctggtctgagaggatgaccagccacactggaactgagacacggtccagactcctacgggaggcagcagtggggaatattgcacaatgggcgcaagcctgatgcagccatgccgcgtgtatgaagaaggccttcgggttgtaaagtactttcagtcaggaggaagggtgtagtcttaaacggctatgcattgacgttactgacagaagaagcaccggctaactccgtgccagcagccgcggtaatacggagggtgcaagcgttaatcggaattactgggcgtaaagcgcacgcaggcggtctgtcaagtcggatgtgaaatccccgggctcaacccgggaactgcattcgaaactggcaggctagagtcttgtagaggggggtagaattccaggtgtagcggtgaaatgcgtagagatctggaggaataccggtggcgaaggcggccccctggacaaagactgacgctcaggtgcgaaagcgtggggagcaaacaggattagataccctggtagtccacgccgtaaacgatgtcgacttggaggttgtgcccttgaggygtggcttccggagctaacgcgttaagtcgaccgcctggggagtacggccgcaaggttaaaactcaaatgaattgacgggggcccgcacaagcggtggagcatgtggtttaattcgatgcaacgcgaagaaccttacctactcttgacatccagagaacttagcagagatgctttggtgccttcgggaactctgagacaggtgctgcatggctgtcgtcagctcgtgttgtgaaatgttgggttaagtcccgcaacgagcgcaacccctatcctttgttgccagcgattcggtcgggaactcaaaggagactgccggtgataaaccggaggaaggtggggatgacgtcaagtcatcatggcccttacgagtagggctacacacgtgctacaatggcgcatacaaagagaagcgacctcgcgagagcaagcggacctcataaagtgcgtcgtagtccggattggagtctgcaactcgactccatgaagtcggaatcgctagtaatcgtagatcagaatgctacggtgaatacgttcccgggccttgtacacaccgcccgtcacaccatgggagtgggttgcaaaagaagtagatagcttaacct

SEQ ID NO: 1413 - DNA, 1344 bp, Pantoea conspicua
ggacgggtgagtaatgtctggggatctgcccgatagagggggataaccactggaaacggtggctaataccgcataacgtcgcaagaccaaagagggggaccttcgggcctctcactatcggatgaacccagatgggattagctagtaggcggggtaatggcccacctaggcgacgatccctagctggtctgagaggatgaccagccacactggaactgagacacggtccagactcctacgggaggcagcagtggggaatattgcacaatgggcgcaagcctgatgcagccatgccgcgtgtatgaagaaggccttcgggttgtaaagtactttcagcggggaggaaggcgatgcggttaataaccgcgtcgattgacgttacccgcagaagaagcaccggctaactccgtgccagcagccgcggtaatacggagggtgcaagcgttaatcggaattactgggcgtaaagcgcacgcaggcggtctgttaagtcagatgtgaaatccccgggcttaacctgggaactgcatttgaaactggcaggcttgagtctcgtagaggggggtagaattccaggtgtagcggtgaaatgcgtagagatctggaggaataccggtggcgaaggcggccccctggacgaagactgacgctcaggtgcgaaagcgtggggagcaaacaggattagataccctggtagtccacgccgtaaacgatgtcgacttggaggttgttcccttgaggagtggcttccggagctaacgcgttaagtcgaccgcctggggagtacggccgcaaggttaaaactcaaatgaattgacgggggcccgcacaagcggtggagcatgtggtttaattcgatgcaacgcgaagaaccttacctactcttgacatccagcgaacttggcagagatgccttggtgccttcgggaacgctgagacaggtgctgcatggctgtcgtcagctcgtgttgtgaaatgttgggttaagtcccgcaacgagcgcaacccttatcctttgttgccagcgattcggtcgggaactcaaaggagactgccggtgataaaccggaggaaggtggggatgacgtcaagtcatcatggcccttacgagtagggctacacacgtgctacaatggcgcatacaaagagaagcgacctcgcgagagcaagcggacctcacaaagtgcgtcgtagtccggatcggagtctgcaactcgactccgtgaagtcggaatcgctagtaatcgtggatcagaatgccacggtgaatacgttcccgggccttgtacacaccgcccgtcacaccatgggagtgggttgcaaaagaagtaggtagcttaacct

SEQ ID NO: 1414 - DNA, 1344 bp, Pantoea septica
ggacgggtgagtaatgtctgggaaactgcccgatggagggggataactactggaaacggtagctaataccgcataacgtcgcragaccaaagtgggggaccttcgggcctcacaccatcggatgtgcccagatgggattagctagtaggtggggtaacggctcacctaggcgacgatccctagctggtctgagaggatgaccagccacactggaactgagacacggtccagactcctacgggaggcagcagtggggaatattgcacaatgggcgcaagcctgatgcagccatgccgcgtgtatgaagaaggccttcgggttgtaaagtactttcagcggggaggaaggcgatgyggttaataaccgcgtcgattgacgttacccgcagaagaagcaccggctaactccgtgccagcagccgcggtaatacggagggtgcaagcgttaatcggaattactgggcgtaaagcgcacgcaggcggtctgtcaagtcggatgtgaaatccccgggcttaacctgggaactgcattcgaaactggcaggctagagtcttgtagaggggggtagaattccaggtgtagcggtgaaatgcgtagagatctggaggaataccggtggcgaaggcggccccctggacaaagactgacgctcaggtgcgaaagcgtggggagcaaacaggattagataccctggtagtccacgccgtaaacgatgtcgacttggaggctgtttccttgagaagtggcttccggagctaacgcgttaagtcgaccgcctggggagtacggccgcaaggttaaaactcaaatgaattgacgggggcccgcacaagcggtggagcatgtggtttaattcgatgcaacgcgaagaaccttacctactcttgacatccagagaacttgscagagatgscctggtgccttcgggaactctgagacaggtgctgcatggctgtcgtcagctcgtgttgtgaaatgttgggttaagtcccgcaacgagcgcaacccttatcctttgttgccagcgattcggtcgggaactcaaaggagactgccggtgataaaccggaggaaggtggggatgacgtcaagtcatcatggcccttacgagtagggctacacacgtgctacaatggcgcatacaaagagaagcgacctcgcgagagcaagcggacctcataaagtgcgtcgtagtccggatcggagtctgcaactcgactccgtgaagtcggaatcgctagtaatcgtggatcagaatgccacggtgaatacgttcccgggccttgtacacaccgcccgtcacaccatgggagtgggttgcaaaagaagtaggtagcttaacct

SEQ ID NO: 1415 - DNA, 1491 bp, Papillibacter cinnamivorans
  modified_base (449)..(449): a, c, t, g, unknown or other
  modified_base (454)..(454): a, c, t, g, unknown or other
  modified_base (589)..(589): a, c, t, g, unknown or other
  modified_base (1427)..(1427): a, c, t, g, unknown or other
gatcctggctcaggacgaacgctggcggcgtgcctaacacatgcaagtcgaacgaaaataccaaagcagcaatgcgggggtattttagtggcggacgggtgagtaacgcgtgagcaatctgccttttggagggggataccgactggaaacggtcgttaataccgcataacgtatatggacgacatcgtccgtataccaaaggagcaatccgccgaaagatgagctcgcgtctgattagctagttggcggggtaaaggcccaccaaggcgacgatcagtagccggactgagaggttgaacggccacattgggactgagatacggcccagactcctacgggaggcagcagtggggaatattgggcaatgggcgaaagcctgacccagcaacgccgcgtcaaggaagaaggccttcgggttgtaaacttcttttaccagggaagaagaagtncggtncctggaaaacaagccacggctatctacgtgccagcagccgcggtaatacgtaggtggcaagcgttgtccggatttactgggtgtaaagggcgcgtaggcggcattgcaagtcagatgtgaaatgccggggcttanccccggagctgcatttgaaactgtagagcttgagtgatggagaggcaggcggaattcctagtgtagcggtgaaatgcgtagatattaggaggaacaccagtggcgaaggcggcctgctggacattaactgacgctgaggcgcgaaagcgtggggagcaaacaggattagataccctggtagtccacgctgtaaacgatggatactaggtgtgggaggtctgaccccttccgtgccggagttaacacaataagtatcccacctggggagtacgatcgcaaggttgaaactcaaaggaattgacgggggcccgcacaagcagtggagtatgtggtttaattcgaagcaacgcgaagaaccttaccaggatttgacatcctactaacgaggtagagatacgtcaggtgcccttcggggaaagtagagacaggtggtgcatggttgtcgtcagctcgtgtcgtgagatgttgggttaagtcccgcaacgagcgcaacccttattgctagttgctacgcaagagcactctagcgagactgccgttgacaaaacggaggaaggcggggacgacgtcaaatcatcatgccccttatgtcctgggctacacacgtactacaatggcggttaacagagggaagcaagacagtgatgtggagcaaatccctaaaaaccgtctcagttcggatcgcaggctgcaacccgcctgcgtgaagtcggaattgctagtaatcgcggatcagcatgccgcggtgaatacgttcccgggccttgtacacaccgcccgtcacaccatgagagtcgggaatacccgaagtccgtagtctaaccgcaagggggacgcngccgaaggtaggttcgataattggggtgaagtcgtaacaaggtaaccgtatcggaaggtgcggc

SEQ ID NO: 1416 - DNA, 1349 bp, Parabacteroides distasonis
accgggtggcgaccggcgcacgggtgagtaacgcgtatgcaacttgcctatcagagggggataacccggcgaaagtcggactaataccgcatgaagcaggggccccgcatggggatatttgctaaagattcatcgctgatagataggcatgcgttccattaggcagttggcggggtaacggcccaccaaaccgacgatggataggggttctgagaggaaggtcccccacattggtactgagacacggaccaaactcctacgggaggcagcagtgaggaatattggtcaatgggcgtaagcctgaaccagccaagtcgcgtgagggatgaaggttctatggatcgtaaacctcttttataagggaataaagtgcgggacgtgtcccgttttgtatgtaccttatgaataaggatcggctaactccgtgccagcagccgcggtaatacggaggatccgagcgttatccggatttattgggtttaaagggtgcgtaggcggccttttaagtcagcggtgaaagtctgtggctcaaccatagaattgccgttgaaactgggaggcttgagtatgtttgaggcaggcggaatgcgtggtgtagcggtgaaatgcttagatatcacgcagaaccccgattgcgaaggcagcctgccaagccatgactgacgctgatgcacgaaagcgtggggatcaaacaggattagataccctggtagtccacgcagtaaacgatgatcactagctgtttgcgatacacagtaagcggcacagcgaaagcgttaagtgatccacctggggagtacgccggcaacggtgaaactcaaaggaattgacgggggcccgcacaagcggaggaacatgtggtttaattcgatgatacgcgaggaaccttacccgggtttgaacgcattcagttcccgttggaaatgggagttttgagtatgttcgagtcaggcggaatgcgtggtttagcggtgaaatgctcaggaggtgtcggcttaagtgccataacgagcgcaacccttgccactagttactaacaggtgatgctgaggactctggtgggactgccagcgtaagctgcgaggaaggcggggatgacgtcaaatcagcacggcccttacatccggggcgacacacgtgttacaatggcgtggacaaagggaagccacctggcgacagggagcgaatccccaaaccacgtctcagttcggatcggagtctgcaacccgactccgtgaagctggattcgctagtaatcgcgcatcagccatggcgcggtgaatacgttcccgggccttgtacacaccgcccgtcaagccatgggagccgggggtacctgaagtccgtaa

SEQ ID NO: 1417 - DNA, 1383 bp, Parabacteroides goldsteinii
aggggcagcacgatgtagcaatacattggtggcgaccggcgcacgggtgagtaacgcgtatgcaacctacctatcagaggggaataacccggcgaaagtcggactaataccgcataaaacaggggttccacatggaaatatttgttaaagaattatcgctgatagatgggcatgcgttccattagatagttggtgaggtaacggctcaccaagtccacgatggataggggttctgagaggaaggtcccccacactggtactgagacacggaccagactcctacgggaggcagcagtgaggaatattggtcaatgggcgagagcctgaaccagccaagtcgcgtgaaggatgaaggatctatggtttgtaaacttcttttatatgggaataaagtgaggaacgtgttcctttttgtatgtaccatatgaataagcatcggctaactccgtgccagcagccgcggtaatacggaggatgcgagcgttatccggatttattgggtttaaagggtgcgtaggtggttaattaagtcagcggtgaaagtttgtggctcaaccataaaattgccgttgaaactggttgacttgagtatatttgaggtaggcggaatgcgtggtgtagcggtgaaatgcatagatatcacgcagaactccgattgcgaaggcagcttactaaactataactgacactgaagcacgaaagcgtggggatcaaacaggattagataccctggtagtccacgcagtaaacgatgattactagctgtttgcgatacacagtaagcggcacagcgaaagcgttaagtaatccacctggggagtacgccggcaacggtgaaactcaaaggaattgacgggggcccgcacaagcggaggaacatgtggtttaattcgatgatacgcgaggaaccttacccgggtttgaacgcattcggaccggagtggaaacacttcttctagcaatagccgtttgcgaggtgctgcatggttgtcgtcagctcgtgccgtgaggtgtcggcttaagtgccataacgagcgcaacccttatcactagttactaacaggtcatgctgaggactctagtgagactgccagcgtaagctgtgaggaaggtggggatgacgtcaaatcagcacggcccttacatccggggcgacacacgtgttacaatggtggggacaaagggcagctaccgggcgacaggatgctaatctccaaaccccatctcagttcggatcgaagtctgcaacccgacttcgtgaagctggattcgctagtaatcgcgcatcagccatggcgcggtgaatacgttcccgggccttgtacacaccgcccgtcaagccatgggagttgggggtacctaaagtccgtaaccgcaaggatc

SEQ ID NO: 1418 - DNA, 1326 bp, Parabacteroides gordonii
gagtttgatcctggctcaggatgaacgctagcgacaggcttaacacatgcaagtcgagggaccggcgcacgggtgagtaacgcgtatgcaacctacctatcagagggggataacccggcgaaagtcggactaataccgcataaataaagttgctgatagatgggcatgcgttccattagatagttggtaaggtaacggcttaccaagtctgcgatggataggggttctgagaggaaggtcccccacactggtactgagacacggaccagactcctacgggaggcagcagtgaggaatattggtcaatgggcgagagcctgaaccagccaagtcgcgtgaaggatgaaggattatggttcgtaaacttcttttataagggaatatgtatgtaccttatgaataaggatcggctaactccgtgccagcagccgcggtaatacggaggatccgagcgttatccggatttattgggtttaaagggtgcgtaggtggtttattaagtcagcggtgaaagtttgtggctcaaccataaaattgccgttgaaactggttaacttgagtatatttgaggtaggcggaatgcgtggtgtagcggtgaaatgcatagatatcacgcagaactccaattgcgaaggcagcttactaaactaactgacactgaagcacgaaagcgtggggatcaaacaggattagataccctggtagtccacgcagtaaacgatgattactaggagtttgcgagtaagctctacagcgaaagcgttaagtaatccacctggggagtacgccggcaacggtgaaactcaaaggaattgacgggggcccgcacaagcggaggaacatgtggtttaattcgatgatacgcgaggaaccttacccgggtttgaacgcgcgaggtgctgcatggttgtcgtcagctcgtgccgtgaggtgtcggcttaagtgccataacgagcgcaacccttatctttagttactaacagctgaggactctaaagagactgccagcgtaagctggaggaaggtggggatgacgtcaaatcagcacggcccttacatccggggcgacacacgtgttacaatggtgggcaaagggcagctacacagcgatgtgatgctaatctcccccatctcagttcggacgaagtctgcaacccgacttcggaagctggattcgctagtaatcgcgcatcagccatggcgcggtgaatacgttcccgggccttgtacacaccgcccgtcaagccatgggagttgggggtacctaaagtccgtatcggcctagggtaaaaccgatgactggggctaagtcgtaacaaggtaacc

SEQ ID NO: 1419 - DNA, 1344 bp, Parabacteroides johnsonii
gaccggcgcacggtggagtaacgcgtatgctacttacctatcagagggggatagcccggcgaaaggcggattaatactccataaaacaggggttccgcatgggactatttgttaaagattcatcgctgatagataggcatgcgttccattaggcagttggcggggtaacggcccaccaaaccgacgatggataggggttctgagaggaaggtcccccacattggtactgagacacggaccaaactcctacgggaggcagcagtgaggaatattggtcaatggccgagaggctgaaccagccaagtcgcgtgaaggatgaaggatctatggtttgtaaacttcttttataggggaataaagtgtgggacgtgtcccattttgtatgtaccctatgaataagcatcggctaactccgtgccagcagccgcggtaatacggaggtgcgagcgttatccggatttattgggtttaaagggtgcgtaggtggtaatttaagtcagcggtgaaagtttgtggctcaaccataaaattgccgttgaaactgggttacttgagtgtgtttgaggtaggcggaatgcgtggtgtagcggtgaaatgcatagatatcacgcagaactccaattgcgaaggcagcttactaaaccataactgacactgaagcacgaaagcgtgggtatcaaacaggattagataccctggtagtccacgcagtaaacgatgattactaggagtttgcgatacacagtaagctctacagcgaaagcgttaagtaatccacctggggagtacgccggcaacggtgaaactcaaaggaattgacgggggcccgcacaagcggagaacatgtggtttaattcgatgatacgcgaggaaccttacccgggtttgaacgtagtcagaccggccttgaaagaggtcttctagcaatagctgattacgaggtgctgcatggttgtcgtcagctcgtgccgtgaggtgtcggcttaagtgccataacgagcgcaacccttatcactagttactaacaggttaagctgaggactctggtgagactgccagcgtaagctgtgaggaaggtggggatgacgtcaaatcagcacggcccttacatccggggcgacacacgtgttacaatggcatggacaaagggcagctacctggcgacaggatgctaatctctaaaccatgtctcagttcggatcggagtctgcaactcgactccgtgaagctggattcgctagtaatcgcgcatcagccatggcgcggtgaatacgttcccgggccttgtacacaccgcccgtcaagccatgggagccgggggtacctgaagtccgtaaccgcaag

SEQ ID NO: 1420 - DNA, 1374 bp, Parabacteroides merdae
atgatttgtagcaatacagattgatggcgaccggcgcacgggtgagtaacgcgtatgcaacttacctatcagagggggatagcccggcgaaagtcggattaataccccataaaacaggggtcccgcatgggaatatttgttaaagattcatcgctgatagataggcatgcgttccattaggcagttggcggggtaacggcccaccaaaccgacgatggataggggttctgagaggaaggtcccccacattggtactgagacacggaccaaactcctacgggaggcagcagtgaggaatattggtcaatggccgagaggctgaaccagccaagtcgcgtgaaggaagaaggatctatggtttgtaaacttcttttataggggaataaagtggaggacgtgtccttttttgtatgtaccctatgaataagcatcggctaactccgtgccagcagccgcggtaatacggaggatgcgagcgttatccggatttattgggtttaaagggtgcgtaggtggtgatttaagtcagcggtgaaagtttgtggctcaaccataaaattgccgttgaaactgggttacttgagtgtgtttgaggtaggcggaatgcgtggtgtagcggtgaaatgcatagatatcacgcagaactccgattgcgaaggcagcttactaaaccataactgacactgaagcacgaaagcgtggggatcaaacaggattagataccctggtagtccacgcagtaaacgatgattactaggagtttgcgatacaatgtaagctctacagcgaaagcgttaagtaatccacctggggagtacgccggcaacggtgaaactcaaaggaattgacgggggcccgcacaagcggaggaacatgtggtttaattcgatgatacgcgaggaaccttacccgggtttgaacgtagtctgaccggctcaaccataaaacttccagcaatagcagattacgaggtgctgcatggttgtcgtcagctcgtgccgtgaggtgtcggcttaagtgccataacgagcgcaacccttatcactagttactaacaggtgaagctgaggactctggtgagactgccagcgtaagctgtgaggaaggtggggatgacgtcaaatcagcacggcccttacatccggggcgacacacgtgttacaatggcatggacaaagggcagctacctggcgacaggatgctaatctccaaaccatgtctcagttcggatcggagtctgcaactcgactccgtgaagctggattcgctagtaatcgcgcatcagccatggcgcggtgaatacgttcccgggccttgtacacaccgcccgtcaagccatgggagccgggggtacctgaagtccgtaaccgcaag

SEQ ID NO: 1421 - DNA, 973 bp, Parabacteroides sp.
  D13
  modified_base (9)..(12): a, c, t, g, unknown or other
  modified_base (17)..(17): a, c, t, g, unknown or other
  modified_base (21)..(21): a, c, t, g, unknown or other
ttgtatgtnnnnatgantaangatcggctaactccgtgccagcagccgcggtaatacggaggatccgagcgttatccggatttattgggtttaaagggtgcgtaggcggccttttaagtcagcggtgaaagtctgtggctcaaccatagaattgccgttgaaactggggggcttgagtatgtttgaggcaggcggaatgcgtggtgtagcggtgaaatgcatagatatcacgcagaaccccgattgcgaaggcagcctgccaagccattactgacgctgatgcacgaaagcgtggggatcaaacaggattagataccctggtagtccacgcagtaaacgatgatcactagctgtttgcgatacactgtaagcggcacagcgaaagcgttaagtgatccacctggggagtacgccggcaacggtgaaactcaaaggaattgacgggggcccgcacaagcggaggaacatgtggtttaattcgatgatacgcgaggaaccttacccgggtttgaacgcattcggaccgaggtggaaacaccttttctagcaatagccgtttgcgaggtgctgcatggttgtcgtcagctcgtgccgtgaggtgtcggcttaagtgccataacgagcgcaacccttgccactagttactaacaggtgatgctgaggactctggtgggactgccagcgtaagctgcgaggaaggcggggatgacgtcaaatcagcacggcccttacatccggggcgacacacgtgttacaatggcgtggacaaagggaggccacctggcgacagggagcgaatccccaaaccacgtctcagttcggatcggagtctgcaacccgactccgtgaagctggattcgctagtaatcgcgcatcagccatggcgcggtgaatacgttcccgggccttgtacacaccgcccgtcaagccatgggagccgggggtacctgaagtccgtaaccgaaaggatcgg

SEQ ID NO: 1422 - DNA, 1481 bp, Parabacteroides sp.
  NS31-3
agagtttgatcctggctcaggatgaacgctagcgacaggcttaacacatgcaagtcgaggggcagcatagaagtagcaatactttggtggcgaccggcgcacgggtgagtaacgcgtatgcaacctacctatcagaggggaataacccggcgaaagtcggactaataccgcataaaacaggggcaccgcatggtgatatttgttaaagaaattcgctgatagatgggcatgcgttccattaggtagttggtgaggtaacggctcaccaagccgacgatggataggggaactgagaggttggtcccccacactggtactgagacacggaccagactcctacgggaggcagcagtgaggaatattggtcaatgggcgggagcctgaaccagccaagtcgcgtgaaggaagaaggatctatggttcgtaaacttcttttgcaggggaataaagtgcgggacgtgtcctgttttgtatgtaccctgagaataaggatcggctaactccgtgccagcagccgcggtaatacggaggatccgagcgttatccggatttattgggtttaaagggtgcgtaggtggtttgataagtcagcggtgaaagtttgcagcttaactgtaaaaatgccgttgaaactgtcggacttgagtgtaaatgaggtaggcggaatgcgtggtgtagcggtgaaatgcatagatatcacgcagaactccgattgcgaaggcagcttactaagctacaactgacactgaagcacgaaagcgtggggatcaaacaggattagataccctggtagtccacgcagtaaacgatgattactagctgtttgcgatacacagtaagcggcacagcgaaagcgttaagtaatccacctggggagtacgccggcaacggtgaaactcaaaggaattgacgggggcccgcacaagcggaggaacatgtggtttaattcgatgatacgcgaggaaccttacccgggtttgaacgtagggagacaggggtggaaacatccttttcagcaatgactgcctacgaggtgctgcatggttgtcgtcagctcgtgccgtgaggtgtcggcttaagtgccataacgagcgcaacccttatttccagttactaacaggtgatgctgaggactctggagagactgccagcgtaagctgtgaggaaggtggggatgacgtcaaatcagcacggcccttacatccggggcgacacacgtgttacaatggtaaggacaaagggcagctaccgggcgaccggatgcgaatctctaaaccttatctcagttcggatcggagtctgcaactcgactccgtgaagctggattcgctagtaatcgcgcatcagccatggcgcggtgaatacgttcccgggccttgtacacaccgcccgtcaagccatgggagccgggggtacctgaagttcgtaaccgtaaggatcgacctagggtaaaactggtgactggggctaagtcgtaacaa

SEQ ID NO: 1423 - DNA, 1537 bp, Parachlamydia sp.
  UWE25
tgagaatttgatcttggttcagattgaatgctgacagcgtggatgaggcatgcaagtcgaacgaaaccttcgggtttagtggcggaagggttagtaagacatggataacttgcctttaactctgggataacggttggaaacgaccgctaataccggatagggtgaaaagaagacatcttttttttattaaagtgggggatcgcaagacctcgcggttaaagagaggtccatgggatatcagctagttggtgtggtaaaggcgcaccaaggctaagacgtctaggcggattgagagattgaccgccaacactgggactgagaactgcccagactcctacgggaggctgcagtcgagaatcattcgcaatgggcgaaagcctgacgatgcgacgctgtgtgagtgaagaaggccttagggtcgtaaagctctttcgcctgggaacaagatgagctggctaacatccagtgattttgagcgtaccaggtaaagaagcaccggctaactccgtgccagcagctgcggtaatacggagggtgcaagcattaatcggatttattgggcgtaaagggcgcgtaggcgggggtgtcagtcagatgtgaaatcccgaggctcaacctcggaacagcatttgaaactacatctctagagggtaggcggagaaaacggaattccacaagtagcggtgaaatgcgtagatatgtggaagaacaccggtggcgaaggcggttttctagcttatacctgacgctaaagcgcgaaagcaaggggatcaaacaggattagataccctggtagtccttgccgtaaactatgtatacttggtgtaactggactcaaccctagttgtgccgtagctaacgcgttaagtataccgcctggggagtacagtcgcaaggctgaaactcaaaagaattgacggggacccgcacaagcagtggagcatgtggtttaattcgatgcaacgcgaagaaccttacccagacttgacatgtagtagaccggtctagaaataggcctttccttcgggactgctacacaggtgctgcatggctgtcgtcagctcgtgccgtgaggtgttgggttaagtcccgcaacgagcgcaacccttatcattagttgccaacatttaaggtgggaactctaatgagactgcctgggttaaccaggaggaaggtgaggatgacgtcaagtccgcatggcccttatgtctggggctacacacgtgctacaatggtcggtacaaaaggcagcgaagccgcgaggtgaagcaaatcccgaaagccggccccagttcagattgtagtctgcaactcgactacatgaagacggaattgctagtaatggcgagtcagcaacatcgccgtgaatacgttcccgggtcttgtacacaccgcccgtcacatcatgggagttggttttacccgaatccgctggcttaaccgcaagggaagaggcgtgtaaggtgaggccgatgactgggatgaagtcgtaacaaggtagccctaccggaaggtggggctggatcacctcctttaa

SEQ ID NO: 1424 - DNA, 1463 bp, Paracoccus denitrificans
caacttgagagtttgatcctggctcagaacgaacgctggcggcaggcctaacacatgcaagtcgagcgaacccttcggggttagcggcggacgggtgagtaacgcgtgggaatatgccctttgctacggaatagccccgggaaactgggagtaataccgtatacgccctttgggggaaagatttatcggcaaaggattagcccgcgttggattaggtagttggtggggtaatggcctaccaagccgacgatccatagctggtttgagaggatgatcagccacactgggactgagacacggcccagactcctacgggaggcagcagtggggaatcttagacaatgggggcaaccctgatctagccatgccgcgtgagtgatgaaggccctagggttgtaaagctctttcagctgggaagataatgacggtaccagcagaagaagccccggctaactccgtgccagcagccgcggtaatacggagggggctagcgttgttcggaattactgggcgtaaagcgcacgtaggcggaccggaaagttgggggtgaaatcccggggctcaacctcggaactgccttcaaaactatcggtctggagttcgagagaggtgagtggaattccgagtgtagaggtgaaattcgtagatattcggaggaacaccagtggcgaaggcggctcactggctcgatactgacgctgaggtgcgaaagcgtggggagcaaacaggattagataccctggtagtccacgccgtaaacgatgaatgccagtcgtcgggcagcatgctgttcggtgacacacctaacggattaagcattccgcctggggagtacggtcgcaagattaaaactcaaaggaattgacgggggcccgcacaagcggtggagcatgtggtttaattcgaagcaacgcgcagaaccttaccaacccttgacatcgcaggaccgctccagagatggagttttctcgtaagagacctgtggacaggtgctgcatggctgtcgtcagctcgtgtcgtgagatgttcggttaagtccggcaacgagcgcaacccacactcttagttgccagcatttggttgggcactctaagagaactgccgatgataagtcggaggaaggtgtggatgaagtcaagtcctcatggcccttacgggttgggctacacacgtgctacaatggtggtgacagtgggttaatccccaaaagccatctcagttcggattggggtctgcaactcgaccccatgaagttggaatcgctagtaatcgcggaacagcatgccgcggtgaatacgttcccgggccttgtacacaccgcccgtcacaccatgggagttgggtctacccgacggccgtgcgctaaccagcaatggaggcagcggaccacggtaggctcagcgactggggtgaagtcgtaacaaggtagccgtaggggaacctgcggctggatcacctccttt

SEQ ID NO: 1425 - DNA, 1430 bp, Paracoccus marcusii
cagaacgaacgctggcggcaggcttaacacatgcaagtcgagcgagaccttcgggtctagcggcggacgggtgagtaacgcgtgggaacgtgcccttctctacggaatagccccgggaaactgggagtaataccgtatacgccctttgggggaaagatttatcggagaaggatcggcccgcgttggattaggtagttggtggggtaatggcccaccaagccgacgatccatagctggtttgagaggatgatcagccacactgggactgagacacggcccagactcctacgggaggcagcagtggggaatcttagacaatgggggcaaccctgatctagccatgccgcgtgagtgatgaaggccttagggttgtaaagctctttcagctgggaagataatgacggtaccagcagaagaagccccggctaactccgtgccagcagccgcggtaatacggagggggctagcgttgttcggaattactgggcgtaaagcgcacgtaggcggactggaaagtcagaggtgaaatcccagggctcaaccttggaactgcctttgaaactatcagtctggagttcgagagaggtgagtggaattccgagtgtagaggtgaaattcgtagatattcggaggaacaccagtggcgaaggcggctcactggctcgatactgacgctgaggtgcgaaagcgtggggagcaaacaggattagataccctggtagtccacgccgtaaacgatgaatgccagacgtcggcaagcatgcttgtcggtgtcacacctaacggattaagcattccgcctggggagtacggtcgcaagattaaaactcaaaggaattgacgggggcccgcacaagcggtggagcatgtggtttaattcgaagcaacgcgcagaaccttaccaacccttgacatggcaggaccgctggagagattcagctttctcgtaagagacctgcacacaggtgctgcatggctgtcgtcagctcgtgtcgtgagatgttcggttaagtccggcaacgagcgcaacccacgtccctagttgccagcattcagttgggcactctatggaaactgccgatgataagtcggaggaaggtgtggatgacgtcaagtcctcatggcccttacgggttgggctacacacgtgctacaatggtggtgacagtgggttaatccccaaaagccatctcagttcggattgtcctctgcaactcgagggcatgaagttggaatcgctagtaatcgcggaacagcatgccgcggtgaatacgttcccgggccttgtacacaccgcccgtcacaccatgggagttggttctacccgacgacgctgcgctaaccttcggggggcaggcggccacggtaggatcagcgactggggtgaagtcgtaacaaggtagccgtaggggaacctgcggctggatcac

SEQ ID NO: 1426 - DNA, 1500 bp, Paraprevotella clara
agagtttgatcctggctcaggatgaacgctagcggcaggcctaacacatgcaagtcgagggaggagctttcgggcttcgaccggcgtacgggtgcgtaacgcgtatacaatctgcctttcacatagggatagcccgaagaaatttggattaatacctaatggtatatagggatggcatcatttttatattaaagctgaggcggtgaaagatgagtatgcgttctattagctagttggagaggtaacggctccccaaggctacgatagataggggttctgagagggatatcccccacactggtactgagatacggaccagactcctacgggaggcagcagtgaggaatattggacaatggtcggaagactgatccagccatgccgcgtgcaggaagacggccttatgggttgtaaactgcttttgcaggggaagaataaggagtacgtgtactttgatgacggtactctgcgaataagcatcggctaactccgtgccagcagccgcggtaatacggaggatgcgagcgttatccggaatcattgggtttaaagggtccgtaggcgggctaataagtcagaggtgaaagcgctcagctcaactgagcaactgcctttgaaactgttagtcttgaatggttgtgaagtagttggaatgtgtagtgtagcggtgaaatgcttagatattacacagaacaccgatagcgaaggcatattactaacaattaattgacgctgatggacgaaagcgtggggagcgaacaggattagataccctggtagtccacgctgtaaacgatggatactagctgtttggttgtaagactgagtggctaagcgaaagtgataagtatcccacctggggagtacgcacgcaagtgtgaaactcaaaggaattgacgggggcccgcacaagcggaggaacatgtggtttaattcgatgatacgcgaggaaccttaccaaggtttaaatggagactgacaggtgtagagatacgcttttcttcggacagttttcaaggtgctgcatggttgtcgtcagctcgtgccgtgaggtgtcaggttaagtcctataacgagcgcaacccctgccattagttgctagcgagtcgagtcgagcactctagtgggactgccggtgcaaaccgtgaggaaggtggggatgacgtcaaatcatcacggcccttacatcttgggctacacacgtgctacaatggtcgttacagagagcagccactgcgtgagcaggcgcgaatctataaagacgatcacagttcggatcggagtctgcaactcgactccgtgaagctggaatcgctagtaatcggatatcagccatgatccggtgaatacgttcccgggccttgtacacaccgcccgtcaagccatggaagctgggggtacctgaagacggtcaccgaaaggagctgtttagggtaaaactagtgactggggctaagtcgtaacaaggtagccgtaccggaaggtgcggctggaacacct

SEQ ID NO: 1427 - DNA, 1532 bp, Paraprevotella xylaniphila
tacaatggagagtttgatcctggctcaggatgaacgctagctacaggcttaacacatgcaagtcgaggggcagcatgaacttagcttgctaagtttgatggcgaccggcgcacgggtgagtaacgcgtatccaacctgccctttacgcggggatagccttctgaaaggaagtttaatacccgatgaattcgtttagtcgcatggcttgatgaataaagatttatcagtaaaggatggggatgcgtcccattagcttgttggcggggtaacggcccaccaaggcgacgatgggtaggggttctgagaggaaggtcccccacattggaactgagacacggtccaaactcctacgggaggcagcagtgaggaatattggtcaatgggcgcgagcctgaaccagccaagtagcgtggaggacgacggccctacgggttgtaaactccttttataaggggataaagttggccatgtatggccatttgcaggtaccttatgaataagcatcggctaattccgtgccagcagccgcggtaatacggaagatgcgagcgttatccggatttattgggtttaaagggagcgtaggcgggcagtcaagtcagcggtcaaatggcgcggctcaaccgcgttccgccgttgaaactggcagccttgagtatgcacagggtacatggaattcgtggtgtagcggtgaaatgcttagatatcacgaggaactccgatcgcgcaggcattgtaccggggcattactgacgctgaggctcgaaggtgcgggtatcaaacaggattagataccctggtagtccgcacagtaaacgatgaatgcccgctgtcggcgacatagtgtcggcggccaagcgaaagcgttaagcattccacctggggagtacgccggcaacggtgaaactcaaaggaattgacgggggcccgcacaagcggaggaacatgtggtttaattcgatgatacgcgaggaaccttacccgggcttgaatcgcaggtgcatgggccggagacggccctttccttcgggactcctgcgaaggtgctgcatggttgtcgtcagctcgtgccgtgaggtgtcggcttaagtgccataacgagcgcaacccccctccccagttgccatcgggtaatgccgggcactttggggacactgccaccgcaaggtgcgaggaaggtggggatgacgtcaaatcagcacggcccttacgtccggggcgacacacgtgttacaatggggggtacagagggccgctgcccggtgacggttggccaatccctaaagcccctctcagttcggactggagtctgcaacccgactccacgaagctggattcgctagtaatcgcgcatcagccatggcgcggtgaatacgttcccgggccttgtacacaccgcccgtcaagccatgaaagccgggggtgcctgaagtccgtgaccgcgagggtcggcctagggtaaaaccggtgattggggctaagtcgtaacaaggtagccgtaccggaaggtgcggctggaacacctcctttct

SEQ ID NO: 1428 - DNA, 1532 bp, Parascardovia denticolens
tttttgtggagggttcgattctggctcaggacgaacgctggcggcgtgcttaacacatgcaagtcgaacgggatcctctccagcttgctgggggggtgagagtggcgaacgggtgagtaatgcgtgactaacctgcctcatggtctggaatagctcctggaaacgggtggtaatgccggatggtccaactttccgcatggtttgttgggaaagcttttgcgccatgggatggggtcgcgtcctatcagcttgttggtggggtgttggcctaccaaggcttcgacgggtagccggcctaagagggcgaccggccacattgggactgagatacggcccagactcctacgggaggcagcagtggggaatattgcacaatggggggaaccctgatgcagcgacgccgcgtgcgggatggaggccttcgggtcgtgaaccgcttttacaggggagcaagctttcgggtgagttaactttgtgaataagcaccggctaactacgtgccagcagccgcggtaatacgtagggtgcaagcgttgtccggatttattgggcgtaaagggctcgtaggcggttcgtcgcgtctggtgtgaaagcccgctgcttaacggtgggtttgcgttggatacgggcgggcttgagtgcagtaggggagactggaattctcggtgtaacggtggaatgtgtagatatcgggaagaacacctatggcgaaggcaggtctctgggctgttactgacgctgaggagcgaaagcgtggggagcgaacaggattagataccctggtagtccacgctgtaaacggtggacgctggatgtggggcccatttccacgggttccgtgtcggagctaacgcgttaagcgtcccgcctggggagtacggccgcaaggctaaaactcaaagaaattgacgggggcccgcacaagcggcggagcatgcggattaattcgatgcaacgcgaagaaccttaccagggcttgacatgttgacgatcgcctcagagatggggcttcccttcggggcgtcttcacaggtggtgcatggtcgtcgtcagctcgtgtcgtgagatgttgggttaagtcccgcaacgagcgcaaccctcgctttgtgttgccagcgggtcgtgccgggtactcgcaagggaccgccggggttaactcggaggaaggtggggatgacgtcagatcatcatgccccttacgtcctgggcttcacgcatgctacaatggccggtacagcgggatgcgatgccgtgaggcggagcggatcctgtaaaaccggtctcagttcggatcggagcctgcaactcggctccgtgaaggtggagtcgctagtaatcgcggatcagcaacgccgcggtgaatgcgttcccgggccttgtacacaccgcccgtcaagtcatgaaagtgggcagcacccgaagccggtggcctaacccttgtggggggagccgtctaaggtgaggtccgcgattgggactaagtcgtaacaaggtagccgtaccggaaggtgcggctggatcacctcctttct

SEQ ID NO: 1429 - DNA, 1026 bp, Parasutterella excrementihominis
  modified_base (864)..(864): a, c, t, g, unknown or other
  modified_base (935)..(935): a, c, t, g, unknown or other
  modified_base (969)..(970): a, c, t, g, unknown or other
  modified_base (980)..(980): a, c, t, g, unknown or other
  modified_base (982)..(982): a, c, t, g, unknown or other
  modified_base (1011)..(1011): a, c, t, g, unknown or other
acgcggagagaagcttgcttctctccggcgacgagtggcgaacgggtgagtaatacatcggaacgtgtccgctcgtgggggacaaccagccgaaaggttggctaataccgcatgagttctacggaagaaagagggggacccgcaagggcctctcgcgagcggagcggccgatgactgattagccggttggtgaggtaacggctcaccaaagcaacgatcagtagctggtctgagaggacgaccagccacactgggactgagacacggcccagactcctacgggaggcagcagtggggaattttggacaatgggcgcaagcctgatccagctattccgcgtgtgggatgaaggccctcgggttgtaaaccacttttgtagagaacgaaaagacaccttctaataaagggtgttgctgacggtactctaagaataagcaccggctaactacgtgccagcagccgcggtaatacgtagggtgcgagcgttaatcggaattactgggcgtaaagggtgcgcaggcggttgagtaagacagatgtgaaatccccgagcttaactcgggaatggcatatgtgactgctcgactagagtgtgtcagagggaggtggaattccacgtgtagcagtgaaatgcgtagatatgtggaagaacaccgatggcgaaggcagcctcctgggacataactgacgctcaggcacgaaagcgtggggagcaaacaggattagataccctggtagtccacgccctaaacgatgttaactagttgttgggaagtaaaattctcagtaacgcagccaacgcgagaagttaaccgcctgggaagtacggtcgcaagactaaaactcaaaggaattgacgggganccgcacaagcggtggatgatgtggattaattcgatgcaacgcgaaaaaccttacctacccttgacatgtcnggaagctcttgtaatgagagtgtgcccgcaaggnncctgaacacngntgctgcatggctgtcgtcagctcgtgtcntgagatgttgggtta

SEQ ID NO: 1430 - DNA, 1320 bp, Parasutterella secunda
attgaacgctggcggcatgctttacacatgcaagtcgaacgagtggcgaacgggtgagtaatacatcggaacgtgtcctgttgtgggggataactactcgaaagagtagctaataccgcataaggaaaggcgcagttggagcggccgatgactgattagctagttggtggggtaaaggcctaccaaggcgacgatcagtagctggtctgagaggacgaccagccacattgggactgagacacggcccaaactcctacgggaggcagcagtggggaattttggacaatgggggcaaccctgatccagccatgccgcgtgcgggaagaaggccttcgggttgtaaaccgcttttgttaggaacgatgacggtacctaaagaataagcaccggctaactacgtgccagcagccgcggtaatacgtagggtgcgagcgttaatcggaattactgggcgtaaagcgtgcgcaggcggttgggtaagacaggtgtgaaatccccgagcttaacttgggaactgcacttgtgactgctcaactagagtatgtcagagggaggtggaattccaagtgtagcagtgaaatgcgtagatatttggaagaacaccgatggcgaaggcagcctcctgggataactgacgctcatgcacgaaagcgtggggagcaaacaggattagataccctggtagtccacgccctaaacgatgtcaactagttgttgggcgcttagtaacacagctaacgcgagaagttgaccgcctggggagtacggtcgcaagattaaaactcaaaggaattgacggggacccgcacaagcggtggatgatgtggattaattcgatgcaacgcgaaaaaccttacctagccttgacatgcacaggtgctgcatggctgtcgtcagctcgtgtcgtgagatgttgggttaagtcccgcaacgagcgcaacccttgtcactagttgctacagcactctagtgaaactgccggtgacaaaccggaggaaggtggggatgacgtcaagtcctcatggcccttatggctagggcctcacacgtcatacaatggtcggcagagggcagcgaagctgtgaagtggagccaatcccarccgatcgtagtccggatgcagtctgcaactcgactgcagaagtcggaatcgctagtaatcgcggatcagcatgccgcggtgaatacgttcccgggtcttgtacacaccgcccgtcacaccatgggagtggggttcaccagaaggcgttgcctagggcggcgaccacggtgggtttcatgactggggtgaagtcgtaacaaggtagcagtaccggaagg

SEQ ID NO: 1431 - DNA, 1487 bp, Parvimonas micra
agagtttgatcctggctcaggacgaacgctggcggcgtgcttaacacatgcaagtcgaacgtgatttttgtggaaattctttcgggaatggaaatgaaatgaaagtggcgaacgggtgagtaacacgtgagcaacctaccttacacagggggatagccgttggaaacgacgattaataccgcatgagaccacagaatcgcatgatataggggtcaaagatttatcggtgtaagaagggctcgcgtctgattagctagttggaagggtaaaggcctaccaaggcgacgatcagtagccggtctgagaggatgaacggccacattggaactgagacacggtccaaactcctacgggaggcagcagtggggaatattgcacaatggggggaaccctgatgcagcgacgccgcgtgagcgaagaaggttttcgaatcgtaaagctctgtcctatgagaagataatgacggtatcataggaggaagccccggctaaatacgtgccagcagccgcggtaatacgtatggggcgagcgttgtccggaattattgggcgtaaagggtacgtaggcggttttttaagtcaggtgtgaaagcgtgaggcttaacctcattaagcacttgaaactggaagacttgagtgaaggagaggaaagtggaattcctagtgtagcggtgaaatgcgtagatattaggaggaataccggtggcgaaggcgactttctggacttttactgacgctcaggtacgaaagcgtggggagcaaacaggattagataccctggtagtccacgccgtaaacgatgaatgctaggtgttgggagtcaaatctcggtgccgaagttaacacattaagcattccgcctggggagtacggtggcaacactgaaactcaaaggaattgacggggacccgcacaagcagcggagcatgtggtttaattcgaagcaacgcgaagaaccttaccaaggcttgacatatagttgagttattgagaaattgataagtccctcgggacaactatacaggtggtgcatggttgtcgtcagctcgtgtcgtgagatgttgggttaagtcccgcaacgagcgcaacccttatcttcagttgccagcacgtagaggtgggaactctggagagactgccgatgacaaatcggaggaaggtggggatgacgtcaaatcatcatgccctttatgtcttgggctacacacgtgctacaatggttggtacaacgagaagcgagatagagatgttaagcgaaactctaaaaaccaatctcagttcggattgtaggctgcaactcgcctacatgaagtcggagttgctagtaatcgcgaatcagaatgtcgcggtgaatgcgttcccgggtcttgtacacaccgcccgtcacaccatgggagttggcaatacccgaagccgccgatctaaccgcaaggaggaaggcgtcgaaggtagggttaatgactggggtgaagtcgtaacaaggtaacc

SEQ ID NO: 1432 - DNA, 1530 bp, Parvimonas sp.
  oral taxon 110
ttttaatagagagtttgatcctggctcaggacgaacgctggcggcgtgcttaacacatgcaagtcgaacgtgatttttgtggaaagcccttcggggacggaagcgaaatgaaagtggcgaacgggtgagtaacacgtgagcaacctaccttacacagggggatagccgttggaaacgacgattaataccgcatgagaccacaaagccacatggcttaggggtaaaagatttatcggtgtaagatgggctcgcgtctgattagctagttggaagggtaaaggcctaccaaggcaacgatcagtagccggtctgagaggatgaacggccacattggaactgagacacggtccaaactcctacgggaggcagcagtggggaatattgcacaatggggggaaccctgatgcagcgacgccgcgtgagcgaagaaggttttcgaatcgtaaagctctgtcctatgagaagataatgacggtatcataggaggaagccccggctaaatacgtgccagcagccgcggtaatacgtatggggcgagcgttgtccggaattattgggcgtaaagggtacgtaggcggccttttaagtcaggtgtgaaagcgtgaggcttaacctcattaagcacttgaaactggaaggcttgagtgaaggagaggaaagtggaattcctagtgtagcggtgaaatgcgtagatattaggaggaataccggtggcgaaggcgactttctggacttttactgacgctcaggtacgaaagcgtggggagcaaacaggattagataccctggtagtccacgccgtaaacgatgaatgctaggtgttgggagtcaaatctcggtgccgaagttaacacattaagcattccgcctggggagtacggtggcaacactgaaactcaaaggaattgacggggacccgcacaagcagcggagcatgtggtttaattcgaagcaacgcgaagaaccttaccaaggcttgacatatagttgagttattgagaaattgataagtccctcgggacaactatacaggtggtgcatggttgtcgtcagctcgtgtcgtgagatgttgggttaagtcccgcaacgagcgcaacccttatcttcagttaccagcatgtaatgatggggactctggagagactgccgatgacaaatcggaggaaggtggggatgacgtcaaatcatcatgccctttatgtcttgggctacacacgtgctacaatggttggtacaacgagaagctagacagtgatgttaagcaaaactctaaaaaccaatctcagttcggattgtaggctgcaactcgcctacatgaagtcggagttgctagtaatcgcgaatcagaatgtcgcggtgaatgcgttcccgggtcttgtacacaccgcccgtcacaccatgggagttggcaatacccgaagccgccgatctaaccgcaaggaggaaggcgtcgaaggtagggttaatgactggggtgaagtcgtaacaaggtagccgtatcggaaggtgcggctggatcacctcctttct

SEQ ID NO: 1433 - DNA, 1475 bp, Pasteurella bettyae
  modified_base (29)..(29): a, c, t, g, unknown or other
  modified_base (127)..(127): a, c, t, g, unknown or other
  modified_base (130)..(130): a, c, t, g, unknown or other
  modified_base (203)..(203): a, c, t, g, unknown or other
  modified_base (290)..(290): a, c, t, g, unknown or other
  modified_base (354)..(354): a, c, t, g, unknown or other
  modified_base (369)..(369): a, c, t, g, unknown or other
  modified_base (371)..(371): a, c, t, g, unknown or other
  modified_base (627)..(627): a, c, t, g, unknown or other
  modified_base (963)..(963): a, c, t, g, unknown or other
  modified_base (1264)..(1265): a, c, t, g, unknown or other
attgaagagtttgatcatggctcagattnaacgctggcggcaggcttaacacatgcaagtcgaacggtagcayaggggagcttgctccctgggtgacgagtggcggacgggtgagtaatgcttgggnatntggcttatggagggggataactacgggaaactgtagctaataccgcgtaatgtctacggactaaagggtgggnctatttggccacctgccatgagatgagcccaagtgggattaggtagttggtggggtaaaggcctaccaagccgacgatctctagctngtctgagaggatgaccagccacactggaactgagacacggtccagactcctacgggaggcagcngtggggaatattgcncnatggggggaaccctgatgcagccatgccgcgtgaatgaagaaggccttcgggttgtaaagttctttcggtgatgaggaaggcaggtattttaatagaatacttgattgacgttaatcacagaagaagcaccggctaactccgtgccagcagccgcggtaatacggagggtgcgagcgttaatcggaataactgggcgtaaagggcatgcaggcggttgtttaagtgagatgtgaaagccccgggcttaacctgggnattgcatttcagactggacagctagagtactttagggaggggtagaattccacgtgtagcggtgaaatgcgtagagatgtggaggaataccgaaggcgaaggcagccccttgggaatgtactgacgctcatatgcgaaagcgtggggagcaaacaggattagataccctggtagtccacgctgtaaacgatgtcgatttggggattgagcaataagcttggtgcgcgaagctaacgtgataaatcgaccgcctggggagtacggccgcaaggttaaaactcaaatgaattgacgggggcccgcacaagcggtggagcatgtggtttaattcgatgnaacgcgaagaaccttacctactcttgacatccatagaagaactcagagatgagtttgtgccttcgggagctatgagacaggtgctgcatggctgtcgtcagctcgtgttgtgaaatgttgggttaagtcccgcaacgagcgcaacccttatcctttgttgccagcgacatggtcgggaactcaaaggagactgccagtgataaactggaggaaggtggggatgacgtcaagtcatcatggcccttacgagtagggctacacacgtgctacaatggtgcatacagagggaagcgagcctgcnngggggagcgaatctcagaaagtgcatctaagtccggattggagtctgcaactcgactccatgaagtcggaatcgctagtaatcgcaaatcagaatgttgcggtgaatacgttcccgggccttgtacacaccgcccgtcacaccatgggagtgggttgtaccagaagtagatagcttaacggaaacgggggcgtttaccacggtatgattc

SEQ ID NO: 1434 - DNA, 1544 bp, Pasteurella dagmatis
ttgaattgaagagtttgatcatggctcagattgaacgctggcggcaggcttaacacatgcaagtcgaacggtagcaggaagaaagcttgctttctttgctgacgagtggcggacgggtgagtaatgcttgggaatctggcttatggagggggataactgtgggaaactgcagctaataccgcgtagtatcgagagatgaaagggtgggaccttcgggccacctgccataagatgagcccaagtgggattaggtagttggtggggtaaaggcctaccaagccgacgatctctagctggtctgagaggatgaccagccacactgggactgagacacggcccagactcctacgggaggcagcagtggggaatattgcgcaatggggggaaccctgacgcagccatgccgcgtgaatgaagaaggccttcgggttgtaaagttctttcggtaatgaggaaggggtattattgaatagataatatcattgacgttaattacagaagaagcaccggctaactccgtgccagcagccgcggtaatacggagggtgcgagcgttaatcggaataactgggcgtaaagggcacgcaggcggacttttaagtgagatgtgaaatccccgagcttaacttgggaactgcatttcagactgggagtctagagtactttagggaggggtagaattccacgtgtagcggtgaaatgcgtagagatgtggaggaataccgaaggcgaaggcagccccttgggaatgtactgacgctcatgtgcgaaagcgtggggagcaaacaggattagataccctggtagtccacgctgtaaacgctgtcgatttggggattgtgctttatgcatggtgcccgaagctaacgtgataaatcgaccgcctggggagtacggccgcaaggttaaaactcaaatgaattgacgggggcccgcacaagcggtggagcatgtggtttaattcgatgcaacgcgaagaaccttacctactcttgacatccaaagaaggccgtagagatatggctgtgccttcgggaactttgagacaggtgctgcatggctgtcgtcagctcgtgttgtgaaatgttgggttaagtcccgcaacgagcgcaacccttatcctttgttgccagcgatttggtcgggaactcaaaggagactgccagtgacaaactggaggaaggtggggatgacgtcaagtcatcatggcccttacgagtagggctacacacgtgctacaatggtgcatacagagggcggcgagacggcgacgttgagcgaatctcagaaagtgcatctaagtccggattggagtctgcaactcgactccatgaagtcggaatcgctagtaatcgcaaatcagaatgttgcggtgaatacgttcccgggccttgtacacaccgcccgtcacaccatgggagtgggttgtaccagaagtagatagcttaaccttcgggagggcgtttaccacggtatgattcatgactggggtgaagtcgtaacaaggtaaccgtaggggaacctgcggttggatcacctcctta

SEQ ID NO: 1435 - DNA, 1545 bp, Pasteurella multocida
ttgaattgaagagtttgatcatggctcagattgaacgctggcggcaggcttaacacatgcaagtcgaacggtagcaggaagaaagcttgctttctttgctgacgagtggcggacgggtgagtaatgcttgggaatctggcttatggagggggataactgtgggaaactgcagctaataccgcgtattctctgaggaggaaagggtgggaccttagggccacctgccataagatgagcccaagtgggattaggtagttggtggggtaaaggcctaccaagcctgcgatctctagctggtctgagaggatgaccagccacactggaactgagacacggtccagactcctacgggaggcagcagtggggaatattgcgcaatggggggaaccctgacgcagccatgccgcgtgaatgaagaaggccttcgggttgtaaagttctttcggtaatgaggaagggatgttgttaaatagatagcatcattgacgttaattacagaagaagcaccggctaactccgtgccagcagccgcggtaatacggagggtgcgagcgttaatcggaataactgggcgtaaagggcacgcaggcggacttttaagtgagatgtgaaatccccgagcttaacttgggaactgcatttcagactgggagtctagagtactttagggaggggtagaattccacgtgtagcggtgaaatgcgtagagatgtggaggaataccgaaggcgaaggcagccccttgggaatgtactgacgctcatgtgcgaaagcgtggggagcaaacaggattagataccctggtagtccacgctgtaaacgctgtcgatttggggattgggctatatgcttggtgcccgaagctaacgtgataaatcgaccgcctggggagtacggccgcaaggttaaaactcaaatgaattgacgggggcccgcacaagcggtggagcatgtggtttaattcgatgcaacgcgaagaaccttacctactcttgacatcctaagaagagctcagagatgagcttgtgccttcgggaacttagagacaggtgctgcatggctgtcgtcagctcgtgttgtgaaatgttgggttaagtcccgcaacgagcgcaacccttatcctttgttgccagcgattcggtcgggaactcaaaggagactgccagtgacaaactggaggaaggtggggatgacgtcaagtcatcatggtccttacgagtagggctacacacgtgctacaatggtgcatacagagggcagcgagagtgcgagcttgagcgaatctcagaaagtgcatctaagtccggattggagtctgcaactcgactccatgaagtcggaatcgctagtaatcgcaaatcagaatgttgcggtgaatacgttcccgggccttgtacacaccgcccgtcacaccatgggagtgggttgtaccagaagtagatagcttaaccttcgggagggcgtttaccacggtatgattcatgactggggtgaagtcgtaacaaggtaaccgtaggggaacctgcggttggatcacctccttac

SEQ ID NO: 1436 - DNA, 1434 bp, Pediococcus acidilactici
tcgaacgaacttccgttaattgatcaggacgtgcttgcactgaatgagattttaatatgaagtgagtggcggacgggtgagtaacacgtgggtaacctgcccagaagcaggggataacacctggaaacagatgctaataccgtataacagagaaaaccgcctggttttcttttaaaagatggctctgctatcacttctggatggacccgcggcgcattagctagttggtgaggtaacggctcaccaaggcgatgatgcgtagccgacctgagagggtaatcggccacattgggactgagacacggcccagactcctacgggaggcagcagtagggaatcttccacaatggacgcaagtctgatggagcaacgccgcgtgagtgaagaagggtttcggctcgtaaagctctgttgttaaagaagaacgtgggtgagagtaactgttcacccagtgacggtatttaaccagaaagccacggctaactacgtgccagcagccgcggtaatacgtaggtggcaagcgttatccggatttattgggcgtaaagcgagcgcaggcggtcttttaagtctaatgtgaaagttcggctcaaccgaagaagtgcattggaaactgggagacttgagtgcagaagaggacagtggaactccatgtgtagcggtgaaatgcgtagatatatggaagaacaccagtggcgaaggcggctgtctggtctgtaactgacgctgaggctcgaaagcatgggtagcgaacaggattagataccctggtagtccatgccgtaaacgatgattactaagtgttggagggtttccgcccttcagtgctgcagctaacgcattaagtaatccgcctggggagtacgaccgcaaggttgaaactcaaaaaaattgacgggggcccgcacaagcggtggagcatgtggtttaattcgaagctacgcgaagaaccttaccaggtcttgacatcttctgccaacctaagagattaggcgttcccttcggggacagaatgacaggtggtgcatggttgtcgtcagctcgtgtcgtgagatgttgggttaagtcccgcaacgagcgcaacccttattactagttgccagcattcagttgggcactctagtgagactgccggtgacaaaccggaggaaggtggggacgacgtcaaatcatcatgccccttatgacctgggctacacacgtgctacaatggatggtacaacgagttgcgaaaccgcgaggtttagctaatctcttaaaaccattctcagttcggactgtaggctgcaactcgcctacacgaagtcggaatcgctagtaatcgcggatcagcatgccgcggtgaatacgttcccgggccttgtacacaccgcccgtcacaccatgagagtttgtaacacccaaagccggtggggtaaccttttaggagctagc

SEQ ID NO: 1437 - DNA, 984 bp, Pediococcus pentosaceus
gtcgaacgaacttccgttaattgattatgacgtacttgtactgattgagattttaacacgaagtgagtggcgaacgggtgagtaacacgtgggtaacctgcccagaagtaggggataacacctggaaacagatgctaataccgtataacagagaaaaccgcatggttttcttttaaaagatggctctgctatcacttctggatggacccgcggcgtattagctagttggtgaggtaaaggctcaccaaggcagtgatacgtagccgacctgagagggtaatcggccacattgggactgagacacggcccagactcctacgggaggcagcagtagggaatcttccacaatggacgcaagtctgatggagcaacgccgcgtgagtgaagaagggtttcggctcgtaaagctctgttgttaaagaagaacgtgggtaagagtaactgtttacccagtgacggtatttaaccagaaagccacggctaactacgtgccagcagccgcggtaatacgtaggtggcaagcgttatccggatttattgggcgtaaagcgagcgcaggcggtcttttaagtctaatgtgaaagccttcggctcaaccgaagaagtgcattggaaactgggagacttgagtgcagaagaggacagtggaactccatgtgtagcggtgaaatgcgtagatatatggaagaacaccagtggcgaaggcggctgtctggtctgcaactgacgctgaggctcgaaagcatgggtagcgaacaggattagataccctggtagtccatgccgtaaacgatgattactaagtgttggagggtttccgcccttcagtgctgcagctaacgcattaagtaatccgcctggggagtacgaccgcaaggttgaaactcaaaagaattgacgggggcccgcacaagcggtggagcatgtggtttaattcgaagctacgcgaagaaccttaccaggtcttgacatcttctgacagtc

SEQ ID NO: 1438 - DNA, 1393 bp, Peptococcus niger
gcctaatacatgcaagtcgaacggacgaggaaagagacctcttcggagtgacctttcccgagttagtggcggatgggtgagtaacgcgtgagtgacctgcccagcagtggggaataacagtgagaaatcattgctaataccgcatatcttacaagtgcttcatggtacctgtaagaaagacggccttcgtgctgtcgctgttggatggactcgcgtctgattagccagttggtggggtaacggcctaccaaagcaatgatcagtagccggcctgagagggtgaacggccacattgggactgagacacggcccaaactcctacgggaggcagcagtggggaatcttccgcaatgggcgcaagcctgacggagcaatgccgcgtgagtgaagaaggccttcgggttgtaaaactctgtcctcatccaagagaggggaaggtagtaactgacctttccaggacggtagatgaggaggaagccccggctaactatgtgccagcagccgcggtaaaacatagggggcaagcgttgtccggaatcactgggcgtaaagggcgcgcaggcggtctgttaagtcagatgtgaaaggttagggctcaaccctgaacgtgcatctgatactggcagacttgagtatggaagaggtaagtggaattcctagtgtagcggtgaaatgcgtagatattaggaggaacaccagtggcgaaggcgacttactgggccataactgacgctgaggcgcgaaagcgtggggagcaaacaggattagataccctggtagtccacgccgtaaacgatgggtactaggtgtcggaggtttcaagaccgtcggtgccgcagttaacacaataagtaccccgcctggggagtacggtcgcaagactgaaactcaaaggaattgacgggggcccgcacaagcggtggagcatgtggtttaattcgacgcaacgcgaagaaccttaccaagacttgacatcctgctgccgagtgatgtaatgtcacttttccttcgggacagcagagacaggtggtgcatggttgtcgtcagctcgtgtcgtgagatgttgggttaagtcccgcaacgagcgcaacccttgtcgtcagttgccatcattaagttgggcactctgacgagactgccgcagacaatgcggaggaaggtggggatgacgtcaaatcatcatgccccttatgtcttgggctacacacgtgctacaatggtcggtacagagggcagcgaaggagcgatccggagccaatctcacaaagccgatcccagttcggattgcaggctgcaactcgcctgcatgaagtcggaatgcgtagtaatcgcaggtcagcatactgcggtgaatacgttcccgggccttgtacacaccgcccgtcacaccacg

SEQ ID NO: 1439 - DNA, 1366 bp, Peptococcus sp.
  oral clone JM048
gagtttgattctggctcaggatgaacgctggcggcatgcctaacacatgcaagttgaacgagtagcgaacgggtgagtaacgcgtgggcaaccaaccttacactgggggataacacagagaaatttgtgctaataccgcataagaaaaagtggtgtaagacgggcccgcgtctgattagttagttggtgaggtaaaagcttaccaaggcaacgatcagtagccgacctgagagggtgatcggccacattgggactgagacacggcccaaactcctacgggaggcagcagtgggggatattgcacaatggagggaactctgatgcagcaatgccgcgtgaaggaagaaggttttcggattgtaaacttctatcagcagggaagatgacggtacttgactaagaagccccggctaactatgtgccagcagccgcggtaatacatagggggcaagcgttatccggaatgactgggtgtaaagggtgcgtaggcggtaaggtaagtctgatgtgaaagactggggctcaactccaggggtgcattggaaactatgttactagagtacaggagagggaagcggaattcctagtgtagcggtgaaatgcgtagatattaggaggaacaccggtggcgaaggcggctttctggactgactgacgctgaggcacgaaagcgtggggagcaaacaggattagataccctggtagtccacgctgtaaacgatgagtgctaggtgctggccggtcggtgccgaagttaacgcaataagcactccacctggggagtacggccgcaaggctgaaactcaaaggaattgacgggggcccgcacaagcggtggagcatgtggtttaattcgaagcaacgcgaagaaccttaccagatcttgacatcgacaggtggtgcatggttgtcgtcagctcgtgtcgtgagatgttaggttaagtcctgtaacgagcgcaacccttatgtttagtagccagcggccgggcactctgaacagactgccgtggagaacacggaggaaggcggggatgacgtcaaatcatcatgccccttatgatctgggctacacacgtgctacaatggcggacaaagggaagcgaaggggagacctggagcgaatccgagtccgtcccagttcggatgtagtctgcaactcgactacagaagttggaatcgctagtaatcgcagatcagcatgctgcggtgaatacgttcccgggccttgtacacaccgcccgtcacaccatgggagttgggagtgcccaaaagcagtgtccaggaagctgtctaaggcaagaccgatgactggggtgaagtcgtaacaaggtagccgtatcggaaggtgcggctggatcacctcctt

SEQ ID NO: 1440 - DNA, 1541 bp, Peptococcus sp.
  oral taxon 167
gagtttgatcctggctcaggacaaacgctggcggcatgcctaacacatgcaagtcgaacggacagaacagagaagcttttcggagtggaactggaaagttagtggcggatgggtgagtaacgcgtggacaacctaccttgtaaaggggaataacctcgagaaatcgaagctaataccccataataaccttgattcgcatgaagcaaggaggaaaggcggccttagagctgtcgatagaagatgggtccgcgtctgattagctagttggtgaggtaaaggctcaccaaggcgacgatcagtagccggcctgagagggtgaacggccacattgggactgagacacggcccaaactcctacgggaggcagcagtggggaatcttccgcaatgggcgaaagcctgacggagcaatgccgcgtgagtgaagaaggccttcgggttgtaaaactctgtcctagacgaagagagagtattgtgagtaactgacaatgctaggacggtagactaggaggaagccccggctaactatgtgccagcagccgcggtaaaacatagggggcaagcgttgtccggaatcactgggcgtaaagggcgcgcaggcggtaaattaagtcaggtgtgaaagttcggggctcaaccccgtgattgcacctgatactgataaactagagtgttggagaggtaagtggaattcctagtgtagcggtggaatgcgtagatattaggaggaacaccagtggcgaaggcgacttactggccaataactgacgctgaggcgcgaaagcgtggggagcaaacaggattagataccctggtagtccacgccgtaaacgatgagtactaggtgttggttgtttcgaaacaatcggtgccgcagtaaacacaataagtactccgcctggggagtacggtcgcaagactgaaactcaaaggaattgacgggggcccgcacaagcggtggagcatgtggtttaattcgacgcaacgcgaagaaccttaccaagacttgacatcctcttgccgggatatgtaatgtatccttttcttcggaacaagagagacaggtggtgcatggttgtcgtcagctcgtgtcgtgagatgttgggttaagtcccgcaacgagcgcaacccttgttgttagttgccatcattaagttgggcactctaacaagactgccggtgacaaaccggaggaaggtggggatgacgtcaaatcatcatgccccttatgtcttgggctacacacgtgctacaatggtcggtacagagggcagcaagagagtgatcttgagcgaatctcaaaaagccgatcccagttcggattgtaggctgcaactcgcctacatgaagtcggaatcgctagtaatcgcaggtcagcatactgcggtgaatacgttcccgggccttgtacacaccgcccgtcacaccacgaaagttggtaacatccgaagccggtgatctaacctgcaaaggaggaagccgcccacggtgggatcgatgattggggtgaagtcgtaacaaggtagccgtatcggaaggtgc

SEQ ID NO: 1441 - DNA, 1384 bp, Peptoniphilus asaccharolyticus
  modified_base (146)..(146): a, c, t, g, unknown or other
  modified_base (182)..(184): a, c, t, g, unknown or other
  modified_base (416)..(416): a, c, t, g, unknown or other
  modified_base (448)..(448): a, c, t, g, unknown or other
  modified_base (620)..(620): a, c, t, g, unknown or other
  modified_base (649)..(649): a, c, t, g, unknown or other
  modified_base (890)..(890): a, c, t, g, unknown or other
  modified_base (1208)..(1208): a, c, t, g, unknown or other
agagtttgatcctggctcaggacgaacgctggcggcgcgcttaacacatgcaagtcgagcgatgaagctttaacagattccttcgggatgaagataaagcggattagcggcggacgggtgagtaacacgtgagtaacctgcctttnacatcgggatagcctcgggaaaccgggattaatacnnnataaaatcctacatacacatgtacataggttcaaaactacggtggtcttagatggactcgcgtcccattagctagttggtggagtaaaagcctaccaaggcgacgatgggtagccggcctgagagggtgaccggccacattggaactgagaaacggtccaaactctacgggaggcagcagtggggaatattgcacaatggaggaaactctgatgcagcgacgccgcgtgaangaagaaggccttcgggcagtaaaggtcttttntatgggaagataatgacggtaccataaggaaaagcaccggctgcatacgtgccagcagccgcggtaatacgtagggggctagcgttgtccggaatcactgggcgtaaagggttcgcaggcggaaatgcaagtcagatgtaaaaggcagtagcttaactactgtaagcatttnaaactgtatatcttgagaagtgtagaggnaagtggaatttttagtgtagcggtgaaatgcgtagatattaaaaagaataccggtggcgaaggcgacttactgggcacattctgacgctgaggaacgaaagcgtgggtagcaaacaggattagataccctggtagtccacgctgtaaacgatgagtgctaggtgtcggcaaaagtcggtgccgcagttaacacattaagcactccgcctggggagtacgtgcgcaagtatgaaactcaaangaatcaaaggaatcgacggggacccgcacaagcagcggagatgtggtttaattcgaagcaacgcgaagaaccttaccagggcttgacatatagaggacatatttagagataaataattcttcttcggaagcctctatacaggtggtgcatggttgtcgtcagctcgtgtcgtgagatgttgggttaagtcccgcaacgggcgcaacccttatatctagttgccagcatttcggatgggaactctagatagactgccgatgacaaatcggaggaaggtggggatgacgtcaaatcatcatgccctatatgccctgggcnacacacgtgctacaatggaaggtacaaagggaagccaaatcgcgaggtggagcaaacctcaaaaagcctttcccagttcggattgttctctgcaactcgagtacatgaagctggagttgctagtaatcgtagatcagaatgctgcggtgaatgcgttcccgggtcttgtacacacc

SEQ ID NO: 1442 - DNA, 1386 bp, Peptoniphilus duerdenii
acagatcccttcggggtgaagatgaaatggattagcggcggacgggtgagtaacacgtgagtaacctgcctttgacattgggatagcctcgggaaactgggattaataccaaatgatactatttgaccacatggttggatagtcaaagaaattcggtcaaagatggactcgcggctgattagctagttggtgaggtaacggcccaccaaggcgacgatcagtagccggcctgagagggtgaccggccacattggaactgagacacggtccaaactcctacgggaggcagcagtggggaatattgcacaatgggggaaaccctgatgcagcgacgccgcgtgagcgaagaaggccttcgggtcgtaaagctcttttatgagggaagataatgacggtacctcaagaaaaagccccggctaactacgtgccagcagccgcggtaatacgtagggggctagcgttgtccggaatcactgggcgtaaagggttcgcaggcggaataacaagtcagatgtgaaaggcatgggctcaacccatgtaagcatttgaaactgtaattcttgagaagtggagaggtaagtggaattcctagtgtagcggtgaaatgcgtagatattaggaggaatacctgtggcgaaggcgacttactggacacaaatctgacgctgaggaacgaaagcgtgggtagcaaacaggattagataccctggtagtccacgccgtaaacgatgagtgctaggtgtcgggggagacctcggtgccggcgttaacacaataagcactccgcctggggagtacgtgcgcaagcatgaaactcaaaggaattgacggggacccgcacaagcagcggagcatgtggtttaattcgacgcaacgcgaagaaccttaccagggcttgacatactgaggacgtacttagagataagtattctccttcgggagcctcaatacaggtggtgcatggttgtcgtcagctcgtgtcgtgagatgttcagttaagtctggcaacgagcgcaacccttacctttagttaccagcatttcggatggggactctaaagggactgccgatgataaatcggaggaaggtggggatgacgtcaaatcatcatgccctatatgccctgggctacacacgtgctacaatggtcggaacagagggaagcaacagagcgatctcaagcaaatctcataaatccgatcccagttcggattgcactctgcaactcgagtgcatgaagtcggagttgctagtaatcgcagatcagcatgctgcggtgaatgcgttcccgggtcttgtacacaccgcccgtcacaccatgggagcctgtaatacccgaagccggtgagccaaccgcaaggaggcagccgtcgaaggtaggatagg

SEQ ID NO: 1443 - DNA, 1476 bp, Peptoniphilus harei
gacgaacgctggcggcgcgcttaacacatgcaagtcgagcgatgaaatcttgacagatccttcggggtgaagataagatggattagcggcggacgggtgagtaacacgtgagtaacctgccttagacattgggatagcctcgggaaaccgggattaataccaaatgaaatcataggtgcccatgcactaatgatcaaaactccggtggtctaagatggactcgcgtcccattagctagttggtgaggtaacggcccaccaaggcgacgatgggtagccggcctgagagggtgaacggccacattggaactgagaaacggtccaaactcctacgggaggcagcagtggggaatattgcacaatggagggaactctgatgcagcgacgccgcgtgaacgatgaaggctttcgagtcgtaaagttcttttatatgggaagataatgacggtaccataagaaaaagccccggctaactacgtgccagcagccgcggtaatacgtagggggctagcgttgtccggaatcactgggcgtaaagggttcgcaggcggaaatgcaagtcagatgtaaaaggcagtagcttaactactgtaagcatttgaaactgcatatcttgagaagagtagaggtaagtggaatttttagtgtagcggtgaaatgcgtagatattaaaaagaataccggtggcgaaggcgacttactgggctcattctgacgctgaggaacgaaagcgtgggtagcaaacaggattagataccctggtagtccacgctgtaaacgatgagtgctaggtatcggaataattcggtgccgcagttaacacattaagcactccgcctggggagtacgtgcgcaagcatgaaactcaaaggaattgacggggacccgcacaagcagcggagcatgtggtttaattcgaagcaacgcgaagaaccttaccagggcttgacatactgaggaccggtatagagatataccctcttcttcggaagcctcaatacaggtggtgcatggttgtcgtcagctcgtgtcgtgagatgttcagttaagtctggcaacgagcgcaacccctatctttagttaccagcatttcggatggggactctaaagagactgccgatgataaatcggaggaaggtggggatgacgtcaaatcatcatgccctatatgccctgggctacacacgtgctacaatggaagatacaaagggaagcgagatagtgatattaagccaacctcaaaaagtctttctcagttcggattgtactctgcaactcgagtacatgaagatggagttgctagtaatcgcagatcagcatgctgcggtgaatgcgttcccgggtcttgtacacaccgcccgtcacaccatggaagcttgtaatacccgaagcctgcgagcgaaccttagggaagcagcagtcgaaggtaggataggtgactggggtgaagtcgtaacaaggtagccgtatcggaagg

SEQ ID NO: 1444 - DNA, 1423 bp, Peptoniphilus indolicus
  modified_base (162)..(162): a, c, t, g, unknown or other
  modified_base (1214)..(1214): a, c, t, g, unknown or other
cgcgcctaacacatgcaagtcgagcgatgaagacataaccgacaccttcgggaagaagttaagttggattagcggcggacgggtgagtaacacgtgagtaacctgcctttgacacgggggatagccaccggaaacggtgattaatacccgatgaaatcgtantgacacatgtcataacgatcaaagtgaattagcggtcaaagatggactcgcgtctgattaattagttggtgaggtaacggctcaccaagatagcgatcagtagccggcctgagagggtgaacggccacattggaactgagaaacggtccaaactcctacgggaggcagcagtggggaatattgcacaatgggggaaaccctgatgcagcgacgccgcgtgagcgaagaaggatttcgattcgtaaagctctgtcctatgggaagataatgacggtaccataggaggaagccccggctaactacgtgccagcagccgcggtaatacgtagggggcgagcgttgtccggaatcactgggcgtaaagggttcgcaggcggtttagaaagtcagatgtgaaaggcgagggctcaaccctcgtaagcatttgaaacttctaaacttgagtagtgaagaggtaagtggaattcctagtgtagcggtgaaatgcgtagatattaggaggaataccggtggcgaaggcgacttactggtcacaaactgacgctgaggaacgaaagcgtgggtagcaaacaggattagataccctggtagtccacgccgtaaacgatgagtgctaggtgtccggaggatttcggtgccgcagttaacacaataagcactccgcctggggagtacgtgcgcaagcatgaaactcaaaggaattgacggggacccgcacaagcagcggagcatgtggtttaattcgaagcaacgcgaagaaccttaccagggcttgacataatattgacccctctagagatagaggtttcccttcggggacagtattacaggtggtgcatggttgtcgtcagctcgtgtcgtgagatgttgggttaagtcccgcaacgagcgcaacccttacctttagttgccagcatgtaaagatgggaactctaaagggactgccgatgataaatcggaggaaggtggggatgacgtcaaatcatcatgccctttatgtcctgggctacacacgtgctacaatggtcggaacaaagagcgggcaagctagngatagcaagcgaatctcaaaaagccgatctcagttcggattgttctctgcaactcgagaacatgaagtcggagttgctagtaatcgcagatcagaatgctgcggtgaatgcgttcccgggtcttgtacacaccgcccgtcacaccatgggagttggcaatacccgaagtcgtcgagctaaccgcaaggaagcagacgccgaaggtaggg

SEQ ID NO: 1445 - DNA, 1480 bp, Peptoniphilus ivorii
gacgaacgctggcggcgcgcctaacacatgcaagtcgagcgatgaacctcttcggatcccttcggggtgaagaagagcggattagcggcggacgggtgagtaacgcgtgaggaacctgcctctcacaacgggatagcctcgggaaaccgggattaataccgtatgagaccacagtaacgcctgttacagtggttaaagtcacagcggtgagagatggcctcgcgtctgattagctagttggtggggtaacggcctaccaaggctgcgatcagtaaccggcctgagagggtgaacggtcacattggaactgagacacggtccaaactcctacgggaggcagcagtggggaatcttgcacaatgggggcaaccctgatgcagcgacgccgcgtgagcgatgaaggctttcgagtcgtaaagctctgtcctatgggaagataatgacggtaccataggaggaagccccggctaactacgtgccagcagccgcggtaatacgtagggggcgagcgttgtccggaattactgggcgtaaagggttcgcaggcggctcggcaagtccgatgtaaaaggcgaaggcttaaccttcgyaagcatcggaaactgtcgagcttgagtgaaggagaggcaagtggaattcctagtgtagcggtggaatgcgtagatattaggaggaataccggtggcgaaggcgacttgctggacttcaactgacgctgaggaacgaaagcgtgggtagcaaacaggattagataccctggtagtccacgctgtaaacgatgagtgctaggtgtcgggggtcaaacctcggtgccgtcgttaacacaataagcactccgcctggggagtacgtgcgcaagcatgaaactcaaaggaattgacggggacccgcacaagcagcggagcatgtggtttaattcgaagcaacgcgaagaaccttaccgggacttgaaatattgtcgccaattttagagataaaatgttttcttcggaaacggcaatacaggtggtgcatggttgtcgtcagctcgtgtcgtgagatgttgggttaagtcccgcaacgagcgcaacccttactttcagttgccagcgcattatggcgggaactctggaaggactgccgatgataaatcggaggaaggtggggatgacgtcaaatcatcatgccctttatgtcccgggctacacacgtgctacaatggtcggtacagagggcagcgagacagcgatgttaagcgaatctcaaaaagccgatcccagttcggattgcaggctgcaactcgcctgcatgaagtcggagttgctagtaatcgcggatcagaatgccgcggtgaatgcgttcccgggtcttgtacacaccgcccgtcacaccatgggagttggcaatacccgaagccagcgagccaaccgtaaggaggcagctgtcgaaggtagggttaatgactggggtgaagtcgtaacaaggtagccgtatcggaagg

SEQ ID NO: 1446 - DNA, 1531 bp, Peptoniphilus lacrimalis
ttttaattgagagtttgatcctggctcaggacgaacgctggcggcgcgcttaacacatgcaagtcgagcgatgaaatcttaacagaacccttcggggcgaagataagacggattagcggcggacgggtgagtaacacgtgagtaacctgccttttacacagggatagcctcgggaaaccgggattaaaacctgatgaaactatcaaatcacatgattaagaaagttaaaactccggtggtaaaagatggactcgcgtcccattagctagttggtgaaggtaacggcccaccaaggcaacgatgggtagccggcctgagagggtgaacggccacattggaactgagaaacggtccaaactcctacgggaggcagcagtggggaatattgcacaatgggggaaaccctgatgcagcgacgccgcgtgagcgaagaaggccttcgggtcgtaaagctcttttatatgggaagataatgacggtaccataagaaaaagccccggctaactacgtgccagcagccgcggtaatacgtagggggctagcgttgtccggaatcactgggcgtaaagggttcgcaggcggcaatgcaagtcagatgtaaaaggcaaaggctcaacctttgtaagcatctgaaactgtatagcttgagaagtgtagaggcaagtggaatttttagtgtagcggtgaaatgcgtagatattaaaaagaataccggtggcgaaggcgacttgctgggcacaatctgacgctgaggaacgaaagcgtggggagcaaacaggattagataccctggtagtccacgccgtaaacgatgagtgctaggtgtcggtataaatcggtgccgcagttaacacaataagcactccgcctggggagtacgtgcgcaagcatgaaactcaaaggaattgacggggacccgcacaagcagcggagcatgtggtttaattcgaagcaacgcgaagaaccttaccagggcttgacatataagagacgaacttagagataagttttcttcttcagaagcccttatacaggtggtgcatggttgtcgtcagctcgtgtcgtgagatgttgggttaagtcccgcaacgagcgcaacccttattactagttaccagcatttcggatggggactctagaaagactgccgatgataaatcggaggaaggtggggatgacgtcaaatcatcatgccctatatgccctgggcaacacacgtgctacaatggccgtaacaaagagaagcgaaatcgcaaggtcaagcaaacctcaaaaagacggtctcagttcggattgttctctgcaactcgagaacatgaagtcggagttgctagtaatcgcagatcagaatgctgcggtgaatgcgttcccgggtcttgtacacaccgcccgtcacaccatgggagcttgtaatacccgaagcctgtgagctaaccgcaagggagcagcagtcgaaggtaggacaagtgactggggtgaagtcgtaacaaggtagccgtatcggaaggtgcggctggatcacctcctttct

SEQ ID NO: 1447 - DNA, 1386 bp, Peptoniphilus sp.
  JC140
attagcggcggacgggtgagtaacacgtgagtaacctgccttagacattgggatagcctcgggaaaccgggattaataccgaataacatcacatagacacatgtcattgtgatcaaaactccggtggtctaagatggactcgcgtcccattagctagttggtagggtaacggcctaccaaggcgacgatgggtagccggcctgagagggtgaacggccacattggaactgagaaacggtccaaattcctacgggaggcagcagtggggaatattgcacaatgggggaaaccctgatgcagcgacgccgcgtgaacgaagaaggctttcgagtcgtaaagttcttttatatgggaagataatgacggtaccataagaaaaagccccggctaactacgtgccagcagccgcggtaatacgtagggggctagcgttgtccggaatcactgggcgtaaagggttcgcaggcggaaatgcaagtcagatgtaaaaggcagtagcttaactactgtaagcatttgaaactgcatatcttgagaagagtagaggtaagtggaatttttagtgtagcggtgaaatgcgtagatattaaaaagaataccggtggcgaaggcgacttactgggctcatctgacgctgaggaacgaaagcgtgggtagcaaacaggattagataccctggtagtccacgctgtaaacgatgagtgctaggtgtcggcgtaagtcggtgccgcagttaacacaataagcactccgcctggggagtacgtgcgcaagcatgaaactcaaaggaattgacggggacccgcacaagcagcggagcatgtggtttaattcgaagcaacgcgaagaaccttaccaaggcttgacatactgaggaaagacttagagataagtccctctcttcggagacctcaatacaggtggtgcatggttgtcgtcagctcgtgtcgtgagatgttgggttaagtcccgcaacgagcgcaacccttatctttagttgccagcatttcggatgggaactctaaagagactgccgatgataaatcggaggaaggtggggatgacgtcaaatcatcatgccctatatgccttgggctacacacgtgctacaatggaaggtacaaagggaagcaaaatagtgatattaagcaaacctcaaaaagcctttctcagttcggattgtactctgcaactcgagtacatgaagatggagttgctagtaatcgcagatcagaatgctgcggtgaatgcgttcccgggtcttgtacacaccgcccgtcacaccatgggagcttgtaatacccgaagcctgcgagcgaaccgtaaggaagcagcagtcgaaggtaggataagtgactggggtgaagtcgtaacaaggtagccgta

SEQ ID NO: 1448 - DNA, 1414 bp, Peptoniphilus sp.
  gpac007
  modified_base (365)..(365): a, c, t, g, unknown or other
  modified_base (378)..(378): a, c, t, g, unknown or other
  modified_base (516)..(516): a, c, t, g, unknown or other
  modified_base (624)..(624): a, c, t, g, unknown or other
atgcaagtcgagcgatgaacattgaatgwtcccttcggggtgatttcgatcggattagcggcgaacgggtgagtaacgcgtgaggaacctgcctcttacaacgggatagcctcgggaaaccgggattaataccgtataagactccgacatctcctggtgatgaagtcaaagcgttagcggtaagagatggcctcgcgtctgattagttagttggcggggtaacggcccaccaagacgacgatcagtaaccggcctgagagggtgaacggtcacattggaactgagacacggtccaaactcctacgggaggcagcagtggggaatcttgcacaatgggggcaaccctgatgcagcgacgccgcktngagcgatgaaggntttcgaatcgtaaagctctgtcctatgggaagataatgacggtaccwtgggaggaagccccggctaactacktgccagcagccgcggtaatacgtagggggcgagcgttgtccggaattactgggcgtaaaggkttcncagscggccatggcaaagtccgatgtaaaaggcgaargctcaaccttcgtaagcatcggraactgtcaagcttgagtgaaggagaggcaagtggaattcctagtgtanccggtggaatgcgtagatattaggaggaataccggtggcgaaggcgacttgctggacttcaactgacgctgaggaacgaaagcgtgggtagcaaacaggattagataccctggtagtccacgccgtaaacgatgagtgctaggtgtcgggggtcaaacctcggtgccgccgttaacacaataagcactccgcctggggagtacgtgcgcaagcatgaaactcaaaggaattgacggggacccgcacaagcagcggagcatgtggtttaattcgaagcaacgcgaagaaccttaccaggacttgaaatactagcgcccgctttagagataaagttttttcttcggaaacgctaatacaggtggtgcatggttgtcgtcagctcgtgtcgtgagatgttgggttaagtcccgcaacgagcgcaacccttacttttagttgccagcacgtaatggtgggaactctaaagggactgccgatgataaatcggaggaaggtggggatgacgtcaaatcatcatgccctttatgtcctgggctacacacgtgctacaatggtcggtacagagggcagcgaaagagcgatctcaagcgaatctcaaaaagccgatcccagttcggattgcaggctgcaactcgcctgcatgaagtcggagttgctagtaatcgcgaatcagaatgtcgcggtgaatgcgttcccgggtcttgtacacaccgcccgtcacaccatgggagttggcaatacccgaagccagcgagcccaaccgcaacggagcagctgtcgaatgtagggt

SEQ ID NO: 1449 - DNA, 1453 bp, Peptoniphilus sp.
  gpac018A
gacgaacgctggcggcgcgcctaacacatgcaagtcgagcgatgaaagtcgttctgatccttcgggtgatgaacttctggattagcggcgaacgggtgagtaacgcgtgaggaacctgcctcttacaacgggatagcctcgggaaaccgggattaataccgtataagactccgacatctcatgatgatgaagtcaaagcgttagcggtaagagatggcctcgcgtctgattagctggttggcggggtaacggcccaccaaggcgacgatcagtaaccggcctgagagggtgaacggtcacattggaactgagacacggtccaaactcctacgggaggcagcagtggggaatcttgcacaatgggggcaaccctgatgcagcgacgccgcgtgagcgattgaaggttttcgaatcgtaaagctctgtcctatgggaagataatgacggtaccataggaggaagccccggctaactacgtgccagcagccgcggtaatacgtagggggcgagcgttgtccggaattactgggcgtaaagggttcgcaggcggcatggcaagtccgatgtaaaaggcgaaggctcaaccttcgtaagcatcggaaactgtcaagcttgagtgaaggagaggcaagtggaattcctagtgtagcggtggaatgcgtagatattaggaggaataccggtggcgaaggcgacttgctggacttcaactgacsgtgagaaacgaaagcgtgggtagcaaacaggattagataccctggtagtccacgccgtaaacgatgagtgctaggtgtcggggtcaaacctcggtgccgccgttaacacaataagcactccgcctggggagtacgtgcgcaagcatgaaactcaaaggaattggacgggggacccgcacaaagcagcggagcatgtggtttaattcgaagcaacgcgaagaaccttaccaggacttgaaatactagcgcccgctttagagataaagttttttcttcggaaacgctaatacaggtggtgcatggttgtcgtcagctcgtgtcgtgagatgttgggttaagtcccgcaacgagcgcaacccttacttttagttgccagcacgtaatggtgggaactctaaagggactgccgatgataaatcggaggaaggtggggatgacgtcaaatcatcatgccctttatgtcctgggctacacacgtgctacaatggtcggtacagagggcagcgaacgagcgatcgcaagcgaatctcaaaaagccgatcccagttcggattgcaggctgcaactcgcctgcatgaagtcggagttgctagtaatcgcagatcagaatgctgcggtgaatgcgttcccgggtcttgtacacaccgcccgtcacaccatgggagttggcaatacccgaagccagcgagccaaccgyaaggaggcagctgtcgaaggtagggttaatgactggggtg

SEQ ID NO: 1450 - DNA, 1459 bp, Peptoniphilus sp.
  gpac077
  modified_base (473)..(473): a, c, t, g, unknown or other
  modified_base (553)..(553): a, c, t, g, unknown or other
gacgaacgctggcggcgcgcttaacacatgcaagtcgagcgatgaaatcttaacagaacccttcggggcgaagataagacggattagcggcggacgggtgagtaacacgtgagtaacctgccttttacacagggatagcctcgggaaaccgggattaaaacctgatgaaactatcaaatcacatgattaagaaagttaaaactccggtggtaaaagatggactcgcgtcccattagctagttggttgaaggtaacggccaccaaggcaacgatgggtagccggcctgagagggtgaacggccacattggaactgagaaacggtccaaactcctacgggaggcagcagtggggaatattgcacaatgggggaaaccctgatgcagcgacgccgcgtgagcgaagaaggccttcgggtcgtaaagctctttatatatgggaagataatgacggtaccataagaaaaagccccggntaactacgtagccagcagccgcggtaatacgtagggggctagacgttgtccggaatcactgggacgtaaagggttcgcangcggcaatgcaagtcagatgtaaaaaggcaaaggctcaaacatttgtaagcatctgaaactgtatagcttgaactttaaggcgccaagggaattttctagtcaccggtaaaacgccgtagatataaagagaaatcccgtggccgaaggcgacctctggggcaacaaatctggaccctgaggaacgaaagcttggggaccaaacaggataagatacccctggtagtccacgccgtaaacgatgagtgctaggtgtcggtataaatcggtcccgcagttaacacaataagcactccgccctggggagtacgtgcgcaagcatgaaactcaaaggaattgacggggacccgcacaagcagcggagcatgtggtttaattcgaagcaacgcgaagaaccttaccagggcttgacatataagagacgaacttagagataagttttcttcttcggaagcccttatacaggtggtgcatggttgtcgtcagctcgtgtcgtgagatgttgggttaagtcccgcaacgagcgcaacccttattactagttaccagcatttcggatggggactctagaaagactgccgatgataaatcggaggaaggtggggatgacgtcaaatcatcatgccctatatgccctgggcaacacacgtgctacaatggccgtaaccaaagagaagcgaaatcgccaaggtcaagcaaacctcaaaaagacggtctcagttcggattgttctctgcaactcgagaacatgaagtcggagttgctagtaatcgcagatcagaatgctgcggtgaatgcgttcccgggtcttgtacacaccgcccgtcacaccatgggagcttgtaatacccgaagcctgtgagctaaccgcaaggaagcagcagtcgaagtagacaagtgactgggtg

SEQ ID NO: 1451 - DNA, 1445 bp, Peptoniphilus sp.
  gpac148
  modified_base (1437)..(1437): a, c, t, g, unknown or other
gacgaacgctggcggcgcgcctaacacatgcaagtcgagcgatgaaattttaacggatcttttcggagagaagataaaatggattagcggcggacgggtgagtaacacgtgaggaacctgcctttcacaaggggatagcctcgggaaaccgggattaataccctatgatacaatcaagtctcctgatttaattgttaaagtgatagcggtgaaagatggcctcgcgtctgattagctagttggtgagataaaagcccaccaaggcgatgatcagtaaccggcctgagagggtgaacggtcacattggaactgagacacggtccaaactcctacgggaggcagcagtggggaatattgcacaatggagggaactctgatgcagcgacgccgcgtgagcgatgaaggctttcgagtcgtaaagctctgtcctatgggaagataatgacggtaccataggaggaagccccggctaactacgtgccagcagccgcggtaatacgtagggggcgagcgttgtccggaatcactgggcgtaaagggttcgcaggcggtttaccaagtccgatgtgaaaggcatgggcttaacccatgtaagcattagaaactggtaaacttgagttaaggagaggtaagtggaattcctagtgtagcggtgaaatgcgtagatattaggaagaataccggtggcgaaggcgacttactggacttaaactgacgctgaggaacgaaagcgtggggagcaaacaggattagataccctggtagtccacgctgtaaacgatgagtgctaggtgtcgggggaactcggtgccgcagttaacacattaagcactccgcctggggagtacgtgcgcaagcatgaaactcaaaggaattgacggggacccgcacaagcagcggagcatgtggtttaattcgaagcaacgcgaagaaccttaccaaggctagacattttactgcccggtctagagataggccctttcttcggaacagtaaaacaggtggtgcatggttgtcgtcagctcgtgtcgtgagatgttgggttaagtcccgcaacgagcgcaaccctcacctttagttgccagcatgtaacgatgggaactctaaagggactgccgatgataaatcggaggaaggtggggatgacgtcaaatcatcatgccctttatgccttgggctacacacgtgctacaatggtcggtacacagagcagcttaggagcgatctgaagcgaatctcaaaaagccgatctcagttcggattgcaggctgcaactcgcctgcatgaagtcggagttgctagtaatcgcgaatcagaatgtcgcggtgaatgcgttcccgggtcttgtacacaccgcccgtcacaccatgggagttggtaatacccgaagccgccgagctaaccgtttggasgcaggcgtcgaaggtaggatcaatnactgggtg

SEQ ID NO: 1452 - DNA, 1533 bp, Peptoniphilus sp.
  oral taxon 386
tttcaattgagagtttgatcctggctcaggacgaacgctggcggcgcgcctaacacatgcaagtcgagcgatgaaaaggatttggagttcttcgggacaaagaaaccttggattagcggcggacgggtgagtaacacgtgagtaacctgcctttgacatggggatagcctcgggaaaccgtgattaatacccaataacatttccaagtcgcatgacatgggaatcaaagcgtttagcggtcaaagatggactcgcgtctgattaattagttggtgaggtaacggctcaccaagatagcgatcagtagccggcctgagagggtgaacggccacattggaactgagagacggtccaaactcctacgggaggcagcagtggggaatattgcacaatggggggaaccctgatgcagcgacgccgcgtgagcgaagaaggttttcgaatcgtaaagctctgtcctatgggaagataatgacggtaccataggaggaagccccggctaactacgtgccagcagccgcggtaatacgtagggggctagcgttgtccggaatcactgggcgtaaagggttcgcaggcggaaaagcaagtcaggtgtgaaaggcgagggcttaaccctcgtaagcatttgaaactgtttttcttgagatgtggagaggtaagtggaattcctagtgtagcggtgaaatgcgtagatattaggaggaataccggtggcgaaggcgacttactggacacaaactgacgctgaggaacgaaagcgtggggagcaaacaggattagataccctggtagtccacgctgtaaacgatgagtgctaggtgtcgggagtaatctcggtgccgcagtaaacacaataagcactccgcctggggagtacgtacgcaagtatgaaactcaaaggaattgacggggacccgcacaagcagcggagcatgtggtttaattcgaagcaacgcgaagaaccttaccagggcttgacatatagcggacatatttagagataaatacttttcttcggaaaccgctatacaggtggtgcatggttgtcgtcagctcgtgtcgtgagatgttgggttaagtcccgcaacgagcgcaacccttacctttagttgccagcatgtaaagatgggaactctaaagggactgccgatgataaatcggaggaaggtggggatgacgtcaaatcatcatgccctatatgccctgggctacacacgtgctacaatggtcggaacaaagggtagcaaacttgtgaaagtaagcaaatctcaaaaagccgatctcagttcggattgttctctgcaactcgagaacatgaagtcggagttgctagtaatcgcagatcagaatgctgcggtgaatgcgttcccgggtcttgtacacaccgcccgtcacaccatgggagttggcaatacccgaagcctgtgagctaaccttaggggagcagcagtcgaaggtagggttaatgactggggtgaagtcgtaacaaggtagccgtatcggaaggtgcggctggatcacctcctttct

SEQ ID NO: 1453 - DNA, 1531 bp, Peptoniphilus sp.
  oral taxon 836
ttttaattgagagtttgatcctggctcaggacgaacgctggcggcgcgcttaacacatgcaagtcgagcgatgaaatcttaacagaacccttcggggcgaagataagacggattagcggcggacgggtgagtaacacgtgagtaacctgccttttacacagggatagcctcgggaaaccgggattaaaacctgatgaaactatcaaatcacatgattaagaaagttaaaactccggtggtaaaagatggactcgcgtcccattagctagttggtgaaggtaacggcccaccaaggcaacgatgggtagccggcctgagagggtgaacggccacattggaactgagaaacggtccaaactcctacgggaggcagcagtggggaatattgcacaatgggggaaaccctgatgcagcgacgccgcgtgagcgaagaaggccttcgggtcgtaaagctcttttatatgggaagataatgacggtaccataagaaaaagccccggctaactacgtgccagcagccgcggtaatacgtagggggctagcgttgtccggaatcactgggcgtaaagggttcgcaggcggcaatgcaagtcagatgtaaaaggcaaaggctcaacctttgtaagcatctgaaactgtatagcttgagaagtgtagaggcaagtggaatttttagtgtagcggtgaaatgcgtagatattaaaaagaataccggtggcgaaggcgacttgctgggcacaatctgacgctgaggaacgaaagcgtggggagcaaacaggattagataccctggtagtccacgccgtaaacgatgagtgctaggtgtcggtataaatcggtgccgcagttaacacaataagcactccgcctggggagtacgtgcgcaagcatgaaactcaaaggaattgacggggacccgcacaagcagcggagcatgtggtttaattcgaagcaacgcgaagaaccttaccagggcttgacatataagagacgaacttagagataagttttcttcttcggaagcccttatacaggtggtgcatggttgtcgtcagctcgtgtcgtgagatgttgggttaagtcccgcaacgagcgcaacccttattactagttaccagcatttcggatggggactctagaaagactgccgatgataaatcggaggaaggtggggatgacgtcaaatcatcatgccctatatgccctgggcaacacacgtgctacaatggccgtaacaaagagaagcgaaatcgcaaggtcaagcaaacctcaaaaagacggtctcagttcggattgttctctgcaactcgagaacatgaagtcggagttgctagtaatcgcagatcagaatgctgcggtgaatgcgttcccgggtcttgtacacaccgcccgtcacaccatgggagcttgtaatacccgaagcctgtgagctaaccgcaaggaagcagcagtcgaaggtaggacaagtgactggggtgaagtcgtaacaaggtagccgtatcggaaggtgcggctggatcacctcctttct

SEQ ID NO: 1454 - DNA, 1476 bp, Peptostreptococcaceae bacterium ph1
tgatcctggctcaggacgaacgctggcggcgtgcctaacacatgcaagtcgagcgatgaaaccttaacagactccttcgggatgaagattaggtggattagcggcggacgggtgagtaacacgtgagtaacctgcctttgacacagggatagccatgggaaaccgtgattaataccagatgaaatctaaactacacatgtagcaaagatcaaagcgaccaagcggtcaaagatggactcgcgcctgattagctagttggtgagataaaagctcaccaaggcaacgatcagtagccggcctgagagggtgaccggccacattggaactgagacacggtccaaactcctacgggaggcagcagtggggaatattgcacaatggggggaaccctgatgcagcgacgccgcgtgagcgaagaagggattcgtttcgtaaagctctgtcctatgggaagataatgacggtaccatagaagaaagccccggctaactacgtgccagcagccgcggtaatacgtagggggcgagcgttgtccggaatcactgggcgtaaagggttcgcaggcggataaacaagtcaagagtaaaaggcatgggcttaacccatgtaagctattgaaactgtctatcttgagatgtggagaggtaagtggaattactagtgtagcggtgaaatgcgtagatattagtaggaataccagtagcgaaggcgacttactggacacaaactgacgctgaggaacgaaagcgtgggtagcaaacaggattagataccctggtagtccacgctgtaaacgatgagtgctaggtgtcggcaaaagtcggtgccgcagtaaacgcaataagcactccgcctggggagtacgtgcgcaagcatgaaactcaaaggaattgacggggacccgcacaagcagcggagcatgtggtttaattcgaagcaacgcgaagaaccttaccagggcttgacatataggtgaaaagcttagagataagtaatacccttcggggacagctatacaggtggtgcatggttgtcgtcagctcgtgtcgtgagatgttgggttaagtcccgcaacgagcgcaacccttacctttagttaccagcaagtaaagttggggactctagagggactgccgatgataaatcggaggaaggtggggatgacgtcaaatcatcatgccctatatgccctgggcaacacacgtgctacaatggtcggaacaaagggaagcgaagtcgtgaggcgaagcaaaacccataaaaccgatctcagttcggattgttctctgcaactcgagaacatgaagtcggagttgctagtaatcgcagatcagaatgctgcggtgaatgcgttcccgggtcttgtacacaccgcccgtcacaccatgggagttatcaatacccgaagcctgtgagctaacaataagaagcagcagtcgaaggtagggagaatgactggggtgaagtcgtaacaag

SEQ ID NO: 1455 - DNA, 1473 bp, Peptostreptococcus anaerobius
  modified_base (64)..(64): a, c, t, g, unknown or other
gatgaacgctggcggcgtgcctaacacatgcaagtcgagcgcgtctgatttgatgcttgcattnatgaaagatgagcggcggacgggtgagtaacgcgtgggtaacctgccctatacacatggataacatactgaaaagtttactaatacatgataatatatatttacggcatcgtagatatatcaaagtgttagcggtataggatggacccgcgtctgattagctagttggtgagataactgcccaccaaggcgacgatcagtagccgacctgagagggtgatcggccacattggaactgagacacggtccaaactcctacgggaggcagcagtggggaatattgcacaatgggcgcaagcctgatgcagcaacgccgcgtgaacgatgaaggtcttcggatcgtaaagttctgttgcaggggaagataatgacggtaccctgtgaggaagccccggctaactacgtgccagcagccgcggtaatacgtagggggctagcgttatccggatttactgggcgtaaagggtgcgtaggtggtctttcaagtcggtggttaaaggctacggctcaaccgtagttagcctccgaaactggaagacttgagtgcaggagaggaaagtggaattcccagtgtagcggtgaaatgcgtagatattgggaggaacaccagtagcgaaggcggctttctggactgcaactgacactgaggcacgaaagcgtgggtagcaaacaggattagataccctggtagtccacgctgtaaacgatgagtactaggtgtcgggggttacccccctcggtgccgcagctaacgcattaagtactccgcctggggagtacgcacgcaagtgtgaaactcaaaggaattgacggggacccgcacaagtagcggagcatgtggtttaattcgaagcaacgcgaagaaccttacctaagcttgacatcccttagaccggtgtttaatcacaccttcccttcggggctgaggtgacaggtggtgcatggttgtcgtcagctcgtgtcgtgagatgttgggttaagtcccgcaacgagcgcaacccttgtctttagttgccagcattcagttgggcactctagagagactgccagggataacctggaggaaggtggggatgacgtcaaatcatcatgccccttatgcttagggctacacacgtgctacaatgggtggtacagagggttgccaaaccgtgaggtggagctaatcccttaaagccattctcagttcggattgtaggctgaaactcgcctacatgaagctggagttactagtaatcgcagatcagaatgctgcggtgaatgcgttcccgggtcttgtacacaccgcccgtcacaccatgggagtcggaaacacccgaagccgattatccaaccgcaaggaggaagtcgtcgaaggtggcgtcgataactggggtgaagtcgtaacaaggtagccgtatcggaaggtgc

SEQ ID NO: 1456 - DNA, 1427 bp, Peptostreptococcus micros
gacgaacgctggcggcgtgcttaacacatgcaagtcgaacgtgatttttgtggaaagcccttcggggacggaagcgaaatgaaagtggcgaacgggtgagtaacacgtgagcaacctaccttacacagggggatagccgttggaaacgacgattaataccgcatgagaccacaaagccacatggcttaggggtaaaagatttatcggtgtaagatgggctcgcgtctgattagctagttggaagggtaaaggcctaccaaggcaacgatcagtagccggtctgagaggatgaacggccacattggaactgagacacggtccaaactcctacgggaggcagcagtggggaatattgcacaatggggggaaccctgatgcagcgacgccgcgtgagcgaagaaggttttcgaatcgtaaagctctgtcctatgagaagataatgacggtatcataggaggaagccccggctaaatacgtgccagcagccgcggtaatacgtatggggcgagcgttgtccggaattattgggcgtaaagggtacgtaggcggcctattaagtcaggtgtgaaagcgtgaggcttaacctcattaagcacttgaaactggaaggcttgagtgaaggagaggaaagtggaattcctagtgtagcggtgaaatgcgtagatattaggaggaataccggtggcgaaggcgactttctggacttttactgacgctcaggtacgaaagcgtggggagcaacaggattacgataccctggtagtccacgccgtaaacgatgaatgctaggtgttgggagtcaaatctcggtgccgaagttaacacattaagcattccgcctggggagtacggtggcaacactgaaactcaaaggaattgacggggacccgcacaagcagcggagcatgtggtttaattcgaagcaacgcgaagaaccttaccaaggcttgacatatagttgagttattgagaaattgataagtccctcgggacaactatacaggtggtgcatggttgtcgtcagctcgtgtcgtgagatgttgggttaagtcccgcaacgagcgcaacccttatcttcagttaccagcatgtaatgatggggactctggagagactgccgatgacaaatcggaggaaggtggggatgacgtcaaatcatcatgccctttatgtcttgggctacacacgtgctacaatggttggtacaacgagaagctagacagtgatgttaagcaaaactctaaaaaccaatctcagttcggattgtaggctgcaactcgcctacatgaagtcggagttgctagtaatcgcgaatcagaatgtcgcggtgaatgcgttcccgggtcttgtacacaccgcccgtcacaccatgggagttggcaatacccgaagccgccgatctaaccgcaaggaggaaggcgtcgaag

SEQ ID NO: 1457 - DNA, 1353 bp, Peptostreptococcus sp.
  9succ1
  modified_base (91)..(91): a, c, t, g, unknown or other
aaatggattagcggcggacgggtgagtaacacgtgagtaacctgcctttgacatggggatagcctcgggaaaccgggattaatacccaatnaaactgtaagatcgcatgatcaatcagtcaaaatgtctagtggtcaaagatggactcgcgtcccattagctagttggtgagataaaagctcaccaaggcgacgatgggtagccggcctgagagggtgaacggccacattggaactgagacacggtccaaactcctacgggaggcagcagtggggaatattgcacaatgggggaaaccctgatgcagcgacgccgcgtgagcgaagaaggctttcgagtcgtaaagctctgtcctatgggaagatagtgacggtaccataggaggaagccccggctaactacgtgccagcagccgcggtaatacgtagggggctagcgttgtccggaattactgggcgtaaagggttcgcaggcggcaatgcaagtcaggtgtgaaagacggaggctcaacctccgcaagcatttgaaactgcatagcttgagatgtggagaggtaagtggaattcctagtgtagcggtgaaatgcgtagatattaggaggaataccggtggcgaaggcgacttactggacacaaactgacgctgaggaacgaaagcgtggggagcaaacaggattagataccctggtagtccacgctgtaaacgatgagtgctaggtgtcggagcaattcggtgccgtagttaacacaataagcactccgcctggggagtacgtacgcaagtatgaaactcaaaggaattgacggggacccgcacaagcagcggagcatgtggtttaattcgaagcaacgcgaagaaccttaccaggtcttgacatatagtgggatattctagagatagaatagactcttcggagactgctaaacaggtggtgcatggttgtcgtcagctcgtgtcgtgagatgttgggttaagtcccgcaacgagcgcaacccttacctttagttgccagcatgtaaagatggggactctagagggactgccgatgataaatcggaggaaggtggggatgacgtcaaatcatcatgccctatatgacctgggctacacacgtgctacaatggtcggtataaagagaagcaagatagtgatattaagcaaacctcaaaaagccgatctcagttcggattgtaggctgcaactcgcctacatgaagtcggagttgctagtaatcgcagatcagaatgctgcggtgaatgcgttcccgggtcttgtacacaccgcccgtcacaccatgggagttggcaatacccgaagccggtgacctaaccgcaaggaaggagccgtcgaagg

SEQ ID NO: 1458 - DNA, 1327 bp, Peptostreptococcus sp.
  P4P_31 P3
gacgaacgctggcggcgtgcttaacacatgcaagtcgaacgagtggcgaacgggtgagtaacacgtgagcaacctaccttacacagggggatagccgttggaaacgacgattaataccgcatgagcaaagtcggtgtaagatgggctcgcgtctgattagctagttggaagggtaaaggcctaccaaggcaacgatcagtagccggtctgagaggatgaacggccacattggaactgagacacggtccaaactcctacgggaggcagcagtggggaatattgcacaatggggggaaccctgatgcagcgacgccgcgtgagcgaagaaggttttcgaatcgtaaagctctgtcctatgagaagatgacggtatcataggaggaagccccggctaaatacgtgccagcagccgcggtaatacgtatggggcgagcgttgtccggaattattgggcgtaaagggtacgtaggcggccttttaagtcaggtgtgaaagcgtgaggcttaacctcattaagcacttgaaactggaaggcttgagtgaaggagaggaaagtggaattcctagtgtagcggtgaaatgcgtagatattaggaggaataccggtggcgaaggcgactttctggacttactgacgctcaggtacgaaagcgtggggagcaaacaggattagataccctggtagtccacgccgtaaacgatgaatgctaggtgttgggatctcggtgccgaagttaacacattaagcattccgcctggggagtacggtggcaacactgaaactcaaaggaattgacggggacccgcacaagcagcggagcatgtggtttaattcgaagcaacgcgaagaaccttaccaaggcttgacatatacaggtggtgcatggttgtcgtcagctcgtgtcgtgagatgttgggttaagtcccgcaacgagcgcaacccttatcttcagttaccagcatatggggactctggagagactgccgatgataaatcggaggaaggtggggatgacgtcaaatcatcatgccctttatgtcttgggctacacacgtgctacaatggttggcaacgagaagcaagatagtgatgtcaagcaaaactctaccaatctcagttcggatgtaggctgcaactcgcctacagaagtcggagttgctagtaatcgcaaatcagaatgttgcggtgaatgcgttcccgggtcttgtacacaccgcccgtcacaccatgggagttggcaatacccgaagccgccatctaggaaggcgtcgaaggtagggttaatgactggggtgaagtcgtaacaaggtagccgtatcggaaggt

SEQ ID NO: 1459 - DNA, 1333 bp, Peptostreptococcus sp.
  oral clone AP24
gagtttgatcctggctcaggatgaacgttggcgacgtgcctaacacatgcaagtcgagcgagcggcggacgggtgagtaatacatgagcaacctgccttggacagagggatagccgtgggaaaccgcgattaatacctcataagcaaagtcggtccaagatggactcatgacccattagctagttggtgagataacagcccaccaaggcgacgatgggtagccggcttgagagagtgaccggccacattggaactgagacacggtccagactcctacgggaggcagcagtggggaatattgcacaatggaggaaactctgatgcagcgacgtcgcgtgagcgaagaaggttttcgaatcgtaaagctctgtcctatgggaagaagacggtaccatagaagaaagccccggctaactacgtgccagcagccgcggtaatacgtagggggcgaacgttatccggaatgattgggcgtaaagggtacgtaggcggacctgtaagtcaggtgtgaaaggcatgggctcaacccatgtaagcacttgaaactgcgggccttgagggaaggagaggtaagtggaattcctagtgtagcggtgaaatgcgtagatattaggaggaataccggtggcgaaggcgacttactggacttactgacgctgaggtacgaaagcgtggggagcaaacaggattagataccctggtagtccacgccgtaaatggtgagtgctaggtgtcgggatctcggtgccgacgttaacacattaagcactccgcctggggagtacgcacgcaagtgtgaaactcaaaggaattgacggggacccgcacaagcagcggagcatgtggtttaattcgatgcaacgcgaaaaaccttaccaggacttgacatatacaggtggtgcatggttgtcgtcagctcgtgtcgtgagatgttgggttaagtcccgcaacgagcgcaacccctattcttagttactaacagctgaggactctaaggagactgccggtgacaaaccggaggaagatggggatgacgtcaaatcatcatgccctttatgtcctgggctacacacgtgctacaatggtcggcagaaggaagcgagatagcgatatcgagcgaacccccccgatcccagttcggatgttctctgcaactcgagaacagaagccggagttgctagtaattgcgaatcagcatgtcgcagtgaatgcgttcccgggtcttgtacacaccgcccgtcacaccatgggagttggtaatacccgaagcctgtagccaagcagcagtcgaaggtaggatcaatgactggggtgaagtcgtaacaaggtaacc

SEQ ID NO: 1460 - DNA, 1334 bp, Peptostreptococcus sp.
  oral clone FJ023
cggcgcgtcttaagcatgcaagtcgaacgagtggcgaacgggtgagtaacacgtgagcaacctaccttacacagggggatagccgttgaaaacgacgattaataccgcatgagaaaagtcggtgtaagatgggctcgcgtctgattagctagttggaagggtaaaggcctaccaaggcaacgatcagtagccggtctgagaggatgaacggccacattggaactgagacacggtccaaactcctaagggaggcagcagtggggaatattgcacaatggggggaaccctgatgcagcgacgccgcgtgagcgaagaaggttttcgaatcgtaaagctctgtcctatgagaagatgacggtatcataggaggaagccccggctaaatacgtgccagcagccgcggtaatacgtatggggcgagcgttgtccggaattattgggcgtaaagggtacgtaggcggcctattaagtcaggtgtgaaagcgtgaggcttaacctcattaagcacttgaaactggaaggcttgagtgaaggagaggaaagtggaattcctagtgtagcggtgaaatgcgtagatattaggaggaataccggtggcgaaggcgactttctggacttactgacgctcaggtacgaaagcgtggggagcaaacaggattagataccctggtagtccacgccgtaaacgatgagtgctaggtgttgggatctcggcgccgaagttaacacattaagcattccgcctggggagtacggtggcaacactgaaactcaaaggaattgacggggacccgcacaagcagcagagcatgtggtttaattcgaagcaacgcgaagaaccttaccaaggcttgacatatacaggtggtgcatggttgtcgtcagctcgtgtcgtgagatgttgggttaagtcccgcaacgagcgcaacccttatcttcagttaccagcacgtggggactctggagagactgccgatgacaaatcggaagaaggtggggatgacatcaaatcatcatgccctttatgtcttgggctacacacgtgctacaatggttggcaacgagagactagacagtgatgttaagcaaaactctaccaatctcagttcggatgtaggctgcaactcgcctacagaagtcggagttgctagtaatcgcgaatcagaatgtcgcggtgaacgcgttcccgggtcttgtacacaccgcccgtcacaccatgggagttggcaatacccgaagccgccatctaggaaggcgtcgaaggtagggttaatgactggggtgaagtcgtaacaaggtagccgtatcggaaggtgcggttggatcacctcctt

SEQ ID NO: 1461 - DNA, 1432 bp, Peptostreptococcus stomatis
ctgagcaaaaccaagcggcggacgggtgagtaacgcgtgggtaacctgccctatacacatggataacatactgaaaagtttactaatacatgataatatatatttgcggcatcgcagatatatcaaagtgttagcggtataggatggacccgcgtctgattagctagttggtgagataactgcccaccaaggcgacgatcagtagccgacctgagagggtgatcggccacattggaactgagacacggtccaaactcctacgggaggcagcagtggggaatattgcacaatgggcgaaagcctgatgcagcaacgccgcgtgaacgatgaaggtcttcggatcgtaaagttctgttgcaggggaagataatgacggtaccctgtgaggaagccccggctaactacgtgccagcagccgcggtaatacgtagggggctagcgttatccggatttactgggcgtaaagggtgcgtaggtggtccttcaagtcggtggttaaaggctacggctcaaccgtagtaagccgccgaaactggaggacttgagtgcaggagaggaaagtggaattcccagtgtagcggtgaaatgcgtagatattgggaggaacaccagtagcgaaggcggctttctggactgcaactgacactgaggcacgaaagcgtgggtagcaaacaggattagataccctggtagtccacgctgtaaacgatgagtactaggtgtcgggggttacccccctcggtgccgcagctaacgcattaagtactccgcctggggagtacgcacgcaagtgtgaaactcaaaggaattgacggggacccgcacaagtagcggagcatgtggtttaattcgaagcaacgcgaagaaccttacctaagcttgacatccctcggacaggtgtttaatcacacccttccttcgggactgaggtgacaggtggtgcatggttgtcgtcagctcgtgtcgtgagatgttgggttaagtcccgcaacgagcgcaacccttgtctttagttgccagcattcagttgggcactctagagagactgccagggataacctggaggaaggtggggatgacgtcaaatcatcatgccccttatgcttagggctacacacgtgctacaatgggtggtacagagggttgccaaaccgtgaggtggagccaatcccttaaagccattctcagttcggattgtaggctgaaactcgcctacatgaagctggagttactagtaatcgcagatcagaatgctgcggtgaatgcgttcccgggtcttgtacacaccgcccgtcacaccacgggagtcggaaacacccgaagccgattatccaaccgcaaggaggaagtcgtcgaaggtggcgtcgataactggggtgaagtcgtaacaaggtagccgtatcggaaggtgcggctggatcacctcctttct

SEQ ID NO: 1462 - DNA, 1511 bp, Phascolarctobacterium faecium
  modified_base (50)..(50): a, c, t, g, unknown or other
  modified_base (1382)..(1382): a, c, t, g, unknown or other
  modified_base (1477)..(1477): a, c, t, g, unknown or other
atcctggctcaggacgaacgctggcggcgtgcctaacacatgcaagtcgnacggagaattttatttcggtagaattcttagtggcgaacgggtgagtaacgcgtaggcaacctaccctttagacggggacaacattccgaaaggagtgctaataccggatgtgatcatcgtgccgcatggcaggatgaagaaagatggcctctacaagtaagctatcgctaaaggatgggcctgcgtctgattagctagttggtagtgtaacggactaccaaggcgatgatcagtagccggtctgagaggatgaacggccacattgggactgagacacggcccaaactcctacgggaggcagcagtggggaatcttccgcaatggacgaaagtctgacggagcaacgccgcgtgagtgatgaaggatttcggtctgtaaagctctgttgtttatgacgaacgtgcagtgtgtgaacaatgcattgcaatgacggtagtaaacgaggaagccacggctaactacgtgccagcagccgcggtaatacgtaggtggcgagcgttgtccggaattattgggcgtaaagagcatgtaggcggcttaataagtcgagcgtgaaaatgcggggctcaaccccgtatggcgctggaaactgttaggcttgagtgcaggagaggaaaggggaattcccagtgtagcggtgaaatgcgtagatattgggaggaacaccagtggcgaaggcgcctttctggactgtgtctgacgctgagatgcgaaagccagggtagcgaacgggattagataccccggtagtcctggccgtaaacgatgggtactaggtgtaggaggtatcgaccccttctgtgccggagttaacgcaataagtaccccgcctggggagtacggccgcaaggttgaaactcaaaggaattgacgggggcccgcacaagcggtggagtatgtggtttaattcgacgcaacgcgaagaaccttaccaaggcttgacattgattgaacgctctagagatagagatttcccttcggggacaagaaaacaggtggtgcatggctgtcgtcagctcgtgtcgtgagatgttgggttaagtcccgcaacgagcgcaacccctatcctatgttaccagcaagtaaagttggggactcatgggagactgccagggacaacctggaggaaggcggggatgacgtcaagtcatcatgccccttatgtcttgggctacacacgtactacaatggtcggaaacagagggaagcgaagccgcgaggcagagcaaaccccagaaacccgatctcagttcggatcgcaggctgcaacccgcctgcgtgaagtcggaatcgctagtaatcgcaggtcagcatactgcggtgaatacgtncccgggccttgtacacaccgcccgtcacaccacgaaagttggtaacacccgaagccggtgaggtaacctattaggagccagccgtctaaggtggngccgatgattggggtgaagtcgtaacaaggtagc

SEQ ID NO: 1463 - DNA, 1449 bp, Phascolarctobacterium sp.
  YIT 12068
ttcttagtggcgaacgggtgagtaacgcgtgggcaacctgccctctagatggggacaacatcccgaaaggggtgctaataccgaatgtgacagcaatctcgcatgaggatgctgtgaaagatggcctctatttataagctatcgctagaggatgggcctgcgtctgattagctagttggtggggtaacggcctaccaaggcgatgatcagtagccggtctgagaggatgaacggccacattgggactgagacacggcccagactcctacgggaggcagcagtggggaatcttccgcaatgggcgaaagcctgacggagcaatgccgcgtgagtgatgaaggaattcgttccgtaaagctcttttgtttatgacgaatgtgcagattgtgaataatgatctgtaatgacggtagtaaacgaataagccacggctaactacgtgccagcagccgcggtaatacgtaggtggcgagcgttgtccggaattattgggcgtaaagagcatgtaggcggttttttaagtctggagtgaaaatgcggggctcaaccccgtatggctctggatactggaagacttgagtgcaggagaggaaaggggaattcccagtgtagcggtgaaatgcgtagatattgggaggaacaccagtggcgaaggcgcctttctggactgtgtctgacgctgagatgcgaaagccagggtagcgaacgggattagataccccggtagtcctggccgtaaacgatgggtactaggtgtaggaggtatcgaccccttctgtgccggagttaacgcaataagtaccccgcctggggagtacgtccgcaaggatgaaactcaaaggaattgacgggggcccgcacaagcggtggagtatgtggtttaattcgacgcaacgcgaagaaccttaccaaggcttgacattgaatgaccgctccagagatggagctttcccttcggggacatgaaaacaggtggtgcatggctgtcgtcagctcgtgtcgtgagatgttgggttaagtcccgcaacgagcgcaacccctatcctatgttaccagcgggtaatgccggggactcataggagactgccaaggacaacttggaggaaggcggggatgacgtcaagtcatcatgccccttatgtcttgggctacacacgtactacaatggtcggcaacagagggaagcaaagccgtgaggcagagcaaaccccagaaacccgatcccagttcggattgcaggctgcaactcgcctgcatgaagtcggaatcgctagtaatcgcaggtcagcatactgcggtgaatacgttcccgggccttgtacacaccgcccgtcacaccacgaaagttggtaacacccgaagccggtggggtaaccgtaaggagccagccgtctaaggtggggccgatgattggggtgaagtcgtaacaaggtagccgtatcggaaggt

SEQ ID NO: 1464 - DNA, 1610 bp, Phascolarctobacterium succinatutens
gacgaacgctggcggcatgcctaacacatgcaagtcgaacggagaaagttcaacaccaagtatttcatccgctgaagtgtagcggtaaaaattgcgaagcaatttttactacgcattaaaagcatgaactaacacggtggttgaagtattaggtgttgaactttcttagtggcgaacgggtgagtaacgcgtgggcaacctgccctctagatggggacaacatcccgaaaggggtgctaataccgaatgtgacagcaatctcgcatgaggatgctgtgaaagatggcctctatttataagctatcgctagaggatgggcctgcgtctgattagctagttggtggggtaacggcctaccaaggcgatgatcagtagccggtctgagaggatgaacggccacattgggactgagacacggcccagactcctacgggaggcagcagtggggaatcttccgcaatgggcgaaagcctgacggagcaatgccgcgtgagtgatgaaggaattcgttccgtaaagctcttttgtttatgacgaatgtgcagattgtaaataatgatctgtaatgacggtagtaaacgaataagccacggctaactacgtgccagcagccgcggtaatacgtaggtggcgagcgttgtccggaattattgggcgtaaagagcatgtaggcggttttttaagtctggagtgaaaatgcggggctcaaccccgtatggctctggatactggaagacttgagtgcaggagaggaaaggggaattcccagtgtagcggtgaaatgcgtagatattgggaggaacaccagtggcgaaggcgcctttctggactgtgtctgacgctgagatgcgaaagccagggtagcgaacgggattagataccccggtagtcctggccgtaaacgatgggtactaggtgtaggaggtatcgaccccttctgtgccggagttaacgcaataagtaccccgcctggggagtacgtccgcaaggatgaaactcaaaggaattgacgggggcccgcacaagcggtggagtatgtggtttaattcgacgcaacgcgaagaaccttaccaaggcttgacattgaatgaccgctccagagatggagctttcccttcggggacatgaaaacaggtggtgcatggctgtcgtcagctcgtgtcgtgagatgttgggttaagtcccgcaacgagcgcaacccctatcctatgttaccagcgggtaatgccggggactcataggagactgccaaggacaacttggaggaaggcggggatgacgtcaagtcatcatgccccttatgtcttgggctacacacgtactacaatggtcggcaacagagggaagcaaagccgtgaggcagagcaaaccccagaaacccgatcccagttcggattgcaggctgcaactcgcctgcatgaagtcggaatcgctagtaatcgcaggtcagcatactgcggtgaatacgttcccgggccttgtacacaccgcccgtcacaccacgaaagttggtaacacccgaagccggtggggtaaccgtaaggagccagccgtctaaggtggggccgatgattggggtgaagtcgtaacaaggtagccgtatcggaagg

SEQ ID NO: 1465 - DNA, 1276 bp, Phenylobacterium zucineum
ctggcggcaggcctaatacatgcaagtcgagcgagcggcggacgggtgagtaacgcgtgggaatgtgccctttggtacggaacaacacagggaaacttgtgctaataccgtatgtggaaagtcgccattggagcagcccgcgttggattaggtagttggtgaggtaaaggctcaccaagccgacgatccatagctggtctgagaggatgatcagccacactgggactgagacacggcccagactcctacgggaggcagcagtagggaatcttgcgcaatgggcgaaagcctgacgcagccatgccgcgtgaatgatgaaggtcttaggattgtaaaattctttcaccggggaagatgacggtacccggagaagaagtcccggctaacttcgtgccagcagccgcggtaatacgaagggggctagcgttgctcggaattactgggcgtaaagggcgcgtaggcggatgtttaagtcgggggtgaaagcccggggctcaacctcggaattgccttcgatactggacatcttgagtacgggagaggtgagtggaactccgagtgtagaggtgaaattcgtagatattcggaagaacaccagtggcgaaggcgactcactggcccgactgacgctgaggcgcgaaagcgtggggagcaaacaggattagataccctggtagtccacgccgtaaacgatgagtgctagttgtcggcatgtcggtgacgcagctaacgcattaagcactccgcctggggagtacggtcgcaagattaaaactcaagggaattgacgggggcccgcacaagcggtggagcatgtggtttaattcgaagcaacgcgcagaaccttaccaccttttgacatgcacaggtgctgcatggctgtcgtcagctcgtgtcgtgagatgttgggttaagtcccgcaacgagcgcaaccctcgccattagttgccatcatgggcactctaatgggaccgccggtggtaagccggaggaaggtggggatgacgtcaagtcctcatggcccttacggggtgggctacacacgtgctacaatggcgaccagagggttgcgatgctgcgaagcggagctaatccctgtcgtctcagttcggatgcactctgcaactcgagtgcagaagtcggaatcgctagtaatcgcggatcagcatgccgcggtgaatacgttcccgggccttgtacacaccgcccgtcgcaccatgggagttggctttacccgaaggcggtcgctaggcagccgaccacggtagggtcagcg

SEQ ID NO: 1466 - DNA, 1428 bp, Photorhabdus asymbiotica
acatgcaagtcgagcggtaacaggaaagtgcttgcacttttgctgacgagcggcggacgggtgagtaatgtctggggatctgcccgagggcgggggataaccactggaaacggtggctaataccgcatgatgtcgcgagaccaaagtgggggacctgaaagggcctcacgccctcggatgaacccagatgggattagctagtaggtagggtaatggcctacctaggcgacgatccctagctggtctgagaggatgaccagccacactgggactgagacacggcccagactcctacgggaggcagcagtggggaatattgcacaatgggcgcaagcctgatgcagccatgccgcgtgtatgaagcaggccttcgggttgtaaagtactttcagcggggaggaagggtttggcctgaagagggttaaattttgacgttacccgcagaagaagcaccggctaactccgtgccagcagccgcggtaatacggagggtgcaagcgttaatcggaatgactgggcgtaaagcgcacgcaggcggtcaattaagttagatgtgaaatccccgggctcaacctgggaatggcatctaagactggttggctagagtctcgtagaggggggtagaattccatgtgtagcggtgaaatgcgtagagatgtggaggaataccggtggcgaaggcggccccctggacgaagactgacgctcatgtgcgaaagcgtggggagcaaacaggattagataccctggtagtccacgctgtaaacgatgtcgatttggaggttgtggcctagagctgtggcttccggagctaacgcgttaaatcgaccgcctggggagtacggccgcaaggttaaaactcaaatgaattgacgggggcccgcacaagcggtggagcatgtggtttaattcgatgcaacgcgaagaaccttacctactcttgacatccagagaagacctcagagatgaggttgtgccttcgggagctctgagacaggtgctgcatggctgtcgtcagctcgtgttgtgaaatgttgggttaagtcccgcaacgagcgcaacccttatcctttgttgccagcacgttgaggtgggaactcaaaggagactgccggtgataaaccggaggaaggtggggatgacgtcaagtcatcatggccctgacgagtagggctacacacgtgctacaatggcggatacaaagtgaagcgacctcgcgagagcaagcggaacacacaaagtctgtcgtagtccggattggagtctgcaactcgactccatgaagtcggaatcgctagtaatcgtagatcagcatgctacggtgaatacgttcccgggccttgtacacaccgcccgtcacaccatgggagtgggtggcaaaagaagtcggtagcctaaccgcgaggggggcgctgaccactttgtgat

SEQ ID NO: 1467 - DNA, 1501 bp, Pigmentiphaga daeguensis
ctggctcagattgaacgctagcggcatgccttacacatgcaagtcgaacggcagcgcggacttcggtctggcggcgagtggcgaacgggtgagtaatgcatcggaacgtacccagtagcgggggataactacgcgaaagcgtagctaataccgcatacgccctacgggggaaagggggggatcgcaagacctctcactattggagcggccgatgtcggattagctagttggtggggtaaaggcctaccaaggcgacgatccgtagctggtttgagaggacgaccagccacactgggactgagacacggcccagactcctacgggaggcagcagtggggaattttggacaatgggggcaaccctgatccagccatgccgcgtgtgcgaagaaggccttcgggttgtaaagcacttttggcgggaaagaaacggcgccggctaatacctggcgtaactgacggtacccgcagaataagcaccggctaactacgtgccagcagccgcggtaatacgtagggtgcaagcgttaatcggaattactgggcgtaaagcgtgcgcaggcggttcggaaagaaagatgtgaaatcccagggctcaaccttggaactgcatttttaactcccgaactagagtgtgtcagagggaggtggaattccacgtgtagcagtgaaatgcgtagatatgtggaggaacaccgatggcgaaggcagcctcctgggataacactgacgctcatgcacgaaagcgtggggagcaaacaggattagataccctggtagtccacgccctaaacgatgtcaactagctgttgggttcttcggagcttggtagcgcagctaacgcgtgaagttgaccgcctggggagtacggtcgcaagattaaaactcaaaggaattgacggggacccgcacaagcggtggatgatgtggattaattcgatgcaacgcgaaaaaccttacctacccttgacatgtctggaatcccgaagagatttgggagtgctcgaaagagaaccggaacacaggtgctgcatggccgtcgtcagctcgtgtcgtgagatgttgggttaagtcccgcaacgagcgcaacccttgtcattagttgctacgaaagggcactctaatgagactgccggtgacaaaccggaggaaggtggggatgacgtcaggtcctcatggcccttatgggtagggcttcacacgtcatacaatggtcgggacagagggctgccaacccgcgagggggagccaatcccagaaacccgatcgtagtccggattgcagtctgcaactcgactgcatgaagtcggaatcgctagtaatcgcggatcagcatgtcgcggtgaatacgttcccgggtcttgtacacaccgcccgtcacaccatgggagtgggttctaccagaagtaggtagcctaaccgcaaggagggcgcttaccacggtagggttcatgactggggtgaagtcgtaacaaggtagccgtatcggaaggtgcggctgg

SEQ ID NO: 1468 - DNA, 1506 bp, Planomicrobium koreense
gacgaacgctggcggcatgcctaatacatgcaagtcgagcggaacgttgggagcttgctcccttcgtttagcggcggacgggtgagtaacacgtgggcaacctgccctgcagatcgggataactccgggaaaccggtgctaataccgaatagttttttgcccctcctggggcggaacggaaagacggtttcggctgtcactgcaggatgggcccgcggcgcattagctagttggtggggtaacggcccaccaaggcgacgatgcgtagccgacctgagagggtgatcggccacactgggactgagacacggcccagactcctacgggaggcagcagtagggaatcttccgcaatggacgaaagtctgacggagcaatgccgcgtgagtgacgaaggttttcggatcgtaaaactctgttgtaagggaagaacaagtaccaagtaactactggtaccttgacggtaccttaccagaaagccacggctaactacgtgccagcagccgcggtaatacgtaggtggcaagcgttgtccggaattattgggcgtaaagcgcgcgcaggcggtcccttaagtctgatgtgaaagcccacggctcaaccgtggagggtcattggaaactgggggacttgagtgcagaagaggaaagtggaattccatgtgtagcggtgaaatgcgtagagatgtggaggaacaccagtggcgaaggcgactttctggtctgtaactgacgctgaggcgcgaaagcgtggggagcaaacaggattagataccctggtagtccacgccgtaaacgatgagtgctaagtgttagggggtttccgccccttagtgctgcagctaacgcattaagcactccgcctggggagtacggccgcaaggctgaaactcaaaggaattgacgggggcccgcacaagcggtggagcatgtggtttaattcgaagcaacgcgaagaaccttaccaggtcttgacatcccgctgaccgcctaggagactaggctttcccttcggggacagcggtgacaggtggtgcatggttgtcgtcagctcgtgtcgtgagatgttgggttaagtcccgcaacgagcgcaacccttgatcttagttgccagcattcagttgggcactctaaggtgactgccggtgacaaaccggaggaaggtggggatgacgtcaaatcatcatgccccttatgacctgggctacacacgtgctacaatggacggtacaaagggctgcaaacccgcgagggggagccaatcccagaaaaccgttctcagttcggattgcaggctgcaactcgcctgcatgaagccggaatcgctagtaatcgtggatcagcatgccacggtgaatacgttcccgggccttgtacacaccgcccgtcacaccacgagagtttgtaacacccgaagtcggtgaggtaaccacttgtggagccagccgccgaaggtgggacagatgattggggtgaagtcgtaacaaggtagccgtatcggaaggtgc

SEQ ID NO: 1469 - DNA, 1499 bp, Plesiomonas shigelloides
gagtttgatcatggctcagattgaacgctggcggcaggcctaacacatgcaagtcgagcggtaacacagaggagcttgctccttgggtgacgagcggcggacgggtgagtaatgcctggggatctgcccgatagagggggataactacgggaaactgtagctaataccgcataatgtctacggaccaaagtgggggctttcggacctcatgctatcggatgaacccaggtgggattagctagttggtgaggtaatggctcaccaaggcgacgatctctaactggtttgagagaatgaccagtcacactggaactgagacacggtccagactcctacgggaggcagcagtggggaatattgcacaatgggcgcaagcctgatgcagccatgccgcgtgtgtgaagaaggccttcgggttgtaaagcactttcagcggggaggaagggtcactagttaatacctagtggcattgacgttactcgcagaagaagcaccggctaactccgtgccagcagccgcggtaatacggagggtgcaagcgttaatcggaattactgggcgtaaagcgcacgcaggcggtttgttaagtcagatgtgaaatccccgagctcaacttgggaactgcatttgaaactggcaagctagagtcttgtagaggggggtagaattccaggtgtagcggtgaaatgcgtagagatctggaggaataccggtggcgaaggcggccccctggacaaagactgacgctcaggtgcgaaagcgtggggagcaaacaggattagataccctggtagtccacgctgtaaacgatgtcgatttggaggttgtgcccttgaggcgtggcttccggagctaacgcgttaaatcgaccgcctggggagtacggccgcaaggttaaaactcaaatgaattgacgggggcccgcacaagcggtggagcatgtggtttaattcgatgcaacgcgaagaaccttacctactcttgacatccacagaactttccagagatggattggtgccttcgggaactctgagacaggtgctgcatggctgtcgtcagctcgtgttgtgaaatgttgggttaagtcccgcaacgagcgcaacccttatcctttgttgccagcgattcggtcgggaactcaaaggagactgccggtgataaaccggaggaaggtggggatgacgtcaagtcatcatggcccttacgagtagggctacacacgtgctacaatggcatatacaaagggcggcaagctagcgatagtgagcgaatcccataaagtatgtcgtagtccggattggagtctgcaactcgactccatgaagtcggaatcgctagtaatcgcggatcagaatgccgcggtgaatacgttcccgggccttgtacacaccgcccgtcacaccatgggagtgggttgcaaaagaagtaggtagcttaaccttcgggagggcgcttaccactttgtgattcatgactggggtgaagtcgtaacaaggtaa

SEQ ID NO: 1470 - DNA, 1296 bp, Porphyromonadaceae bacterium NML 060648
caggcttaacacatgcaagtcgagggaccggcgcacgggtgagtaacgcgtatgcaacctacctatcagaggggaataacccggcgaaagtcggactaataccgcataaataaagtcgctgatagatgggcatgcgttccattaggtagttggtgaggtaacggctcaccaagccgacgatggataggggaactgagaggttggtcccccacactggtactgagacacggaccagactcctacgggaggcagcagtgaggaatattggtcaatgggcgggagcctgaaccagccaagtcgcgtgaaggaagaaggattatggttcgtaaacttcttttgcaggggaatatgtatgtaccctgagaataaggatcggctaactccgtgccagcagccgcggtaatacggaggatccgagcgttatccggatttattgggtttaaagggtgcgtaggtggtttgataagtcagcggtgaaagtttgcagcttaactgtaaaaatgccgttgaaactgtcggacttgagtgtaaatgaggtaggcggaatgcgtggtgtagcggtgaaatgcatagatatcacgcagaactccgattgcgaaggcagcttactaagctaactgacactgaagcacgaaagcgtggggatcaaacaggattagataccctggtagtccacgcagtaaacgatgattactagctgtttgcgagtaagcggcacagcgaaagcgttaagtaatccacctggggagtacgccggcaacggtgaaactcaaaggaattgacgggggcccgcacaagcggaggaacatgtggtttaattcgatgatacgcgaggaaccttacccgggtttgaacgtacgaggtgctgcatggttgtcgtcagctcgtgccgtgaggtgtcggcttaagtgccataacgagcgcaacccttatttycagttactaacagctgaggactctggagagactgccagcgtaagctggaggaaggtggggatgacgtcaaatcagcacggcccttacatccggggcgacacacgtgttacaatggtaagcaaagggcagctaccgggcgaccggatgcgaatctctcttatctcagttcggacggagtctgcaactcgactccggaagctggattcgctagtaatcgcgcatcagccatggcgcggtgaatacgttcccgggccttgtacacaccgcccgtcaagccatgggagccgggggtacctgaagttcgtatcgacctagggtaaaactggtgactggggctaagtcgtaacaaggtagccgtac

SEQ ID NO: 1471 - DNA, 1531 bp, Porphyromonas asaccharolytica
acaatggagagtttgactctggctcaggatgaacgctagcgataggcttaacacatgcaagtcgaggggcagcgagatgtagcaatacgtcgtcggcgaccggcgaatgggtgagtaacacgtatgcaacttacctcttagtggtgaataacccgatgaaagtcggactaatacaccatatactccttagatcccatgagaagaggaggaaagattaatcgctaagagatgggcctgcgttccattagctagttggtaaggtaacggcttaccaaggcaacgatggatagggggactgagaggttgaccccccacattgacactgagatacgggtcaaactcctacgggaggcagcagtgaggaatattggtcaatgggcgagagcctgaaccagccaagtcgcgtgaaggaagactgcccgcaagggttgtaaacttcttttgtatgggattaaagtcacctacgtgtaggtgtttgcagttaccatacgaataagcatcggctaactccgtgccagcagccgcggtaatacggaggatgcgagcgttatccggaattattgggtttaaagggtgcgtaggttgcaagggaagtcaggggtgaaaagctgtagctcaactatggtcttgcctttgaaactctctagctagagtgtactggaggtacgtggaacgtgtggtgtagcggtgaaatgcatagatatcacacagaactccgattgcgcaggcagcgtactacattacaactgacactgaagcacgaaagcgtgggtatccaacaggattagataccctggtagtccacgcagtaaacgatgaatactagatctatgcgatatacagtatgggtctaagcgaaagcgataagtattccacctggggagtacgccggcaacggtgaaactcaaagagattggcgggggtccgcacaagcggaggaacatgtggtttaattcgatgatacgcgaggaaccttacccgggattgaaatgtagatgcatgaggctgagaggtctcttcccttcggggcttctatgtaggtgctgcatggttgtcgtcagctcgtgccgtgaggtgtcggcttaagtgccataacgagcgcaacccgcgtcgatagttactaacgagtcaagtcgaggactctatcgagacagccgtcgtaagacgtgaggaaggagcggatgacgtcaaatcagcacggcccttacatccggggcgacacacgtgttacaatggtagggacagcgagcagccatctggtgacagagagctaatctataaaccctatcccagttcggatcggagtctgcaactcgactctgtgaagctggattcgctagtaatcgcgcatcagccatggcgcggtgaatacgttcccggaccttgcacacaccgcccgtcaagccatgggagtcgggggtacctgaagagcgtgaccgtcacaggagcgcttgagggtaaaactggtgactggggctaagtcgtaacaaggtagccgtaccggaaggtgcggctggaacacctcctttct

SEQ ID NO: 1472 - DNA, 1533 bp, Porphyromonas endodontalis
acaatggagagtttgatcctggctcaggatgaacgctagcgataggcttaacacatgcaagtcgaggggcagcattattttagcttgctaagatagatggcgaccggcgcacgggtgcgtaacgcgtatgcaacctgcctgtaattagggaataacccggtgaaagtcggactaataccctatattcttctttctccgcatggaggaggacggaaagatttattgattacagatgggcatgcgtcccattagctggttggtaaggtaacggcttaccaaggcaacgatgggtagggggactgagaggttgaccccccacactggtactgagacacggaccagactcctacgggaggcagcagtgaggaatattggtcaatgggcgagagcctgaaccagccaagtcgcgtgaaggacgacggttctatggattgtaaacttcttttgtagaggaataatggcagctacgtgtagctgagatgcatgtactctacgaataagtatcggctaactccgtgccagcagccgcggtaatacggaggatacgagcgttatccggaattattgggtttaaagggtgcgtaggtggcgtattaagtcagtggtgaaaagctgcagctcaactgtagtcttgccgttgaaactgatatgctagagaggagacgaggtatgcggaatgtgtggtgtagcggtgaaatgcatagatatcacacagaacgccgattgcgaaggcagcgtaccaggctccgtctgacactgaagcacgaaagcgtggggatcaaacaggattagataccctggtagtccacgcagtaaacgatgaatactagatttttgcgatatactgtaagagtctaagcgaaagcgataagtattccacctggggagtacgccggcaacggtgaaactcaaaggaattgacgggggcccgcacaagcggaggaacatgtggtttaattcgatgatacgcgaggaaccttacccgggattgaaatttagatgatggcagatgagagtttgctttccttcgggacatctaagtaggtgctgcatggttgtcgtcagctcgtgccgtgaggtgtcggcttaagtgccataacgagcgcaacccgcgtcgatagttactaacaggttatgctgaggactctatcgagacagccgtcgtaagacgcgaggaaggggcggatgacgtcaaatcagcacggcccttacatccggggcgacacacgtgttacaatggcagggacaaagggaagcgacatggtgacatgaagcggatctccaaaccctgtcccagttcggatcggagtctgcaactcgactccgtgaagctggattcgctagtaatcgcgcatcagccatggcgcggtgaatacgttcccgggccttgtacacaccgcccgtcaagccatggaagttgggagtacctgaagagcgtaaccgcaaggggcgcttaagggtaataccagtgactggggctaagtcgtaacaaggtagccgtaccggaaggtgcggctggaatacctcctttct

SEQ ID NO: 1473 - DNA, 1475 bp, Porphyromonas gingivalis
acagtggagagtttgatcctggctcaggatgaacgctagcgataggcttaacacatgcaagtcgaggggcagcatgatcttagcttgctaaggttgatggcgaccggcgcacgggtgcgtaacgcgtatgcaacttgccttacagagggggataacccgttgaaagacggactaaaaccgcatacacttgtattattgcatgatattacaaggaaatatttatagctgtaagataggcatgcgtcccattagcttgttggtgaggtaacggctcaccaaggcgacgatgggtaggggaactgagaggtttatcccccacactggtactgagacacggaccagactcctacgggaggcagcagtgaggaatattggtcaatgggcgagagcctgaaccagccaagtcgcgtgaaggaagacagtcctaaggattgtaaacttcttttatacgggaataacgggcgatacgagtattgcattgaatgtaccgtaagaataagcatcggctaactccgtgccagcagccgcggtaatacggaggatgcgagcgttatccggatttattgggtttaaagggtgcgtaggttgttcggtaagtcagcggtgaaacctgagcgctcaacgttcagcctgccgttgaaactgccgggcttgagttcagtggcggcaggcggaattcgtggtgtagcggtgaaatgcatagatatcacgaggaactccgattgcgaaggcagcttgccatactgcgactgacactgaagcacgaaggcgtgggtatcaaacaggattagataccctggtagtccacgcagtaaacgatgattactaggagtttgcgatataccgtcaagcttccacagcgaaagcgttaagtaatccacctggggagtacgccggcaacggtgaaactcaaaggaattgacgggggcccgcacaagcggaggaacatgtggtttaattcgatgatacgcgaggaaccttacccgggattgaaatgtagatgacggatggtgaaaaccgtcttcccttcggggcttctatgtaggtgctgcatggttgtcgtcagctcgtgccgtgaggtgtcggcttaagtgccataacgagcgcaacccacatcggtagttactaacagttttcgctgaggactctaccgagactgccgtcgtaaggcgtgaggaaggtgtggatgacgtcaaatcagcacggcccttacatccggggcgacacacgtgttacaatgggagggacaaagggcagctaccgggcgaccggatgcgaatctctaaacccttccccagttcggatcggagtctgcaactcgactccgtgaagctggattcgctagtaatcgcgcatcagccatggcgcggtgaatacgttcccgggccttgtacacaccgcccgtcaagccatgggagtcgggggtacctgaagggcgtaaccgcaaggggcgcactagggtaataccggtgact

SEQ ID NO: 1474 - DNA, 1476 bp, Porphyromonas levii
  modified_base (31)..(31): a, c, t, g, unknown or other
  modified_base (49)..(49): a, c, t, g, unknown or other
  modified_base (341)..(341): a, c, t, g, unknown or other
  modified_base (541)..(541): a, c, t, g, unknown or other
  modified_base (645)..(645): a, c, t, g, unknown or other
  modified_base (811)..(811): a, c, t, g, unknown or other
  modified_base (963)..(963): a, c, t, g, unknown or other
  modified_base (973)..(974): a, c, t, g, unknown or other
  modified_base (1021)..(1023): a, c, t, g, unknown or other
  modified_base (1116)..(1116): a, c, t, g, unknown or other
  modified_base (1293)..(1293): a, c, t, g, unknown or other
  modified_base (1448)..(1448): a, c, t, g, unknown or other
acaatggagagtttgatcctggctcaggatnaacgctagcgataggctnaacacatgcaagtcgaggggtaacatgggagtagcttgctgcttctgatgacgaccggcggatgggtgagtaacgcgtatgcaacttgcctcttagtggggaataacccggagaaatccggactaataccgcatacacttagttatccgcatggatgattaaggaaagatttattgctaagagataggcatgcgttccattagttagttggtgaggtaacggctcaccaaggcatcgatggataggggagctgagaggcttatcccccacattgggactgagacacggcccnaactcctacgggaggcagcagtgaggaatattggtcaatggaggaaactctgaaccagccaagtcgcgtgaaggatgactgtcctatggattgtaaacttctttagtaggcgagtaaacgtaggtacgagtacctacctgcaagtagcctaagaataagtatcggctaactccgtgccagcagccgcggtaatacggagnatacgagcgttatccggatttattgggtttaaagggtgcgtaggtggcagattaagtcagtggtgaaaagctgtggctcaaccatagtcttgccgttgaaactngtttgcttgagtacagttgatgtaggcggaatgcgtagtgtagcggtgaaatgcatagatattacgcagaactccgattgcgaaggcagcttacaaaagtgtaactgacactgatgcacgaaagcgtgggtatcaaacaggattagataccctggtagtccacgcngtaaactatgattactcagagtatgcgatataatgtatgctctcaagcgaaagcattaagtaatccacctggggagtacgtcggcaacgatgaaactcaaaggaattgacgggggcccgcacaagcggaggaacatgtggtttaattcgatnatacgcgagnnaccttacctgggattgaaatgtataggacaggggatggaaacattcnnnttctcttcggagacttatatgtaggtgctgcatggttgtcgtcagctcgtgccgtgaggtgtcggcttaagtgccataacgagcgcaaccctnatcgttagttactagcaggtagtgctgaggactctagcgagactgccgtcgtaagacgagaggaaggtggggatgacgtcaaatcagcacggcccttatatccagggcgacacacgtgttacaatggtgaggacaaagggtagctacctggtgacaggatgccaatctccaaacctnatctcagttcggatcgaagtctgcaactcgacttcgtgaagctggattcgctagtaatcgcgcatcagccatggcgcggtgaatacgttcccgggccttgtacacaccgcccgtcaagccatgggagctgggggtacctgaagtacgtgaccgcnaggagcgtccgagggtaagaccggtgac

SEQ ID NO: 1475 - DNA, 1473 bp, Porphyromonas macacae
  modified_base (31)..(31): a, c, t, g, unknown or other
  modified_base (49)..(49): a, c, t, g, unknown or other
  modified_base (174)..(174): a, c, t, g, unknown or other
  modified_base (392)..(392): a, c, t, g, unknown or other
  modified_base (440)..(440): a, c, t, g, unknown or other
  modified_base (455)..(455): a, c, t, g, unknown or other
  modified_base (475)..(475): a, c, t, g, unknown or other
  modified_base (507)..(507): a, c, t, g, unknown or other
  modified_base (530)..(530): a, c, t, g, unknown or other
  modified_base (544)..(544): a, c, t, g, unknown or other
  modified_base (1318)..(1318): a, c, t, g, unknown or other
  modified_base (1408)..(1408): a, c, t, g, unknown or other
acagagaagagtttgatcctggctcaggatnaacgctagcgataggctnaacacatgcaagtcgaggggcagcatggtcttagcttgctaagattgatggcgaccggcgcacgggtgcgtaacgcgtatgtaacttgcctgatagaaagggataacccggtgaaagtcggactnataccttatggtcttgggttattgcatgatgattcaagtaaagattaattgctatcagataggcatgcgttccattagttggttggtgaggtaacggctcaccaaggctacgatggataggggaatgagaggtttatcccccacactggtactgagacacggaccagactcctacgggaggcagcagtgaggaatattggtcaatgggcgagagcctnaaccagccacgtcgcgtgaaggaagacggttctatggattgtaaactncttttataggggatnaagttatccacgtgtggatntttgcaagtaccctatgaataagcatcggctnactccgtgccagcagccgcggtnatacggaggatgcnagcgttatccggatttattgggtttaaagggtgcgtaggtggcctgataagtcgggggtgaaaagctgtggctcaaccacagtcttgccttcgaaactgtttggcttgagtatagatgaagtaggcggaatttgtggtgtagcggtgaaatgcatagatatcacgaggaactccgattgcgaaggcagcttactaagttatgactgacactgaagcacgaaagcgtgggtatcaaacaggattagataccctggtagtccacgcagtaaacgatgataactgggcgtatgcgatatacagtatgctcctgagcgaaagcgttaagttatccacctggggagtacgccggcaacggtgaaactcaaaggaattgacgggggcccgcacaagcggaggaacatgtggtttaattcgatgatacgcgaggaaccttacccgggattgaaatttagcggactatgtatgaaagtacatatcctgtcacaaggccgctaagtaggtgctgcatggttgtcgtcagctcgtgccgtgaggtgtcggcttaagtgccataacgagcgcaacccacgttgtcagttactatcgggtaaagccgaggactctgacaagactgccgtcgtaaggcgcgaggaaggtgtggatgacgtcaaatcagcacggcccttacatccggggcgacacacgtgttacaatggtggggacaaagggcagctacttggtgacaagatgcgaatctccaaaccccatcccagttcggatcgtagtctgcaactngactatgtgaagctggattcgctagtaatcgcgcatcagccatggcgcggtgaatacgttcccgggccttgtacacaccgcccgtcaagncatgggagtcgggagtacctaaagcacgtaaccgcgaggggcgtgtcagggtaataccggtgact

SEQ ID NO: 1476 - DNA, 1486 bp, Porphyromonas somerae
tggctcaggatgaacgctagcgataggcttaacacatgcaagtcgaggggtaacatggagagaagcttgcttcactctgatgacgaccggcggatgggtgagtaacgcgtatgcaacttgcctcttagtgggggataacccggagaaatccggactaataccgcatattcttaatttctcgcatgagttattaaggaaagatttattgctaagagataggcatgcgttccattagttagttggtgaggtaacggctcaccaaggcatcgatggataggggagctgagaggctgatcccccacattgggactgagacacggcccaaactcctacgggaggcagcagtgaggaatattggtcaatggaggaaactctgaaccagccaagtcgcgtgaaggatgacggtcctatggattgtaaacttctttagtaggtgagtaaggataggtacgtgtacctattagaaagtagcctaagaataagtatcggctaactccgtgccagcagccgcggtaatacggaggatacgagcgttatccggatttattgggtttaaagggtgcgtaggtggctgattaagtcagtggtgaaaagctatggctcaaccatagtcttgccgttgatactggttagcttgagtgtagatgatgtaggcggaatgcgtagtgtagcggtgaaatgcatagatattacgcagaactccgattgcgaaggcagcttacaaaactactactgacactgaggcacgaaagcgtgggtatcaaacaggattagataccctggtagtccacgccgtaaactatgattactcagagtatgcgatatacagtatgctctcaagcgaaagcattaagtaatccacctggggagtacgtcggcaacgatgaaactcaaaggaattgacgggggcccgcacaagcggaggaacatgtggtttaattcgatgatacgcgaggaaccttacctgggattgaaatgtataggctggcaactggaaacagatgctgttcacttcggtgacttatatgtaggtgctgcatggttgtcgtcagctcgtgccgtgaggtgtcggcttaagtgccataacgagcgcaacccttatcgttagttgctaacaggttaagctgaggactctggcgagactgccgtcgtaaggcgagaggaaggtggggatgacgtcaaatcagcacggcccttatatccagggcgacacacgtgttacaatggtgaggacaaagggtagctacctggtgacaggatgccaatctccaaacctcatctcagttcggatcgaagtctgcaactcgacttcgtgaagctggattcgctagtaatcgcgcatcagccatggcgcggtgaatacgttcccgggccttgtacacaccgcccgtcaagccatggaagctgggggtacctgaagtgcgtgaccgcgaggagcgtccgagggtaagaccggtgactggggctaagtcgtaacaaggtaacc

SEQ ID NO: 1477 - DNA, 1482 bp, Porphyromonas sp.
  UQD 301
gctcaggatgaacgctagcgataggcttaacacatgcaagtcgaggggcagcatggtcttagcttgctaagactgatggcgaccggcgcacgggtgcgtaacgcgtatgcaacttgccttacagagggggataacccgttgaaagacggactaacaccgcatatgctcaggggtctgcatgggcctttgaggaaatatttatagctgtaagataggcatgcgtcccattagcttgttggtgaggtaacggctcaccaaggcaacgatgggtaggggaactgagaggtttatcccccacactggtactgagacacggaccagactcctacgggaggcagcagtgaggaatattggtcaatgggcgagagcctgaaccagccaagtcgcgtgaaggatgaaggccctatgggtcgtaaacttcttttatacgggaataacgagccttacgggtagggcgctgaatgtaccgtaggaataagcatcggctaactccgtgccagcagccgcggtaatacggaggatgcgagcgttatccggatttattgggtttaaagggtgcgtaggttgcttggtaagtcagcggtgaaaactgaacgctcaacgttcagcgtgccgttgaaactgtcaggcttgagtgcagtggcggcaggcggaattcgtggtgtagcggtgaaatgcatagatatcacgaggaactccgattgcgaaggcagcttgccatactgtaactgacactgaagcacgaaggcgtgggtatcaaacaggattagataccctggtagtccacgcagtaaacgatgattactaggagtttgcgatataccgataagcttccacagcgaaagcgttaagtaatccacctggggagtacgccggcaacggtgaaactcaaaggaattgacgggggcccgcacaagcggaggaacatgtggtttaattcgatgatacgcgaggaaccttacccgggattgaaatgtagatgacagatggtgaaagccgttcttccttcgggacatctatgtaggtgctgcatggttgtcgtcagctcgtgccgtgaggtgtcggcttaagtgccataacgagcgcaacccacattggtagttactaacaggtcaagctgaggactctaccgagactgccgtcgtaaggcgcgaggaaggtgtggatgacgtcaaatcagcacggcccttacatccggggcgacacacgtgttacaatgggagggacaaagggcagctaccgggcgaccggatgcgaatctcgaaacccttccccagttcggatcggagtctgcaactcgactccgtgaagctggattcgctagtaatcgcgcatcagccatggcgcggtgaatacgttcccgggccttgtacacaccgcccgtcaagccatgggagtcgggggtacctgaaggacgtaaccgcaaggggcgtactagggtaataccggtgactggggctaagtcgtaacaaggtaaccgta

SEQ ID NO: 1478 - DNA, 1509 bp, Porphyromonas sp.
  oral clone BB134
gagagtttgattctggctcaggatgaacgctagcgataggcttaacacatgcaagtcgaggggcagcattattttagcttgctaagatagatggcgaccggcgcacgggtgcgtaacgcgtatgcaacctgcctgtaattagggaataacccggtgaaagtcggactaataccctatattcttctttttccgcatggggaaagacggaaagatttattgattacagatgggcatgcgtcccattagctcgttggtaaggtaacggcttaccaaggcaacgatgggtagggggactgagaggttgaccccccacactggtactgagacacggaccagactcctacgggaggcagcagtgaggaatattggtcaatgggcgagagcctgaaccagccaagtcgcgtgaaggacgacggttctatggattgtaaacttcttttgtagaggaataatggcagctacgcgtagctgagatgcatgtactctacgaataagtatcggctaactccgtgccagcagccgcggtaatacggaggatacgagcgttatccggaattattgggtttaaagggtgcgtaggtggcgtattaagtcagtggtgaaaagctgcagctcaactgtagtcttgccgttgaaactgatatgctagagaggagacgaggtatgcggaatgtgtggtgtagcggtgaaatgcatagatatcacacagaacgccgattgcgaaggcagcgtaccaggctccgtctgacactgaagcacgaaagcgtggggatcaaacaggattagataccctggtagtccacgcagtaaacgatgaatactagatttttgcgatatagtgtaagagtctaagcgaaagcgataagtattccacctggggagtacgccggcaacggtgaaactcaaaggaattgacgggggcccgcacaagcggaggaacatgtggtttaattcgatgatacgcgaggaaccttacccgggattgaaatttagatggtggcagatgagagtttgctttccttcgggacatctaagtaggtgctgcatggttgtcgtcagctcgtgccgtgaggtgtcggcttaagtgccataacgagcgcaacccgcgtcgatagttactaacaggttaagctgaggactctatcgagacagccgtcgtaagacgtgaggaaggggcggatgacgtcaaatcagcacggcccttacatccggggcgacacacgtgttacaatggcagggacaaagggaagcgacatggtgacatgaagcggatctccaaaccctgtcccagttcggatcggagtctgcaactcgactccgtgaagctggattcgctagtaatcgcgcatcagccatggcgcggtgaatacgttcccgggccttgtacacaccgcccgtcaagccatggaagttgggagtacctgaagagcgtaaccggaaggggcgcttaagggtaataccagtgactggggctaagtcgtaacaaggtagccgtaccggaaggtgcgg

SEQ ID NO: 1479 - DNA, 1465 bp, Porphyromonas sp.
  oral clone F016
  modified_base (629)..(629): a, c, t, g, unknown or other
cctggctcaggatgaacgctagcgataggcttaacacatgcaagtcgaggggcagcattattttagcttgctaagatagatggcgaccggcgcacgggtgcgtaacgcgtatgcaacctgcctgtaattagggaataacccggtgaaagtcggactaataccctatattcatcgttaaccgcatggttggtgatggaaagatttattgattacagatgggcatgcgtcccattagctagttggtaaggtaacggcttaccaaggcaacgatgggtagggggactgagaggttgaccccccacactggtactgagacacggaccagactcctacgggaggcagcagtgaggaatattggtcaatgggcggaagcctgaaccagccaagtcgcgtgaaggaagacggttctatggattgtaaacttcttttgtagaggaataatggcagctacgtgtagctgagatgcatgtactctacgaataagtatcggctaactccgtgccagcagccgcggtaatacggaggatacgagcgttatccggaattattgggtttaaagggtgcgtaggtggcgtattaagtcagtggtgaaaagctgcagctcaactgtagtcttgccgttgaaactnatatgctagagaggagacgaggtatgcggaatgtgtggtgtagcggtgaaatgcatagatatcacacagaacgccgattgcgaaggcagcgtaccaggctccgtctgacactgaagcacgaaagcgtggggatcaaacaggattagataccctggtagtccacgcagtaaacgatgaatactagatttttgcgatatacagtaagagtctaagcgaaagcgataagtattccacctggggagtacgccggcaacggtgaaactcaaaggaattgacgggggcccgcacaagcggaggaacatgtggtttaattcgatgatacgcgaggaaccttacccgggattgaaatttagatggcggcagatgagagtttgctttccttcgggacatctaagtaagtgctgcatggttgtcgtcagctcgtgccgtgaggtgtcggcttaagtgccataacgagcgcaacccgcgttgatagttactaacaggttaagctgaggactctatcgagacagccgtcgtaagacgagaggaaggggcggatgacgtcaaatcagcacggcccttacatccggggcgacacacgtgttacaatggcagggacaaagggaagcgacatggtgacatgaagcggatctccaaaccctgtcccagttcggatcggagtctgcaactcgactccgtgaagctggattcgctagtaatcgcgcatcagccatggcgcggtgaatacgttcccgggccttgtacacaccgcccgtcaagccatggaagttgggagtacctgaagagcgtaaccgcaaggggcgcttaagggtaataccagtgactggggctaa

SEQ ID NO: 1480 - DNA, 1286 bp, Porphyromonas sp.
  oral clone P2PB_52 P1
  modified_base (1230)..(1230): a, c, t, g, unknown or other
gatgaacgctagcgataggcttaacacatgcaagtcgagggaccggcgcacgggtgcgtaacgcgtatgcaacctgcctgtaattagggaataacccggtgaaagtcggactaataccctatattgaaagttgattacagatgggcatgcgtcccattagctagttggtaaggtaacggcttaccaaggcaacgatgggtagggggactgagaggttgaccccccacactggtactgagacacggaccagactcctacgggaggcagcagtgaggaatattggtcaatgggcgagagcctgaaccagccaagtcgcgtgaaggacgacggtttatggattgtaaacttcttttgtagaggaatatgcatgtactctacgaataagtatcggctaactccgtgccagcagccgcggtaatacggaggatacgagcgttatccggaattattgggtttaaagggtgcgtaggtggcatattaagtcagtggtgaaaagctgcagctcaactgtagtcttgccgttgaaactgatatgctagagaggagacgaggtatgcggaatgtgtggtgtagcggtgaaatgcatagatatcacacagaacgccgattgcgaaggcagcgtaccaggctctctgacactgaagcacgaaagcgtggggatcaaacaggattagataccctggtagtccacgcagtaaacgatgaatactagatttttgcgtgtaagagtctaagcgaaagcgataagtattccacctggggagtacgccggcaacggtgaaactcaaaggaattgacgggggcccgcacaagcggaggaacatgtggtttaattcgatgatacgcgaggaaccttacccgggattgaaattagtaggtgctgcatggttgtcgtcagctcgtgccgtgaggtgtcggcttaagtgccataacgagcgcaacccgcgtcgatagttactaacagctgaggactctatcgagacagccgtcgtaagacggaggaaggggcggatgacgtcaaatcagcacggcccttacatccggggcgacacacgtgttacaatggcaggcaaagggaagcgacatggtgacatgaagcggatctcccctgtcccagttcggacggagtctgcaactcgactccggaagctggattcgctagtaatcgcgcatcagccatggcgcggtgaatacgttcccgggccttgtacacaccgcccgtcaagccanggagttgggagtacctgaagagcgtagcgcttaagggtaataccagtgactggggc

SEQ ID NO: 1481 - DNA, 1285 bp, Porphyromonas sp.
  oral clone P4GB_100 P2
gatgaacgctagcgataggcttaacacatgcaagtcgagggaccggcgcacgggtgcgtaacgcgtatgcaacctgcctgtaattagggaataacccggtgaaagtcggactaataccctatattgaaagttgattacagatgggcatgcgtcccattagctggctggtaaggtaacggcttaccaaggcaacgatgggtagggggactgagaggttgacctcccacactggtactgagacacggaccagactcctacgggaggcagcagtgaggaatattggtcaatgggcgagagcctgaaccagccaagtcgcgtgaaggacgacggtttatggattgtaaacttcttttgtagaggaatatgcatgtactctacgaataagtatcggctaactccgtgccagcagccgcggtaatacggaggatacgagcgttatccggaattattgggtttaaagggtgcgtaggtggcgtattaagtcagtggtgaaaagctgcagctcaactgtagtcttgccgttgaaactgatatgctagagaggagacgaggtatgcggaatgtgtggtgtagcggtgaaatgcatagatatcacacagaacgccgattgcgaaggcagcgtaccaggctctctgacactgaagcacgaaagcgtggggatcaaacaggattagataccctggtagtccacgtagtaaacgatgaatactagatttttgcgtgtaagagtctaagcgaaagcgataagtattccacctggggagtacgccggcaacggtgaaactcaaaggaattgagggggcccgcacaagcggaggaacatgtggtttaattcgatgatacgcgaggaacttaccggggattgaatttagtaggtgctgcatggttgtcgtcagctcgtgccgtgaggtgtcggcttaagtgccataacgagcgcaacccgcgtcgatagttactaacagctgaggactctatcgagacagccgtcgtaagacggaggaaggggcggatgacgtcaaatcagcacggcccttacatccggggcgacacacgtgttacaatggcaggcaaagggaagcgacatggtgacatgaagcggatctcccctgtcccagttcggacggagtctgcaactcgactccggaagctggattcgctagtaatcgcgcatcagccatggcgcggtgaatacgttcccgggccttgtacacaccgcccgtcaagccatgggagtcgggggtacctgaagggcgtagcgcactagggtaataccggtgactggggc

SEQ ID NO: 1482 - DNA, 1532 bp, Porphyromonas uenonis
acaatggagagtttgactctggctcaggatgaacgctagcgataggcttaacacatgcaagtcgaggggcagcgagatgtagcaatacgtcgtcggcgaccggcgaatgggtgagtaacacgtatgcaacttacctcttagtggtgaataactcgatgaaagtcggactaatacaccatactctccttagatcacatgagaagaggaggaaagattaatcgctaagagataggcctgcgttccattagctagttggtaaggtaacggcttaccaaggcaacgatggatagggggactgagaggttgaccccccacattgacactgagatacgggtcaaactcctacgggaggcagcagtgaggaatattggtcaatgggcgagagcctgaaccagccaagtcgcgtgaaggaagactgcccgcaagggttgtaaacttcttttgtatgggattaaagtcgtctacgtgtagacgtttgcagttaccatacgaataagcatcggctaactccgtgccagcagccgcggtaatacggaggatgcgagcgttatccggaattattgggtttaaagggtgcgtaggttgcaagggaagtcaggggtgaaaagctatagctcaactatggtcttgcctttgaaactctctagctagagtgtactggaggtacgtggaacgtgtggtgtagcggtgaaatgcatagatatcacacagaactccgattgcgcaggcagcgtactacattacaactgacactgaagcacgaaagcgtgggtatcaaacaggattagataccctggtagtccacgcagtaaacgatgaatactagatctatgcgatatgacagtatgggtctaagcgaaagcgataagtattccacctggggagtacgccggcaacggtgaaactcaaagagattggcgggggtccgcacaagcggaggaacatgtggtttaattcgatgatacgcgaggaaccttacccgggattgaaatgtagatgcatgaggctgagaggtctcttcccttcggggcttctatgtaggtgctgcatggttgtcgtcagctcgtgccgtgaggtgtcggcttaagtgccataacgagcgcaacccgcgtcgatagttactaacgagttaagtcgaggactctatcgagacagccgtcgtaagacgagaggaaggagcggatgacgtcaaatcagcacggcccttacatccggggcgacacacgtgttacaatggtagggacagcgagcagccatctggcgacagagagctaatctataaaccctatcccagttcggatcggagtctgcaactcgactctgtgaagctggattcgctagtaatcgcgcatcagccatggcgcggtgaatacgttcccggaccttgcacacaccgcccgtcaagccatgggagtcgggggtacctgaagagcgtgaccgtcacaggagcgcttgagggtaaaactggtgactggggctaagtcgtaacaaggtagccgtaccggaaggtgcggctggaacacctcctttct

SEQ ID NO: 1483 - DNA, 1495 bp, Prevotella albensis
agagtttgatcctggctcaggatgaacgctagctacaggcttaacacatgcaagtcgaggggaaacgacagagagtgcttgcacactttgggcgtcgaccggcgaatgggtgagtaacgcgtatccaacctgcccttgacagagggatagcccagtgaaaactgaattaatacctcatgtcctcctccgacggcatcagacgaggagtaaagatttatcggtcaaggatggggatgcgtctgattaggtagtaggcggggtaacggcccacctagccgacgatcagtaggggttctgagaggaaggtcccccacattggtactgagacacggaccaaactcctacgggaggcagcagtgaggaatattggtcaatgggcggaagcctgaaccagccaagtagcgtgcaggacgacggccctatgggttgtaaactgcttttataggggaataaagttatccacgtgtggatatttgcatgtaccctatgaataaggaccggctaattccgtgccagcagccgcggtaatacggaaggtccgggcgttatccggatttattgggtttaaagggagcgtaggcggtatattaagcgtgttgtgaaatgtaggtgctcaacatctgacttgcagcgcgaactggtttacttgagtacgcacaacgtaggcggaattcgtcgtgtagcggtgaaatgcttagatatgacgaagaactccgattgcgaaggcagcttacgggagcgccactgacgctgaagctcgaaagtgcgggtatcgaacaggattagataccctggtagtccgcacggtaaacgatggatgcccgctctgagtccttttggatttggggccaagcgaaagcattaagcatcccacctggggagtacgccggcaacggtgaaactcaaaggaattgacgggggcccgcacaagcggaggaacatgtggtttaattcgatgatacgcgaggaaccttacccgggcttgaattgcaggagaacgatccagagatggtgaggcccttcggggctcctgtgaaggtgctgcatggttgtcgtcagctcgtgccgtgaggtgtcggcttaagtgccataacgagcgcaacccctctccttagttgccatcaggtaatgctgggcactctggggacactgccaccgtaaggtgtgaggaaggtggggatgacgtcaaatcagcacggcccttacgtccggggctacacacgtgttacaatggcgtgtacagagagttggtgacatgcaaatgtcatctaatcctaaaagcacgtctcagttcggactggggtctgcaacccgaccccacgaagctggattcgctagtaatcgcgcatcagccatggcgcggtgaatacgttcccgggccttgtacacaccgcccgtcaagccatgaaagccgggggtgcctgaagtccgtgaccggaaggatcggcctagggcaaaactggtaattggggctaagtcgtaacaaggtagccgt

SEQ ID NO: 1484 - DNA, 1491 bp, Prevotella amnii
agagtttgatcctggctcaggatgaacgctagctataggcttaacacatgcaagtcgaggggcagcatatagattgcttgcaatttatgatggcgaccggcgcacgggtgagtaacgcgtatccaacctacccattactagggaataacccagcgaaagttggcctaatgccctatgtagtcgtttgatcgcctgagatttcgacgaaagatttatcggtattggatggggatgcgtctgattagcttgttggcggggtaaaggcccaccaaggcgacgatcagtaggggttctgagaggaaggtcccccacattggaactgagacacggtccaaactcctacgggaggcagcagtgaggaatattggtcaatgggcgagagcctgaaccagccaagtagcgtgcaggatgacggccctatgggttgtaaactgcttttatatgggaataaagtgagggacgtgtcccttattgcatgtaccatatgaataaggaccggctaattccgtgccagcagccgcggtaatacggaaggtccaggcgttatccggatttattgggtttaaagggagcgtaggctgtttgttaagcgtgttgtgaaatgtaagagctcaacttttagattgcagcgcgaactggcagacttgagtgcgcacaacgtaggcggaattcatggtgtagcggtgaaatgcttagatatcatgacgaactccgattgcgaaggcagcttacgggagcgcaactgacgctaaagctcgaaggtgcgggtatcgaacaggattagataccctggtagtccgcacagtaaacgatggatgcccgctgttagcacctagtgttagcggctaagcgaaagcattaagcatcccacctggggagtacgccggcaacggtgaaactcaaaggaattgacgggggcccgcacaagcggaggaacatgtggtttaattcgatgatacgcgaggaaccttacccgggcttgaattgcagatgtttatatcagagatgatatattcccttcggggcatttgtgaaggtgctgcatggttgtcgtcagctcgtgccgtgaggtgtcggcttaagtgccataacgagcgcaacccctttttttagttgccatcaggtagtgctgggcactctagagatactgccaccgtaaggtgtgaggaaggtggggatgacgtcaaatcagcacggcccttacgtccggggctacacacgtgttacaatgggtggtacagagagttggttgtacgcaagtgcgatctaatcctaaaaaccattctcagttcggactggggtctgcaacccgaccccacgaagctggattcgctagtaatcgcgcatcagccatggcgcggtgaatacgttcccgggccttgtacacaccgcccgtcaagccatgaaagccgggggtgcctgaagttcgtgaccgtaaggatcgacctagggcaaaactggtaattggggctaagtcgtaacaaggtaacc

SEQ ID NO: 1485 - DNA, 1537 bp, Prevotella bergensis
ttacaatggagagtttgatcctggctcaggatgaacgctagctacaggcttaacacatgcaagtcgaggggaaacggcatttggtgcttgcaccatttggacgtcgaccggcgcacgggtgagtaacgcgtatccaacctgcccataagtagggtataacccgcagaaatgcggactaatcccctatgttgttcaaagacggcatcagatttgaaccaaaggcttgccgcttatggatggggatgcgtccgattagcttgttggtgaggtaacggctcaccaaggcttcgatcggtaggggttctgagaggaaggccccccacataggaactgagacacggtcctaactcctacgggaggcagcagtgaggaatattggtcaatgggcgagagcctgaaccagccaagtagcgtgcaggacgacggccctatgggttgtaaactgcttttatgcggggataaccggcctcacgtgtgaggccctgcaggtaccgcatgaataaggaccggctaattccgtgccagcagccgcggtaatacggaaggtccgggcgttatccggatttattgggtttaaagggagcgtaggccgtgggttaagtgtgttgtgaaatccggttgctcaacatccggtttgcagcgcatactgtcccacttgagtgcgcacaacgcaggcggaattcgtcgtgtagcggtgaaatgcttagatatgacgaggaaccccgattgcgaaggcagcttgcgggagcgcaactgacgcttaagctcgaaggtgcgggtatcaaacaggattagataccctggtagtccgcacggtaaacgatggatgcccgctgtttgccctttttgggcatgcggccaagcgaaagcattaagcatcccacctggggagtacgccggcaacggtgaaactcaaaggaattgacgggggcccgcacaagcggaggaacatgtggtttaattcgatgatacgcgaggaaccttacccgggcttgaactgccagtgaacgatacagagatgttgaggcccttcggggcgctggtggaggtgctgcatggttgtcgtcagctcgtgccgtgaggtgtcggcttaagtgccataacgagcgcaacccttttccacagttgccatcaggtcatgctgggcactctgtggatactgccgccgcaaggtgtgaggaaggtggggatgacgtcaaatcagcacggcccttacgtccggggctacacacgtgttacaatggggggcacagcgtgccgtacgtgcgcaagcacgttccaatcatgaaatcccccctcagttcggactggggtctgcaacccgaccccacgaagctggattcgctagtaatcgcgcatcagccatggcgcggtgaatacgttcccgggccttgtacacaccgcccgtcaagccatgaaagccgggggtgcctgaagtccgtaaccgcaaggggcggcctagggcaagaccggtgattggggctaagtcgtaacaaggtagccgtaccggaaggtgcggctggaacacctcctttct

SEQ ID NO: 1486 - DNA, 1533 bp, Prevotella bivia
ttacaatggagagtttgatcctggctcaggatgaacgctagctataggcttaacacatgcaagtcgaggggcagcgaatagatagcttgctatttatgtcggcgaccggcgcacgggtgagtaacgcgtatccaacctacccataactaagggataacccagcgaaagttggactaataccttatgtattcgtttgatctcatgagattacgaataaagatttatcggttatggatggggatgcgtctgattagcttgttggcggggtaacggcccaccaaggcaacgatcagtaggggttctgagaggaaggtcccccacattggaactgagacacggtccaaactcctacgggaggcagcagtgaggaatattggtcaatggacgcaagtctgaaccagccaagtagcgtgcaggatgacggccctatgggttgtaaactgcttttatatggggataaagtggggaacgtgttcccttttgcaggtaccatatgaataaggaccggctaattccgtgccagcagccgcggtaatacggaaggttcgggcgttatccggatttattgggtttaaagggagcgtaggccgtttggtaagcgtgttgtgaaatgtagtagctcaacttctagattgcagcgcgaactgtcagacttgagtgcgcacaacgtaggcggaattcatggtgtagcggtgaaatgcttagatatcatgaagaactccgattgcgaaggcagcttacgggagcgcaactgacgctgaagctcgaaggtgcgggtatcgaacaggattagataccctggtagtccgcacagtaaacgatggatgcccgctgttagcacctagtgttagcggctaagcgaaagcattaagcatcccacctggggagtacgccggcaacggtgaaactcaaaggaattgacgggggcccgcacaagcggaggaacatgtggtttaattcgatgatacgcgaggaaccttacccgggcttgaattgcagatgaacgatttagagataatgaggtccttcgggacatctgtgaaggtgctgcatggttgtcgtcagctcgtgccgtgaggtgtcggcttaagtgccataacgagcgcaacccctttctttagttgccatcaggttctgctgggcactctggagatactgccaccgtaaggtgtgaggaaggtggggatgacgtcaaatcagcacggcccttacgtccggggctacacacgtgttacaatgggtggtacagatagttggtcgtgtgcaaatacgatctaatccttaaaaccattctcagttcggactggggtctgcaacccgaccccacgaagctggattcgctagtaatcgcgcatcagccatggcgcggtgaatacgttcccgggccttgtacacaccgcccgtcaagccatgaaagccgggggtgcctgaagttcgtgaccgtaaggatcgacctagggcaaaactggtaattggggctaagtcgtaacaaggtagccgtaccggaaggtgcggctggaacacctcctttct

SEQ ID NO: 1487 - DNA, 1493 bp, Prevotella brevis
agagtttgatcctggctcaggatgaacgctagctacaggcttaacacatgcaagtcgaggggcatcatttcgaaagcttgcttttgaagatggcgaccggcgcacgggtgagtaacgcgtatccaaccttccccttagtagggcatagcccggcgaaagtcggattaataccctatgttctttayggatggcatctgaaataaagcaaagatttatcgctaagggatggggatgcgtctgattaggttgttggcggggtaacggcccaccaagcctacgatcagtaggggttctgagaggaaggtcccccacattggtactgagacacggaccaaactcctacgggaggcagcagtgaggaatattggtcaatgggcgagagcctgaaccagccaagtagcgtgcaggatgacggccctatgggttgtaaactgcttttgtcaggggataaaaaagrraacgtgttyyctattgcatgtacctgaagaataaggaccggctaattccgtgccagcagccgcggtaatacggaaggtccaggcgttatccggatttattgggtttaaagggagcgcaggctggagattaagcgtgacgtgaaatgccgcggctcaaccgtggaagtgcgtcgcgaactggtttccttgagtgtattcgacgtcagcggaattcgtggtgtagcggtgaaatgcttagatatcacgaagaactccgattgcgaaggcagctggcgaggctataactgacgctaaagctcgaaggtgcgggtatcgaacaggattagataccctggtagtccgcacggtaaacgatggatgcccgctgttggcgatatacggtcagcggccaagcgaaagcgttaagcatcccacctggggagtacgccggcaacggtgaaactcaaaggawttgacsggggcccgcacaagcggasgaacatgtggtttaattcgatgatacgcgaggaaccttacccgggcttgaactgcaggcgaacgattcagagatgatgaggcccttcggggcgcctgtggakgtgctgcatggttgtcgtcagctcgtgccgtgaggtgtcggcttaagtgccataacgagcgcaacccctctcttcagttgccatcaggtgawgctgggcactctggagacactgccaccgtaaggtgtgaggaaggtggggatgacgtcaaatcagcacggcccttacgtccggggctacacacgtgttacaatgggaggtacagagagacggtgtcyygcaarrtgcatcaaatccttaaagccttcctcagttcggattggggtctgcaacccgaccccatgaagctggattcgctagtaatcgcgcatcagccatggcgcggtgaatacgttcccgggccttgtacacaccgcccgtcaagccatgaaagccgggggcgcttgaagtccgtgaccgcaaggatcggcctagagcgaaactggtaattggggctaagtcgtaacaaggtagccgt

SEQ ID NO: 1488 - DNA, 1537 bp, Prevotella buccae
ttacaatggagagtttgatcctggctcaggatgaacgctggctacaggcttaacacatgcaagtcgaggggcagcatgccggttgcttgcaaccggtgatggcgaccggcgcacgggtgagtaacgcgtatccaaccttcccgcgaccaagggataacctgccgaaaggcagactaataccttatgtcctcctttgaaggcatctgacgaggagcaaagatccgtcggtcacggatggggatgcgtccgattagcttgttggcggggcaacggcccaccaaggcatcgatcggtaggggttctgagaggaaggccccccacactggaactgagacacggtccagactcctacgggaggcagcagtgaggaatattggtcaatgggcggaagcctgaaccagccaagtagcgtgcaggacgacggccctacgggttgtaaactgcttttatgcggggataaagttgcccacgcgtgggtttttgcaggtaccgcatgaataaggaccggctaattccgtgccagcagccgcggtaatacggaaggtccgggcgttatccggatttattgggtttaaagggagcgcaggccgccgtgcaagcgtgccgtgaaaagcagcggcccaaccgctgccctgcggcgcgaactgcttggcttgagtgcgccggaagcgggcggaattcgtggtgtagcggtgaaatgcttagatatcacgaagaaccccgattgcgaaggcagcccgctgtggcgccactgacgctgaggctcgaaggtgcgggtatcgaacaggattagataccctggtagtccgcacggtaaacgatggatacccgctgtccggcccgtacggtctgggcggccaagcgaaagcgttaagtatcccacctggggagtacgccggcaacggtgaaactcaaaggaattgacgggggcccgcacaagcggaggaacatgtggtttaattcgatgatacgcgaggaaccttacccgggcttgaattgcaggagaatgattcagagatgatgaagtccctcgggactcctgtgaaggtgctgcatggttgtcgtcagctcgtgccgtgaggtgtcggctcaagtgccataacgagcgcaacccctctccgcagttgccatcgggtgatgccgggcactctgcggacactgccgccgcaaggtgcgaggaaggtggggatgacgtcaaatcagcacggcccttacgtccggggccacacacgtgttacaatggccggtacagagggctgtccgcgcgcaagtgcgggtgaatcccctaaatccggtcccagttcggactggggtctgcaacccgaccccacgaagctggattcgctagtaatcgcgcatcagccatggcgcggtgaatacgttcccgggccttgtacacaccgcccgtcaagccatgaaagccgggggtgcctgaagtccgtgaccgcgagggtcggcctagggcaaaaccggtgattggggctaagtcgtaacaaggtagccgtaccggaaggtgcggctggaacacctcctttct

SEQ ID NO: 1489 - DNA, 1264 bp, Prevotella buccalis
ggctcaggatgaacgctagctacaggcttaacacatgcaagtcgcaggactggcgcacgggtgagtaacgcgtatccaaccttcccatgaccacgggataacccgttgaaagacggactaataccgtatgactaaagcggtgatggatggggatgcgtctgattagcttgttggcggggtaacggcccaccaaggcgacgatcagtaggggttctgagaggaaggtcccccacattggaactgagacacggtccaaactcctacgggaggcagcagtgaggaatattggtcaatgggcgagagcctgaaccagccaagtagcgtgcaggatgacggcctatgggttgtaaactgcttttatgcggggatatgcaggtaccgcatgaataaggaccggctaattccgtgccagcagccgcggtaatacggaaggtccgggcgttatccggatttattgggtttaaagggagcgtaggccgccaggtaagcgtgttgtgaaatgtaccggctcaaccggtgaattgcagcgcgaactgtctggcttgagtgcacggtaagcaggcggaattcatggtgtagcggtgaaatgcttagatatcatgaagaactccgattgcgaaggcagcttgctgcagtgactgacgctgatgctcgaaggtgcgggtatcaaacaggattagataccctggtagtccgcacggtaaacgatggatgcccgctgtccgccggcgggtggccaagcgaaagcgttaagcatcccacctggggagtacgccggcaacggtgaaactcaaaggaattgacgggggcccgcacaagcggaggaacatgtggtttaattcgatgatacgcgaggaaccttacccgggcttgaactgtggaggtgctgcatggttgtcgtcagctcgtgccgtgaggtgtcggcttaagtgccataacgagcgcaaccccttttttcagttgccatcagctgggcactctggagatactgccaccgcaaggtggaggaaggtggggatgacgtcaaatcagcacggcccttacgtccggggctacacacgtgttacaatggggcacagagtgttggcttaacgcaagtttggtctaatcttctgtctcccagttcggatggggtctgcaacccgaccccagaagctggattcgctagtaatcgcgcatcagccatggcgcggtgaatacgttcccrggccttgtacacaccgcccgtcaagccatgaaagccgggggtgcctgaagtccgtag

SEQ ID NO: 1490 - DNA, 862 bp, Prevotella copri
  modified_base (185)..(185): a, c, t, g, unknown or other
  modified_base (637)..(637): a, c, t, g, unknown or other
  modified_base (836)..(836): a, c, t, g, unknown or other
cgtatccaacctgcccaccacttggggataaccttgcgaaagtaagactaatacccaatgacgtctctagaagacatctgaaagagattaaagatttatcggtgatggatggggatgcgtctgattagcttgttggcggggtaacggcccaccaaggcaacgatcagtaggggttctgagagganggtcccccacattggaactgagacacggtccaaactcctacgggaggcagcagtgaggaatattggtcaatggacgagagcctgaaccagccaagtagcgtgcaggatgacggccctatgggttgtaaactgcttttataagggaataaagtgagtctcgtgagactttttgcatgtaccttatgaataaggaccggctaattccgtgccagcagccgcggtaatacggaaggtccgggcgttatccggatttattgggtttaaagggagcgtaggccggagattaagcgtgttgtgaaatgtagacgctcaacgtctgcactgcagcgcgaactggtttccttgagtacgcacaaagtgggcggaattcgtggtgtagcggtgaaatgcttagatatcacgaagaactccgattgcgaaggcagctcactggagcgcaactgacgctgaanctcgaaagtgcgggtatcgaacaggattagataccctggtagtccgcacggtaaacgatggatgcccgctgttggtctgaataggtcagcggccaagcgaaagcattaagcatcccacctggggagtacgccggcaacggtgaaactcaaaggaattgacgggggcccgcacaagcggaggaacatgtggtttaattcnatgatacgcgaggaaccttacccggg

SEQ ID NO: 1491 - DNA, 1473 bp, Prevotella corporis
  modified_base (32)..(32): a, c, t, g, unknown or other
  modified_base (444)..(444): a, c, t, g, unknown or other
  modified_base (480)..(480): a, c, t, g, unknown or other
  modified_base (879)..(879): a, c, t, g, unknown or other
  modified_base (1024)..(1024): a, c, t, g, unknown or other
  modified_base (1114)..(1115): a, c, t, g, unknown or other
  modified_base (1420)..(1420): a, c, t, g, unknown or other
tacaatggagagtttgatcctggctcaggatnaacgctagctacaggcttaacacatgcaagtcgaggggaaacggcattaagtgcttgcactttttggacgtcgaccggcgcacgggtgagtaacgcgtatccaacctgccccttaccagggaataacccgttgaaagacggactaatgccctatggagtcctttgacggcatcagattaggactaaagattcatcggtatgggatggggatgcgtctgattagcttgttggcggggtaacggcccaccaaggcatcgatcagtaggggttctgagaggaaggtcccccacataggaactgagacacggtcctaactcctacgggaggcagcagtgaggaatattggtcaatgggcgctagcctgaaccagccaagtagcgtgcaggatgacggccctatgggttgtaaactncttttatgcggggataaagtcacccacgtgtgggtntttgcaggtaccgcatgaataaggaccggctaattccgtgccagcagccgcggtaatacggaaggtccgggcgttatccggatttattgggtttaaagggagtgtaggcggcctgttaagcgtgttgtgaaatgtagatgctcaacatctgaactgcagcgcgaactggctggcttgagtacacgcaacgtgggcggaattcatggtgtagcggtgaaatgcttagatatcatgaggaactcctattgcgaaggcagctcacgggagtgtcactgacgcttaagctcgaaggtgcgggtatcaaacaggattagataccctggtagtccgcacggtaaacgatggatgcccgctgttggcgctttgcgtcagcggctaagcgaaagcattaagcatccnacctggggagtacgccggcaacggtgaaactcaaaggaattgacgggggcccgcacaagcggaggaacatgtggtttaattcgatgatacgcgaggaaccttacccgggcttgaattgcagaggaaagatccagagatggtgatncccttcggggtctctgtgaaggtgctgcatggttgtcgtcagctcgtgccgtgaggtgtcggcttaagtgccataacgagcgcaaccccnntttccggttgccatcaggtgatgctgggcactccggggacactgccaccgtaaggtgtgaggaaggtggggatgacgtcaaatcagcacggcccttacgtccggggctacacacgtgttacaatggccggtacagagggcaggtgcaatgcaaattgcatcaaatctataaatccggtctcagttcggactggggtctgcaacccgaccccacgaagctggattcgctagtaatcgcgcatcagccatggcgcggtgaatacgttcccgggccttgtacacaccgcccgtcaagccatgaaagcngggggtgcctgaagttcgtaaccgcaaggagcgacctagggcaaaactggtga

SEQ ID NO: 1492 - DNA, 1483 bp, Prevotella dentalis
tggctcaggatgaacgctggctacaggcttaacacatgcaagtcgaggggcagcatggcggatgcttgcatctgccgatggcgaccggcgcacgggtgagtaacgcgtatccaacctaccttcaagcaggggacaatccgtagaaatgcggtctgataccctatgtattccaacgaggtcctccgtgttggaagaaaggtttatccgcttgttgatggggatgcgtccgattagcttgttggcggggcaacggcccaccaaggcaacgatcggtaggggttctgagaggaaggtcccccacactggaactgagacacggtccagactcctacgggaggcagcagtgaggaatattggtcaatgggcgtaagcctgaaccagccaagtagcgtgcaggatgacggccctatgggttgtaaactgcttttatacggggataaagtgcgccacgtgtggtgttttgcaggtaccgtatgaataaggaccggctaattccgtgccagcagccgcggtaatacggaaggtccgggcgttatccggatttattgggtttaaagggagcgtaggccgcatgtcaagcgtgttgtgaaatgcaggtgctcaacacctggattgcagcgcgaactgtcgtgcttgagtgtgcgcaacgttggcggaattcgtcgtgtagcggtgaaatgcttagatatgacgaggaaccccgattgcgaaggcagctgacgggagcataactgacgctgaagctcgaaggtgcgggtatcgaacaggattagataccctggtagtccgcacggtaaacgatggatgcccgccgtccgcccttttattgggcgtgtggccaagcgaaagcattaagcatcccacctggggagtacgccggcaacggtgaaactcaaaggaattgacgggggcccgcacaagcggaggaacatgtggtttaattcgatgatacgcgaggaaccttacccgggcttgaattgcagaggaacgatccagagatggtgaggcccttcggggcttctgcgaaggtgctgcatggttgtcgtcagctcgtgccgtgaggtgtcggctcaagtgccataacgagcgcaacccctctccgcagttgccatcgggtcatgccgggcactctgtggacactgccgccgcaaggtgtgaggaaggtggggatgacgtcaaatcagcacggcccttacgtccggggctacacacgtgttacaatggggggcacagcaagccggccgcgtgcaaacgcggtccaatcctgaaatcccccctcagttcggactggggtctgcaacccgaccccacgaagctggattcgctagtaatcgcgcatcagccatggcgcggtgaatacgttcccgggccttgtacacaccgcccgtcaagccatgaaagccgggggtgcctgaagtccgtgaccggaaggatcggcctagggcaaaactggtgattggggctaagtcgtaacaaggtaacc

SEQ ID NO: 1493 - DNA, 1535 bp, Prevotella denticola
ttacagtggagagtttgatcctggctcaggatgaacgctggctacaggcttaacacatgcaagtcgaggggaaacggcattgagtgcttgcactgaatggacgtcgaccggcgcacgggtgagtaacgcgtatccaaccttcccgttactgcgggataacctgccgaaaggcagactaataccgcatgttcttcgatgacggcatcagattcgaagcaaagatccgtcggtaacggagggggatgcgtctgattagctagttggcggggcgacggcccaccaaggcgacgatcagtaggggttctgagaggaaggtcccccacattggaactgagacacggtccaaactcctacgggaggcagcagtgaggaatattggtcaatgggcggaagcctgaaccagccaagtagcgtgcaggatgacggccctacgggttgtaaactgcttttatgcggggataaagtgagggacgcgtccctttttgcaggtaccgcatgaataaggaccggctaattccgtgccagcagccgcggtaatacggaaggtccgggcgttatccggatttattgggtttaaagggagcgtaggccggggattaagtgtgttgtgaaatgtaggcgcccaacgtctgacttgcagcgcatactggttcccttgagtacgcgcaacgccggcggaattcgtcgtgtagcggtgaaatgcttagatatgacgaagaaccccgattgcgaaggcagccggcgggagcgcaactgacgctgaagctcgaaggtgcgggtatcgaacaggattagataccctggtagtccgcacggtaaacgatggatgcccgctgtcggcgccttgcgccggcggccaagcgaaagcgttaagcatcccacctggggagtacgccggcaacggtgaaactcaaaggaattgacgggggcccgcacaagcggaggaacatgtggtttaattcgatgatacgcgaggaaccttacccgggcttgaatcgcaggagaacgatacagagatgttgaggtccttcgggactcctgcgaaggtgctgcatggttgtcgtcagctcgtgccgtgaggtgtcggcttaagtgccataacgagcgcaacccctctccccagttgccatcgggtgatgccgggcactccggggacactgccgccgcaaggtgcgaggaaggcggggatgacgtcaaatcagcacggcccttacgtccggggctacacacgtgttacaatggccggcacagagtgccggtgcggcgcgagccgcatccaatcttgaaaaccggtctcagttcggactggggtctgcaacccgaccccacgaagctggattcgctagtaatcgcgcatcagccacggcgcggtgaatacgttcccgggccttgtacacaccgcccgtcaagccatgaaagccgggagtgcctgaagtccgtgaccgcgaggatcggcctagggcaaaactggtgattggggctaagtcgtaacaaggtagccgtaccggaaggtgcggctggaacacctcctttct

SEQ ID NO: 1494 - DNA, 1535 bp, Prevotella disiens
ttacaatggagagtttgatcctggctcaggatgaacgctagctataggcttaacacatgcaagtcgaggggaaacggcagagagtgcttgcacactttggacgtcgaccggcgcacgggtgagtaacgcgtatccaacctgccctttacttggggataacccgttgaaagacggactaatacccaatgatattcattgatgacatctgatttgaattaaagatttatcggtataggatggggatgcgtctgattagcttgttggtgaggtaacggctcaccaaggccacgatcagtaggggttctgagaggaaggtcccccacattggaactgagacacggtccaaactcctacgggaggcagcagtgaggaatattggtcaatggacgagagtctgaaccagccaagtagcgtgcaggatgacggccctatgggttgtaaactgcttttgtttgggaataatcgacattacgtgtaatgttttgcatgtaccattcgaataaggaccggctaattccgtgccagcagccgcggtaatacggaaggtccaggcgttatccggatttattgggtttaaagggagtgtaggcggttggttaagcgtgttgtgaaatgtagatgctcaacatctgacttgcagcgcgaactggctgacttgagtacacacaacgtaggcggaattcatggtgtagcggtgaaatgcttagatatcatgaagaactccgattgcgaaggcagcttacgggagtgttactgacgcttaagctcgaaggtgcgggtatcgaacaggattagataccctggtagtccgcacagtaaacgatggatgcccgctgttagcacctggtgttagcggctaagcgaaagcattaagcatcccacctggggagtacgccggcaacggtgaaactcaaaggaattgacgggggcccgcacaagcggaggaacatgtggtttaattcgatgatacgcgaggaaccttacccgggcttgaattgtaggagcacgatacagagatgttgaggtccttcgggactcctatgaaggtgctgcatggttgtcgtcagctcgtgccgtgaggtgtcggcttaagtgccataacgagcgcaacccctttccttagttgccatcaggtaatgctgggcactctgaggatactgccaccgtaaggtgtgaggaaggtggggatgacgtcaaatcagcacggcccttacgtccggggctacacacgtgttacaatggccggtacagaatgttggttgcatgtaaatgtaatctaatctttaaagccggtcccagttcggactgaggtctgcaacccgacctcacgaagctggattcgctagtaatcgcgcatcagccatggcgcggtgaatacgttcccgggccttgtacacaccgcccgtcaagccatgaaagccgggggtgcctgaagttcgtaaccgcaaggagcgacctagggcaaaactggtaattggggctaagtcgtaacaaggtagccgtaccggaaggtgcggctggaacacctcctttct

SEQ ID NO: 1495 - DNA, 1310 bp, Prevotella sp.
  C1
gatgaacgctagctacaggcttaacacatgcaagtcgcgggaccggcgcacgggtgagtaacgcgtatccaacctgcccttcaccacgggataacccggcgaaagtcggactaataccgtatgttgaaaggcggtgagggatggggatgcgtccgattagcttgacggcggggtaacggcccaccgtggcgacgatcggtaggggttctgagaggaaggtcccccacactggaactgagacacggtccagactcctacgggaggcagcagtgaggaatattggtcaatgggcggaagcctgaaccagccaagtagcgtgcaggatgacggcctatgggttgtaaactgcttttatgcggggatatgcaggtaccgcatgaataaggaccggctaattccgtgccagcagccgcggtaatacggaaggtccgggcgttatccggatttattgggtttaaagggagcgtaggccgccccttaagcgtgttgtgaaatgcgggtgctcaacatccgacttgcagcgcgaactggggggcttgagtgcgccgaaagtaggcggaattcgtggtgtagcggtgaaatgcttagatatcacgaagaactccgattgcgaaggcagcttactgtagtgactgacgctgatgctcgaaagcgtgggtatcgaacaggattagataccctggtagtccacgcggtaaacgatggatgctcgttgtcggccggtcggtgaccaagcgaaagcgttaagcatcccacctggggagtacgccggcaacggtgaaactcaaaggaattgacgggggcccgcacaagcggaggaacatgtggtttaattcgatgatacgcgaggaaccttacccgggcttgaactgcggaggtgctgcatggttgtcgtcagctcgtgccgtgaggtgtcggcttaagtgccataacgagcgcaacccccgtcttcagttgccatcggccgggcactctggagatactgccaccgcaaggtggaggaaggtggggatgacgtcaaatcagcacggcccttacgtccggggctacacacgtgttacaatggcgcacagagagtcggtggcatgcgagtgccatccaatcctttgcgtctcagttcggatggggtctgcaacccgaccccagaagctggattcgctagtaatcgcgcatcagccatggcgcggtgaatacgttcccgggccttgtacacaccgcccgtcaagccatgaaagccgggggcgcctgaagtccgtgtcggcctagggtgaaaccggtgattggggctaagtcgtaacaaggtagccgta

SEQ ID NO: 1496 - DNA, 1318 bp, Prevotella sp.
  C2
gatgaacgctagctacaggcttaacacatgcaagtcgagggaccggcgcacgggtgagtaacgcgtatccaaccttcccataactaaggaataccccgtagaaatgcggcctaatcccttatggttaaagtcggttatggatggggatgcgtctgattagcttgctggcggggtaacggcccaccagggcatcgatcagtaggggttctgagaggaaggtcccccacattggaactgagacacggtccaaactcctacgggaggcagcagtgaggaatattggtcaatgggcgagagcctgaaccagccaagtagcgtgcaggatgacggcctatgggttgtaaactgctttttaaggggaatatgcatgtacccttagaataaggaccggctaattccgtgccagcagccgcggtaatacggaaggtccaggtgttatccggatttattgggtttaaagggagcgtaggccgcaggttaagtgtgttgtgaaaagcagtcgcccaacgtctgccttgcagcgcaaactgtcctgcttgagtgcgcacaacgcaggcggaatccgtcgtgtagcggtgaaatgcttagatatgacgaagaactccgattgcgaaggcagcttgcgggagcgactgacgctgaagctcgaaagtgcgggtatcgaacaggattagataccctggtagtccgcacggtaaacgctggatgcccgtttttggctagtcagagaccaagcgaaagcattaagcatcccacctggggagtacgccggcaacggtgaaactcaaaggaattgacgggggcccgcacaagcggaggaacatgtggtttaattcgatgatacgcgaggaaccttacccgggcttgaattgtgaaggtgctgcatggttgtcgtcagctcgtgccgtgaggtgtcggcttaagtgccataacgagcgcaacccctttcttcagttgccatcggccgggcactctgtagatactgccgccgtaaggtggaggaaggtggggatgacgtcaaatcagcacggcccttacgtccggggctacacacgtgttacaatggggggcagcgagcgggatgccgcaaggtcattcaaatcaacccccctcagttcggatggggtctgcaacccgaccccagaagctggattcgctagtaatcgcgcatcagccatggcgcggtgaatacgttcccgggccttgtacacaccgcccgtcaagccatgaaagccgggggtgcctgaagtccgttcggcctagggcaaaactggtaattggggctaagtcgtaacaaggtagccgtaccggaaggtgc

SEQ ID NO: 1497 - DNA, 1286 bp, Prevotella sp.
  P7 oral clone MB2_P31
gatgaacgctggctacaggcttaacacatgcaagtcgagggaccggcgcacgggtgagtaacgcgtatccaaccttcccgtcactgcgggataacctgccgaaaggcagactaataccgcatggctaaaggcggtgacggacggggatgcgtctgattagctggttggcggggcgacggcccaccaaggctacgatcagtaggggttctgagaggaaggtcccccacattggaactgagacacggtccaaactcctacgggaggcagcagtgaggaatattggtcaatgggcgcaagcctgaaccagccaagtagcgtgcaggacgacggcctatgggttgtaaactgcttttgtacggggatatgcaggtaccgtacgaataaggaccggctaattccgtgccagcagccgcggtaatacggaaggtccgggcgttatccggatttattgggtttaaagggagcgtaggccggggattaagtgtgttgtgaaatgtagacgctcaacgtctgacttgcagcgcatactggttcccttgagtacgcacaacgttggcggaattcgtcgtgtagcggtgaaatgcttagatatgacgaagaactccgattgcgaaggcagctgacgggggcgactgacgcttaagctcgaaggtgcgggtatcgaacaggattagataccctgctagtccgcacggtaaacgatggatgcccgctgttggtatatcagcggctaagcgaaagcattaagcatcccacctggggagtacgccggcaacggtggaactcaaaggaattgacgggggcccgcacaagcggaggaacatgtggtttaattcgatgatacgcgaggaaccttacccgggcttgaattgtgaaggtgctgcatggttgtcgtcagctcgtgccgtgaggtgtcggcttaagtgccataacgagcgcaacccctctcttcagttgccatcagctgggcactctggagacactgccaccgtaaggtggaggaaggtggggatgacgtcaaatcagcacggcccttacgtccggggctacacacgtgttacaatggccggcagagggacggtgcaacgcaagttgcatccaatcttgccggtcccagttcggatggggtctgcaacccgaccccagaagctggattcgctagtaatcgcgcatcagccatggcgcggtgaatacgttcccgggccttgtacacaccgcccgtcaagccatgaaagccgggggtgcctgaagtccgttcggcctagggcaaaactggtgattggggc

SEQ ID NO: 1498 - DNA, 1287 bp, Prevotella sp.
  P8 oral clone MB3_P13
gatgaacgctggctacaggcttaacacatgcaagtcgagggaccggcgaatgggtgagtaacgcgtatccaacctgcccccggccggggtataacccgtcgaaaggcggcctaatcccccatgccgaaagccggccggggatggggatgcgtccgattagcttgctggcggggtaacggcccaccagggcttcgatcggtaggggttctgagaggaaggtcccccacactggtactgagacacggaccagactcctacgggaggcagcagtgaggaatattggtcaatgggcgcaagcctgaaccagccaagtagcgtgcgggatgaaggcctatgggtcgtaaaccgctttttcacggggatatgcaggtaccgtgcgaataaggaccggctaattccgtgccagcggccgcggtaatacggaaggtcctggcgttatccggatttattgggtttaaagggagcgcaggccgccccttaagcgtgttgtgaaaaccgggcgcccaacgcccggcgtgcagcgcgaactggggggcttgagtgcgcgcgacgccggcggaattcgtcgtgtagcggtgaaatgcttagatatgacgaggaaccccgattgcgaaggcagccggcgagggcgactgacgctgatgctcgaaggcgcgggtatcgaacaggattagataccatggtagtccgcgctgtaaacgatggatgcccgccgccggcatgtcggcggccaagcgaaagcgttaagcatcccacctggggagtacgccggcaacggtgaaactcaaaggaattgacgggggcccgcacaagcggaggaacatgtggtttaattcgatgatacgcgaggaaccttacccgggcttgaactgcggaggtgctgcatggttgtcgtcagctcgtgccgtgaggtgtcggctcaagtgccataacgagcgcaacccctctccgcagttgccatcggccgggcactctgcggacactgccgccgcaaggtggaggaaggtggggacgacgtcaaatcagcacggcccttacgtccggggctacacacgtgttacaatggccggcagagagccgtccgggcgcgagcccggtccaatccctccggcctcagttcggatggggtctgcaacccgaccccagaagctggattcgctagtaatcgcgcatcagccatggcgcggtgaatacgttcccgggccttgtacacaccgcccgtcaagccatgaaagccgggggcgcctgaagtccgtgtcggcctagggcgataccggtgattggggc

SEQ ID NO: 1499 - DNA, 1282 bp, Prevotella sp.
  P9 oral clone MB7_G16
gatgaacgctagctacaggcttaacacatgcaagtcgagggaccggcgcacgggtgagtaacgcgtatccaaccttcccgctgcagggggataacccggtgaaagccggactaataccccataatcaaagcggcagcggatggggatgcgtccgattagttagttggtgaggtaacggctcaccaaggctttgatcggtaggggttctgagaggaaggccccccacattgggactgagacacggcccaaactcctacgggaggcagcagtgaggaatattggtcaatgggcgcaagcctgaaccagccaagtagcgtggaggacgactgcctatgggttgtaaactccttttatgcggggatatgcaggtaccgcatgaataaggaccggctaattccgtgccagcagccgcggtaatacggaaggtccgggcgttatccggatttattgggtttaaagggagcgcagactgcttgtcaagcgtgcagtgaaacgccgtggcccaaccacggtcctgctgcgcgaactggcttgcttgagtgggaggtacgcggaattcgtggtgtagcggtgaaatgcttagatatcacgaggaactccgattgtgaaggcagcgtaccatatccactgacgtttaggctcgaaggtgcgggtatcgaacaggattagataccctggtagtccgcacagtaaaccatggatgctcgctgtcggcgtgccggtggcctagcgaaagcgttaagcatcccacctggggagtacgccggcaacggtgaaactcaaaggaattgacgggggcccgcacaagcggaggaacatgtggtttaattcgatgatacgcgaggaaccttacccgggcttgaattgtgaaggtgctgcatggttgtcgtcagctcgtgccgtgaggtgtcggcttaagtgccataacgagcgcaacccctctgcgtagttgccatcggccgggcactctgcgcacactgccaccgcaaggtggaggaaggtggggatgacgtcaaatcagcacggcccttacgtccggggctacacacgtgttacaatggcaggcagcgagtcgggagcatgcaaatgttctccaatcccccctgcctcagttcggatggggtctgcaacccgaccccagaagctggatccgctagtaatcgcgcatcagccatggcgcggtgaatacgttcccgggccttgtacacaccgcccgtcaagccatgaaagccgggggcgcctgaagtccgtgtcggcctagggcgagaccggtgattggggc

SEQ ID NO: 1500 - DNA, 1502 bp, Prevotella heparinolytica
gagtttgatcctggctcaggatgaacgctagctacaggcttaacacatgcaagtcgaggggcagcatgggcttagcttgctaagcccgatggcgaccggcgcacgggtgagtaacacgtatccaaccttccggtaactccggtatagcctttcgaaagaaagattaatcccggatagtatggtgattccgcatggtttctccattaaaggattccggttaccgatggggatgcgttccattaggcagttggcggggtaacggcccaccaaacctacgatggataggggttctgagaggaaggtcccccacattggaactgagacacggtccaaactcctacgggaggcagcagtgaggaatattggtcaatgggcggaagcctgaaccagccaagtagcgtgaaggatgactgccctatgggttgtaaacttcttttataagggaataattgtgggtacgcgtacccatttgcatgtaccttatgaataaggatcggctaactccgtgccagcagccgcggtaatacggaggatccgagcgttatccggatttattgggtttaaagggagcgtaggcgggcgcttaagtcagctgtgaaagtttggggctcaaccttaaaattgcagttgatactgggtgccttgagtgcagtataggcaggcggaattcgtggtgtagcggtgaaatgcttagatatcacgaagaactcctattgcgaaggcagcttgctggagtgtaactgacgctgatgctcgaaagtgtgggtatcaaacaggattagataccctggtagtccacacagtaaacgatgaatactcgctgtttgcgatatactgcaagcggccaagcgaaagcgttaagtattccacctggggagtacgccggcaacggtgaaactcaaaggaattgacgggggcccgcacaagcggaggaacatgtggtttaattcgatgatacgcgaggaaccttacccgggcttgaattgcaaccgaattatccggaaacgggtaagccgcaaggcggttgtgaaggtgctgcatggttgtcgtcagctcgtgccgtgaggtgtcggcttaagtgccataacgagcgcaacccttatccacagttaccatcaggtgatgctggggactctgtggagactgccgtcgtaagatgcgaggaagggggggatgacgtcaaatcagcacggcccttacgtccggggctacacacgtgttacaatggggggtacagcaggcagctcggcggcgacgcccggccaatccctaaatcccctctcagttcggactggagtctgcaacccgactccacgaagctggattcgctagtaatcgcgcatcagccacggcgcggtgaatacgttcccgggccttgtacacaccgcccgtcaagccatgaaagccgggggtacctgaagtgcgtaaccgtccaggagcgccctagggtaaaaccggtgattggggctaagtcgtaacaaggtagccgtaccggaaggtgc

SEQ ID NO: 1501 - DNA, 1266 bp, Prevotella histicola
ggctcaggatgaacgctagctacaggcttaacacatgcaagtcgagggaccggcgcacgggtgagtaacgcgtatccaaccttcccatgactaagggataacctgccgaaaggcagactaataccttatrgttaaagtcggttatggatggggatgcgtctgattagcttgttggcggggtaacggcccaccaaggcracgatcagtaggggttctgagaggaaggtcccccacattggaactgagacacggtccaaactcctacgggaggcagcagtgaggaatattggtcaatgggcgagagcctgaaccagccaagtagcgtgcaggatgacggcctatgggttgtaaactgcttttgtatggggatatgcaggtaccatacgaataaggaccggctaattccgtgccagcagccgcggtaatacggaaggtccgggcgttatccggatttattgggtttaaagggagcgtaggctggagattaagtgtgttgtgaaatgtagacgctcaacgtctgacttgcagcgcatactggtttccttgagtacgcacaacgttggcggaattcgtcgtgtagcggtgaaatgcttagatatgacgaagaactccgattgcgaaggcagctgacgggagcgactgacgctgaagctcgaaggtgcgggtatcgaacaggattagataccctggtagtccgcacagtaaacgatggatgcccgctgttggtatatcagcggctaagcgaaagcattaagcatcccacctggggagtacgccggcaacggtgaaactcaaaggaattgacgggggcccgcacaagcggaggaacatgtggtttaattcgatgatacgcgaggaaccttacccgggcttgaattgtgaaggtgctgcatggttgtcgtcagctcgtgccgtgaggtgtcggcttaagtgccataacgagcgcaacccctgtctttagttgccatcagctgggcactctggagatactgccaccgtaaggtggaggaaggtggggatgacgtcaaatcagcacggcccttacgtccggggctacacacgtgttacaatggccggcagagggacggtgtaatgtaaattgcatccaatcttgccggtcccagttcggatggggtctgcaacccgaccccagaagctggattcgctagtaatcgcgcatcagccatggcgcggtgaatacgttcccgggccttgtacacaccgcccgtcaagccatgaaagccgggggtgcctgaagtccgtacc

SEQ ID NO: 1502 - DNA, 1364 bp, Prevotella intermedia
gatgaacgctagctataggcttaacacatgcaagtcgaggggaaacggcattatgtgcttgcacattctggacgtcgaccggcgcacgggtgagtatcgcgtatccaaccttccctccactcggggataccccgttgaaagacggcctaatacccgatgttgtccacatatggcatctgacgtggaccaaagattcatcggtggaggatggggatgcgtctgattagcttgttggtgcgggtaacggcccaccaaggcgacgatcagtaggggttctgagaggaaggtcccccacattggaactgagacacggtccaaactcctacgggaggcagcagtgaggaatattggtcaatggacggaagtctgaaccagccaagtagcgtgcaggattgacggccctatgggttgtaaactgcttttgttggggagtaaagtggggcacgcgtgcccttttgcatttacccttcgaataaggaccggctaattccgtgccagcagccgcggtaatacggaaggtccaggcgttatccggatttattgggtttaaagggagtgtaggcggtctgttaagcgtgttgtgaaatttaggtgctcaacatctaacttgcagcgcgaactggcggacttgagtgcacgcaacgtatgcggaattcatggtgtagcggtgaaatgcttagatatcatgacgaactccgattgcgaaggcagcgtacgggagtgttactgacgcttaagctcgaaggtgcgggtatcgaacaggattagataccctggtagtccgcacggtaaacgatggatgcccgctgttagcgcctggcgttagcggctaagcgaaagcattaagcatcccacctggggagtacgccggcaacggtgaaactcaaaggaattgacgggggcccgcacaagcggaggaacatgtggtttaattcgatgatacgcgaggaaccttacccgggcttgaattgcagacgcaggatacagagatgttgactcccttcggggcgtctgtgaaggtgctgcatggttgtcgtcagctcgtgccgtgaggtgtcggcttaagtgccataacgagcgcaacccctttccttagttgccatcaggtgatgctgggcactctggggatactgccaccgcaaggtgtgaggaaggtggggatgacgtcaaatcagcacggcccttacgtccggggctacacacgtgttacaatggccggtacagagggacggtgcgatgcaaatcgcatccaatcttgaaagccggtcccagttcggactgaggtctgcaacccgacctcacgaagctggattcgctagtaatcgcgcatcagccatggcgcggtgaatacgttcccgggcctt

SEQ ID NO: 1503 - DNA, 1200 bp, Prevotella loescheii
taacgcgtatccaacctgcccttcaccacgggataacccggcgaaagtcggactaataccgtatgttgaaagcggtgarggatggggatgcgtccgattagctkgacggcggggtaacggcccaccgtggctacgatcggtaggggttctgagaggaaggtcccccacactggaactgagacacggtccagactcctacgggaggcagcagtgaggaatattggtcaatgggcgtaagcctgaaccagccaagtagcgtgcaggatgacggcctatgggttgtaaactgcttttatgcggggatatgcaggtaccgcatgaataaggaccggctaattccgtgccagcagccgcggtaatacggaaggtccgggcgttatccggatttattgggtttaaagggagcgtaggccgcgccttaagcgtgttgtgaaatccgggtgctcaacatccggcttgcagcgcgaactggggcgcttgagtgcgcwgaaagtaggcggaattcgtggtgtagcggtgaaatgcttagatatcacgaggaactccgattgcgaaggcagcctactgtagcgactgacgctgatgctcgaaagcgtgggtatcgaacaggattagataccctggtagtccacgcggtaaacgatggatgctcgttgtcggccggtcggtgaccaagcgaaagcgttaagcatcccacctggggagtacgccggcaacggtgaaactcaaaggaattgacgggggcccgcacaagcggaggaacatgtggtttaattcgatgatacgcgaggaaccttacccgggcttgaactgcggaggtgctgcatggttgtcgtcagctcgtgccgtgaggtgtcggcttaagtgccataacgagcgcaacccccgtcttcagttgccatcggccgggcactctggagatactgccaccgcaaggtggaggaaggtggggatgacgtcaaatcagcacggcccttacgtccggggctacacacgtgttacaatggcgcacagagagtcggtggcatgcgaatgccatccaatcctctgcgtctcagttcggatggggtctgcaacccgaccccagaagctggattcgctagtaatcgcgcatcagccatggcgcggtgaatacgttcccgggccttgtacacaccgcccgtcaagccatgaaagccgggggcgcctgaagtccgtacc

SEQ ID NO: 1504 - DNA, 1520 bp, Prevotella maculosa
agagtttgatcctggctcaggatgaacgctagctacaggcttaacacatgcaagtcgaggggaaacgatgagagagcttgctctcttaggtgtcgaccggcgcacgggtgagtaacgcgtatccaacctgcctctgaccaagggataacccgtcgaaagtcggactaataccttatgcagtcgtcggaagtcatctgatgacgacgaaagatttcatcggtgagggatggggatgcgtctgattagcttgttggcggggtaacggcccaccaaggcaacgatcagtaggggttctgagaggaaggtcccccacattggaactgagacacggtccaaactcctacgggaggcagcagtgaggaatattggtcaatgggcgcgagcctgaaccagccaagtagcgtgcaggatgacggccctatgggttgtaaactgcttttatgcggggataaagtgagggacgtgtccttcattgcaggtaccgcatgaataaggaccggctaattccgtgccagcagccgcggtaatacggaaggtccgggcgttatccggatttattgggtttaaagggagcgtaggccgtggattaagcgtgttgtgaaatgtagacgctcaacgtctgacttgcagcgcgaactggtccacttgagtgtgcacaacgcaggcggaattcgtcgtgtagcggtgaaatgcttagatatgacgaagaaccccgattgcgaaggcagcttgcgggagcacgactgacgctgaagctcgaaagtgcgggtatcgaacaggattagataccctggtagtccgcacggtaaacgatggatgcccgttgtcaggctgtatcagtctggtgaccaagcgaaagcattaagcatcccacctggggagtacgccggcaacggtgaaactcaaaggaattgacgggggcccgcacaagcggaggaacatgtggtttaattcgatgatacgcgaggaaccttacccgggcttgaattgcagacgaacgattcagagatgaagaggcccttcggggcgtctgtgaaggtgctgcatggttgtcgtcagctcgtgccgtgaggtgtcggcttaagtgccataacgagcgcaacccctattctcggttgccatcgggtaatgccgggcactccgtggagactgccaccgtaaggtgtgaggaaggtggggacgacgtcaaatcagcacggcccttacgtccggggctacacacgtgttacaatggccggtacagcgagtcggccgcatgcaaatgcggtccaatcctgaaagccggtcccagttcggaccggggtctgcaacccgaccccgcgaagccggattcgctagtaatcgcgcatcagccatggcgcggtgaatacgttcccgggccttgtacacaccgcccgtcaagccatgaaagccgggggtgcctgaagtccgttaccgcgagggtcggcctaaggcaaaaccggtgattggggctaagtcgtaacaaggtagccgtaccggaaggtgcggctggaacacct

SEQ ID NO: 1505 - DNA, 1534 bp, Prevotella marshii
ttacaatgtagagtttgatcctggctcaggatgaacgctagctacaggcttaacacatgcaagtcgcggggcagcatggggattgcttgcaatctctgatggcgaccggcgcacgggtgagtaacacgtatccaacctgcctattaccacggtataacccgatgaaagtcggcctaatcccgtatgtagtcttccaatggcatcagcagtagacgaaaggtttagcggtaatggatggggatgcgtccgattagctagtcggtgaggtaacggctcaccgaggcaacgatcggtaggggttctgagaggaaggtcccccacactggaactgagacacggtccagactcctacgggaggcagcagtgaggaatattggtcaatgggcgagagcctgaaccagccaagtagcgtgcaggatgacggccttatgggttgtaaactgcttttatgcgaggataaagttacccacgtgtgggtgtttgcaggtatcgcatgaataaggaccggctaattccgtgccagcagccgcggtaatacggaaggttctggcgttatccggatttattgggtttaaagggagcgtaggctgttttttaagcgtgttgtgaaatgtaccggctcaaccggtgatgtgcagcgcgaactggaagacttgagtgtgttgtaagtaggcggaattcgtggtgtagcggtgaaatgcttagatatcacgaggaactccgattgcgtaggcagcttactgtctcactactgacgctgatgctcgaaagcgcgggtatcgaacaggattagataccctggtagtccgcgcggtaaacgatggatgctcgttgttggtatatatatatcagtgacttagcgaaagcgttaagcatcccacctggggagtacgccggcaacggtgaaactcaaaggaattgacgggggcccgcacaagcggaggaacatgtggtttaattcgatgatacgcgaggaaccttacccgggcttgaactgccggcgaacgattcagagatgatgaggcctttcggggcgccggtggaggtgctgcatggttgtcgtcagctcgtgccgtgaggtgtcggcttaagtgccataacgagcgcaacccctttttatagttgccatcgggtaatgccgggcactctgtagatactgccaccgtaaggtgtgaggaaggtggggatgacgtcaaatcagcacggcccttacgtccggggctacacacgtgttacaatggcgcatacagagagttggttgtatgtaaatacggtctaatcttgaaagtgcgtctcagttcggactggggtctgcaacccgaccccacgaagctggattcgctagtaatcgcgcatcagccatggcgcggtgaatacgttcccgggccttgtacacaccgcccgtcaagccatgaaagccgggggcgcctgaagtccgtgaccgcgagggtcggcctagggtgaaaccggtgattggggctaagtcgtaacaaggtagccgtaccggaaggtgcggctggaacacctcctttct

SEQ ID NO: 1506 - DNA, 1535 bp, Prevotella melaninogenica
ttacaatggagagtttgatcctggctcaggatgaacgctagctacaggcttaacacatgcaagttgaggggaaacggcattgagtgcttgcactctttggacgtcgaccggcgcacgggtgagtaacgcgtatccaaccttcccattactgtgggataacctgccgaaaggcagactaataccgcatagtcttcgatgacggcatcagatttgaagtaaagatttatcggtaatggatggggatgcgtctgattagcttgttggcggggtaacggcccaccaaggcaacgatcagtaggggttctgagaggaaggtcccccacattggaactgagacacggtccaaactcctacgggaggcagcagtgaggaatattggtcaatggacggaagtctgaaccagccaagtagcgtgcaggatgacggccctatgggttgtaaactgcttttgtatggggataaagttagggacgtgtccctatttgcaggtaccatacgaataaggaccggctaattccgtgccagcagccgcggtaatacggaaggtccaggcgttatccggatttattgggtttaaagggagcgtaggctggagattaagtgtgttgtgaaatgtagacgctcaacgtctgaattgcagcgcatactggtttccttgagtacgcacaacgttggcggaattcgtcgtgtagcggtgaaatgcttagatatgacgaagaactccgattgcgaaggcagctgacgggagcgcaactgacgcttaagctcgaaggtgcgggtatcaaacaggattagataccctggtagtccgcacagtaaacgatggatgcccgctgttggtacctggtatcagcggctaagcgaaagcattaagcatcccacctggggagtacgccggcaacggtgaaactcaaaggaattgacgggggcccgcacaagcggaggaacatgtggtttaattcgatgatacgcgaggaaccttacccgggcttgaattgcagaggaaggatttagagataatgacgcccttcggggtctctgtgaaggtgctgcatggttgtcgtcagctcgtgccgtgaggtgtcggcttaagtgccataacgagcgcaacccctctcttcagttgccatcaggttaagctgggcactctggagacactgccaccgtaaggtgtgaggaaggtggggatgacgtcaaatcagcacggcccttacgtccggggctacacacgtgttacaatggccggtacagagggacggtgtaatgcaaattgcatccaatcttgaaagccggtcccagttcggactggggtctgcaacccgaccccacgaagctggattcgctagtaatcgcgcatcagccatggcgcggtgaatacgttcccgggccttgtacacaccgcccgtcaagccatgaaagccgggggtgcctgaagtccgtgaccgcaaggatcggcctagggcaaaactggtgattggggctaagtcgtaacaaggtagccgtaccggaaggtgcggctggaacacctcctttct

SEQ ID NO: 1507 - DNA, 1517 bp, Prevotella micans
agagtttgatcctggctcaggatgaacgctagctacaggcttaacacatgcaagtcgaggggcagcataattattgcttgcaataattgatggcgaccggcgcacgggtgagtatcgcgtatccaactttcccataactaggggataatccgtcgaaaggcggtctaatactctatgttgtctatttatggcctcatatttagacgaaagatttatcggttatggttagggatgcgtccgattaggtagtaggcggggtaatagcccacctagcctacgatcggtaggggttctgcgaggaaggtcccccacattggaactgagacacggtccaaactcctacgggaggcagcagtgaggaatattggtcaatggacgcgagtctgaaccagccaagtagcgtgcaggatgacggccctatgggttgtaaactgcttttatgcgggaataaagtgatttacgtgtatatcattgcatgtaccgcatgaataaggaccggctaattccgtgccagcagccgcggtaatacggaaggttcgggcgttatccggatttattgggtttaaagggagcgtaggctgaatattaagcgtgttgtgaaatgtagttgctcaacatctgcactgcagcgcgaactggtattcttgagtgtgcgcgacgtaggcggaattcgtggtgtagcggtgaaatgcttagatatcacgaagaactccgattgcgaaggcagcttacgagagcacaactgacgcttaagctcgaaggtgcgggtatcgaacaggattagataccctggtagtccgcacagtaaacgatggatgcccgctattggacttttagttcagtggctaagcgaaagcgttaagcatcccacctggggagtacgccggcaacggtgaaactcaaaggaattgacgggggcccgcacaagcggaggaacatgtggtttaattcgatgatacgcgaggaaccttacccgggcttgaactgccggtgaacgatacagagatgttgaggcccttcggggcgccggtggaggtgctgcatggttgtcgtcagctcgtgccgtgaggtgtcggcttaagtgccataacgagcgcaaccccattttctagttgccatcgggtaatgccgggcactctggagatactgccaccgtaaggtgtgaggaaggttgggatgacgtcaaatcagcacggcccttacgtccggggctacacacgtgttacaatggcgcatacagagtgtcggttgtatgtaaatgcaatccaatcttgaaagtgcgtctcagttcggactggggtctgcaacccgaccccacgaagctggattcgctagtaatcgcgcatcagccatggcgcggtgaatacgttcccgggccttgtacacaccgcccgtcaagccatgaaagccgggggtgcctgaagtccgtgaccgcaagggtcggcctagggcaaaaccggtgattggggctaagtcgtaacaaggtagccgtaccggaaggtgcggctggaacacct

SEQ ID NO: 1508 - DNA, 1537 bp, Prevotella multiformis
ttacagtggagagtttgatcctggctcaggatgaacgctggctacaggcttaacacatgcaagtcgaggggaaacggcgttgagtgctcgcactcttcggacgtcgaccggcgcacgggtgagtaacgcgtatccaaccttcccgtcactgcgggataacctgccgaaaggcagactaataccgcatggccttcactgacggcatcagaggtgaagtaaagctttttagcggtgacggacggggatgcgtctgattagctggttggcggggcgacggcccaccaaggctacgatcagtaggggttctgagaggaaggtcccccacattggaactgagacacggtccaaactcctacgggaggcagcagtgaggaatattggtcaatgggcggaagcctgaaccagccaagtagcgtgcaggaggacggccctacgggttgtaaactgcttttatgcggggataaagtgagggacgcgtccctttttgcaggtaccgcatgaataaggaccggctaattccgtgccagcagccgcggtaatacggaaggtccgggcgttatccggatttattgggtttaaagggagcgtaggccggggattaagtgtgttgtgaaatgtaggcgctcaacgtctgatgtgcagcgcatactggttcccttgagtacgcgcaacgccggcggaattcgtcgtgtagcggtgaaatgcttagatatgacgaagaaccccgattgcgaaggcagccggcgggagcgcaactgacgctgaagctcgaaggtgcgggtatcgaacaggattagataccctggtagtccgcacggtaaacgatggatgcccgctctcggcgcctggcgccgggggccaagcgaaagcgttaagcatcccacctggggagtacgccggcaacggtgaaactcaaaggaattgacgggggcccgcacaagcggaggaacatgtggtttaattcgatgatacgcgaggaaccttacccgggcttgaattgcaggagaacgatacagagatgttgaggtccttcgggactcctgcgaaggtgctgcatggttgtcgtcagctcgtgccgtgaggtgtcggctcaagtgccataacgagcgcaacccctctccccagttgccatcgggttatgccgggcactccggggacactgccgccgcaaggtgcgaggaaggtggggatgacgtcaaatcagcacggcccttacgtccggggctacacacgtgttacaatggccggtacagagggctggcgctccgcgaggcgcgccgaatctataaagccggtctcagttcggactggggtctgcaacccgaccccacgaagctggattcgctagtaatcgcgcatcagccacggcgcggtgaatacgttcccgggccttgtacacaccgcccgtcaagccatgaaagccgggggtgcctgaagtccgtgaccgcgaggatcggcctagggcaaaactggtgattggggctaagtcgtaacaaggtagccgtaccggaaggtgcggctggaacacctcctttct

SEQ ID NO: 1509 - DNA, 1516 bp, Prevotella multisaccharivorax
agagtttgatcctggctcaggatgaacgctagctacaggcctaacacatgcaagtcgaggggaaacgaagcgggagcttgcttctgctgtcgtcgaccggcgcacgggtgagtaacgcgtatccaacctggcctgaggtaagggataatccgcagaaatgtggtctaataccttatgtgctcctatgaggtcatctgaagaggagcaaagatttatcgccttaggatggggatgcgtctgattagatagttggcggggcaacggcccaccaagtcatcgatcagtaggggttctgagaggaaagtcccccacattggaactgagacacggtccagactcctacgggaggcagcagtgaggaatattggtcaatgggcgagagcctgaaccagccaagtagcgtgcaggatgacggccctatgggttgtaaactgcttttatgcgggtataaaggagcatacgtgtatgtttttgcagttaccgcatgaataaggaccggctaattccgtgccagcagccgcggtaatacggaaggttctggtgttatccggatttattgggtttaaagggagcgcaggctgtcagataagcgtgttgtgaaatgcggttgctcaacatccgcactgcagcgcgaactgtttgacttgagtacgcacgacgttggtggaatttgccgtgtagcggtgaaatgcttagatatggcgaagaactccgattgcgaaggcagctgacgggagcgctactgacgctcatgctcgaaagtgcgggtatcgaacaggattagataccctggtagtccgcacggtaaacgctggatgcccgctatatgcccctttagggtatgtggccaagtgaaaacgttaagcatcccacctggggagtacgccggcaacggtgaaactcaaaggaattgacgggggcccgcacaagcggaggaacatgtggtttaattcgatgatacgcgaggaaccttacccgggcttgaattgctgaggaaggcttcagagatggagctgcccttcggggcttcagtgaaggtgctgcatggttgtcgtcagctcgtgccgtgaggtgtcggcttaagtgccataacgagcgcaacccttttcttcagttgccatcaggtagtgctgggccctctggagatactgccgccgtaaggtgtgaggaaggtggggatgacgtcaaatcagcacggcccttacgtccggggctacacacgtgttacaatgggtggtacagcgagcagggttaccgcaaggtatcccgaatcattaaatccgccctcagttcggactggggtctgcaacccgaccccacgaagctggattcgctagtaatcgcgcatcagccatggcgcggtgaatacgttcccgggccttgtacacaccgcccgtcaagccatgaaagccggggggtgcctgaagtccgtgaccgcaaggatcggcctagggcaaaaacttgggtaattgggggctaagtcgtaacaaggtagccgtaccggaaggtgcggctg

SEQ ID NO: 1510 - DNA, 1268 bp, Prevotella nanceiensis
ctggctcaggatgaacgctagctacaggcttaacacatgcaagtcgagggaccggcgcacgggtgagtaacgcgtatccaacctacccaatactcaggcataacccgttgaaagacggactaattcctgatggttaaagtcggtattggatggggatgcgtctgattagtttgttggtgaggtaacggctcaccaagacttcgatcagtaggggttctgagaggaaggtcccccacattggaactgagacacggtccaaactcctacgggaggcagcagtgaggaatattggtcaatggatggaaatctgaaccagccaagtagcgtgcaggatgacggcctatgggttgtaaactgcttttatgtgagaatatgcatgtatcacatgaataaggaccggctaattccgtgccagcagccgcggtaatacggaaggtccaggcgttatccggatttattgggtttaaagggtgcgtaggccgtttgataagcgtgctgtgaaatatagtggctcaacctctatcgtgcagcgcgaactgttgaacttgagtgcgtagtaggtaggcggaattcgtggtgtagcggtgaaatgcttagatatcacgaagaactccgattgcgaaggcagcttaccgtaacgactgacgcttaagcacgaaggtgcgggtatcgaacaggattagataccctggtagtccgcacagtaaacgatggatgctcgctgttggccggtcagtggcttagcgaaagcgttaagcatcccacctggggagtacgccggcaacggtgaaactcaaaggaattgacgggggcccgcacaagcggaggaacatgtggtttaattcgatgatacgcgaggaaccttacccgggcttgaactgtggaggtgctgcatggttgtcgtcagctcgtgccgtgaggtgtcggcttaagtgccataacgagcgcaaccccttttcttagttgccatcagctgggcactctgggaatactgccaccgtaaggtggaggaaggtggggatgacgtcaaatcagcacggcccttacgtccggggctacacacgtgttacaatggcgcacagagtgttggtttcatgcaaatgagatctaatcttctgcgtctcagttcggatggggtctgcaacccgaccccagaagctggattcgctagtaatcgcgcatcagccatggcgcggtgaatacgttcccgggccttgtacacaccgcccgtcaagccatgaaagccgggggcgcctaaagtccgtacc

SEQ ID NO: 1511 - DNA, 1520 bp, Prevotella nigrescens
agagtttgatcctggctcaggatgaacgctggctacaggcttaacacatgcaagtcgtggggaaacggcattatgtgcttgcacattctggacgtcgaccggcgcacgggtgagtatcgcgtatccaacctgccccttacttggggataccccgttgaaagacggcctaatacccgatgtgtttcattgacggcatccgatatgaaacaaaggttttccggtaagggatggggatgcgtctgattagctagttggcggggcaacggcccaccaaggcgacgatcagtaggggttctgagaggaaggtcccccacattggaactgagacacggtccaaactcctacgggaggcagcagtgaggaatattggtcaatggacgcaagtctgaaccagccaagtagcgtgcaggatgacggccctatgggttgtaaactgcttttatgtgggaataaattggcgcacgtgtgcgccattgcatgtacctcatgaataaggaccggctaattccgtgccagcagccgcggtaatacggaaggtccgggcgttatccggatttattgggtttaaagggagtgtaggcggtctgttaagcgtgttgtgaaatttaggtgctcaacatttaacttgcagcgcgaactgtcagacttgagtacacgcagcgcaggcggaattcatggtgtagcggtgaaatgcttagatatcatgaggaactccgatcgcgaaggcagcctgcgggagtgttactgacgcttaagctcgaaggtgcgggtatcgaacaggattagataccctggtagtccgcactgtaaacgatggatgcccgccgttggcgccctgcgcctgcggccaagcgaaagcattaagcatcccacctggggagtacgccggcaacggtgaaactcaaaggaattgacgggggcccgcacaagcggaggaacatgtggtttaattcgatgatacgcgaggaaccttacccgggcttgaattgcagtcgcagcccacagagacgtgggcttcccttcggggcgtctgtgaaggtgctgcatggttgtcgtcagctcgtgccgtgaggtgtcggcttaagtgccataacgagcgcaaccccctttcccagttgccatcgggttatgccgggcactctggggacactgccaccgcaaggtgcgaggaaggtggggatgacgtcaaatcagcacggcccttacgtccggggctacacacgtgttacaatggccggtacagagggacggtgcaatgcaagttgcatccaatcttgaaatccggtcccagttcggactggggtctgcaacccgaccccacgaagctggattcgctagtaatcgcgcatcagccatggcgcggtgaatacgttcccgggccttgtacacaccgcccgtcaagccatgaaagccgggggtgcctgaagttcgtgaccgcgaggagcgacctagggcaagaccggtgattggggctaagtcgtaacaaggtagccgtaccggaaggtgcggctggaacacct

SEQ ID NO: 1512 - DNA, 1539 bp, Prevotella oralis
ttacaatgtagagtttgatcctggctcaggatgaacgctagctacaggcttaacacatgcaagtcgcggggcatcatggaggttgttttcaacttttgatggcgaccggcgcacgggtgagtaacgcgtatccaaccttcccattactacggcataccccgttgaaaggcggcctaattccgtatgcagtccgaagcagtcatctaatttggacgaaaggtatattctatcggtaatggatggggatgcgtccgattagccagccggcggggtaacggcccaccggggcatcgatcggtaggggttctgagaggaaggtcccccacactggaactgagacacggtccagactcctacgggaggcagcagtgaggaatattggtcaatgggcgtaagcctgaaccagccaagtagcgtgcaggatgacggccctatgggttgtaaactgcttttatgcggggataaagttggggacgtgtccctttttgcaggtaccgcatgaataaggaccggctaattccgtgccagcagccgcggtaatacggaaggtccgggcgttatccggatttattgggtttaaagggagcgtaggcagttttttaagcgtgctgtgaaatgtaccggctcaaccggtgatgtgcagcgcgaactgggaatcttgagtacgcagtaagcaggcggaattcgtggtgtagcggtgaaatgcttagatatcacgaagaactccgattgcgtaggcagcttgctgtagcgtaactgacgctgaagctcgaaagtgcgggtatcgaacaggattagataccctggtagtccgcacggtaaacgatggatgcccgctgtcggccttttttggtcggtggccaagcgaaagcgttaagcatcccacctggggagtacgccggcaacggtgaaactcaaaggaattgacgggggcccgcacaagcggaggaacatgtggtttaattcgatgatacgcgaggaaccttacccgggcttgaactgccattgacttgaatagagatattcattcccttcggggcattggtggaggtgctgcatggttgtcgtcagctcgtgccgtgaggtgtcggcttaagtgccataacgagcgcaaccccttttttcagttgccatcggttaaagccgggcactctgtgaatactgccgccgtaaggtgtgaggaaggtggggatgacgtcaaatcagcacggcccttacgtccggggctacacacgtgttacaatggcgcgtacagcgagtcggccgtatgtaaatgcggtccaatccttaaaacgtgcctcagttcggactggggtctgcaacccgaccccacgaagctggattcgctagtaatcgcgcatcagccatggcgcggtgaatacgttcccgggccttgtacacaccgcccgtcaagccatgaaagccgggggtgcctgaagtccgtgaccgcaagggtcggcctaaggcaatactggtaattggggctaagtcgtaacaaggtagccgtaccggaaggtgcggctggaacacctcctttct

SEQ ID NO: 1513 - DNA, 1536 bp, Prevotella oris
ttacaatggagagtttgatcctggctcaggatgaacgctggctacaggcttaacacatgcaagtcgaggggaaacgacggggaagcttgcttccccgggcgtcgaccggcgcacgggtgagtaacgcgtatccaacctgcctctgactgagggataacccgtcgaaagtcggcctaatacctcatggcatcgtctgcgggcatccaacgacgattaaagatttcatcggtcagggatggggatgcgtctgattagcttgttggcggggtaacggcccaccaaggctacgatcagtaggggttctgagaggaaggtcccccacattggaactgagacacggtccaaactcctacgggaggcagcagtgaggaatattggtcaatgggcgagagcctgaaccagccaagtagcgtgcaggatgacggccctatgggttgtaaactgcttttatgcggggataaagtgagggacgtgtccttcattgcaggtaccgcatgaataaggaccggctaattccgtgccagcagccgcggtaatacggaaggtccgggcgttatccggatttattgggtttaaagggagcgtaggccgtggattaagcgtgttgtgaaatgcaggtgctcaacgtctgcactgcagcgcgaactggtccacttgagtgtgcgcaacgcaggcggaattcgtcgtgtagcggtgaaatgcttagatatgacgaagaactccgattgcgaaggcagcttgcgggagcacaactgacgctgaagctcgaaagtgcgggtatcgaacaggattagataccctggtagtccgcacggtaaacgatggatgcccgttgtcaggctgtttcagcctggtgaccaagcgaaagcattaagcatcccacctggggagtacgccggcaacggtgaaactcaaaggaattgacgggggcccgcacaagcggaggaacatgtggtttaattcgatgatacgcgaggaaccttacccgggcttgaattgcagacgaaggcttcagagatgaagcggcccttcggggcgtctgtgaaggtgctgcatggttgtcgtcagctcgtgccgtgaggtgtcggcttaagtgccataacgagcgcaacccctttcttcagttgccatcaggtgatgctgggcactctggagacactgccaccgcaaggtgtgaggaaggtggggatgacgtcaaatcagcacggcccttacgtccggggctacacacgtgttacaatggccggtacagagagttgattttgtgcaaacacgatctaatccttaaatccggtcccagttcggactggggtctgcaacccgaccccacgaagctggattcgctagtaatcgcgcatcagccatggcgcggtgaatacgttcccgggccttgtacacaccgcccgtcaagccatgaaagccgggggtgcctgaagtctgtgaccgcaaggaacggcctagggcaaaaccggtgattggggctaagtcgtaacaaggtagccgtaccggaaggtgcggctggaacacctcctttct

SEQ ID NO: 1514 - DNA, 1513 bp, Prevotella oulorum
  modified_base (3)..(3): a, c, t, g, unknown or other
acnatggagagtttgatcctggctcaggatgaacgctagctacaggcttaacacatgcaagtcgaggggaaacgatgacgagagcttgctctcttaggcgtcgaccggcgcacgggtgagtaacgcgtatccaacctgcccattacaggggaataaccttgcgaaagtaagactaatgccccatggtattctcagcagacatctaatgaggattaaagatttatcggtaatggatggggatgcgtctgattagcttgttggcggggtaacggcccaccaaggcaacgatcagtaggggttctgagaggaaggtcccccacattggaactgagacacggtccaaactcctacgggaggcagcagtgaggaatattggtcaatgggcgagagcctgaaccagccaagtagcgtgcaggaagacggccctatgggttgtaaactgcttttataggggaataaagtgatctacgtgtagtttattgtatgtaccctatgaataaggaccggctaattccgtgccagcagccgcggtaatacggaaggttcgggcgttatccggatttattgggtttaaagggagcgtaggccgtagattaagcgtgttgtgaaatgtagatgctcaacatctgacttgcagcgcgaactggtttacttgagtgtgcacaacgtaggcggaattcgtcgtgtagcggtgaaatgcttagatatgacgaagaactccgattgcgaaggcagcttacgggagcacaactgacgctgaagctcgaaggtgcgggtatcaaacaggattagataccctggtagtccgcacagtaaacgctggatgcccgctgttggctcattagagtcagcggccaagcgaaagcattaagcatcccacctggggagtacgccggcaacggtgaaactcaaaggaattgacgggggcccgcacaagcggaggaacatgtggtttaattcgatgatacgcgaggaaccttacccgggcttgaattgcagacgaacgattcagagatgaagaggcccttcggggcgtctgtgaaggtgctgcatggttgtcgtcagctcgtgccgtgaggtgtcggcttaagtgccataacgagcgcaaccccttttcttagttgccatcaggtcatgctgggcactctgggaatactgccaccgtaaggtgtgaggaaggtggggatgacgtcaaatcagcacggcccttacgtccggggctacacacgtgttacaatggccggtacagagggcaggttgcatgtaaatgcgatcgaatcttaaaagccggtcccagttcggactgaggtctgcaacccgacctcacgaagctggattcgctagtaatcgcgcatcagccatggcgcggtgaatacgttcccgggccttgtacacaccgcccgtcaagccatgaaagccgggggtgcctaaagtccgttaccgcaaggatcggcctagggcaaaactggtaattggggctaagtcgtaacaaggtagccgtaccggaaggtgc

SEQ ID NO: 1515 - DNA, 1519 bp, Prevotella pallens
agagtttgatcctggctcaggatgaacgctagctataggcttaacacatgcaagtcgaggggaaacggcattatgtgcttgcacattttggacgtcgaccggcgcacgggtgagtatcgcgtatccaacctgccctttacttggggataccccgttgaaagacggcctaatacccgatgtaattcattgatggcatcagatatgaataaaagatttatcggtaaaggatggggatgcgtctgattagcttgttggtgaggtaaaggctcaccaaggcaacgatcagtaggggttctgagaggaaggtcccccacattggaactgagacacggtccaaactcctacgggaggcagcagtgaggaatattggtcaatgggcgcaagcctgaaccagccaagtagcgtgcaggaagacggccctatgggttgtaaactgcttttatacgagaataatttgatgcacgtgtgcgttattgcatgtatcgtatgaataaggaccggctaattccgtgccagcagccgcggtaatacggaaggtccaggcgttatccggatttattgggtttaaagggagtgtaggcggtttgttaagcgtgttgtgaaatttaggtgctcaacatttaacttgcagcgcgaactgtcagacttgagtacacgcaacgtatgcggaattcatggtgtagcggtgaaatgcttagatatcatgaagaactccgattgcgaaggcagcatacgggagtgtaactgacgcttaagctcgaaggtgcgggtatcgaacaggattagataccctggtagtccgcacagtaaacgatggatgcccgctgttagcgcctggcgttagcggctaagcgaaagcattaagcatcccacctggggagtacgccggcaacggtgaaactcaaaggaattgacgggggcccgcacaagcggaggaacatgtggtttaattcgatgatacgcgaggaaccttacccgggcttgaattgcagaggaattatttagagataaatatgcccttcggggtctctgtgaaggtgctgcatggttgtcgtcagctcgtgccgtgaggtgtcggcttaagtgccataacgagcgcaaccccttttcttagttgccatcaggtaatgctgggcactctgggaacactgccaccgcaaggtgtgaggaaggtggggatgacgtcaaatcagcacggcccttacgtccggggctacacacgtgttacaatggccggtacagagggatggtgtaatgtaaattgcatcaaatcttaaaagccggtcccagttcggactgaggtctgcaacccgacctcacgaagctggattcgctagtaatcgcgcatcagccatggcgcggtgaatacgttcccgggccttgtacacaccgcccgtcaagccatgaaagccgggggtgcctgaagttcgtaaccgtaaggagcgacctagggcaaaactggtaattggggctaagtcgtaacaaggtagccgtaccggaaggtgcggctggaacacct

SEQ ID NO: 1516 - DNA, 1534 bp, Prevotella ruminicola
ttacaatgaagagtttgatcctggctcaggatgaacgctagctacaggcttaacacatgcaagtcgaggggcatcagatcgaaagcttgcttttgatgctggcgaccggcgcacgggtgagtaacgcgtatccaaccttccctatagtagagaatagcccggcgaaagtcggattaatgctctatgttgtatttagaggacatctgaagaataccaaaggtttaccgctataggatggggatgcgtctgattaggtagtaggcggggtaacggcccacctagccgacgatcagtaggggttctgagaggaaggtcccccacattggaactgagacacggtccaaactcctacgggaggcagcagtgaggaatattggtcaatggacggaagtctgaaccagccaagtagcgtgcaggatgacggccctatgggttgtaaactgcttttatatagggataaagtcggggacgtgtccccgtttgtaggtactatatgaataaggaccggctaattccgtgccagcagccgcggtaatacggaaggtccaggcgttatccggatttattgggtttaaagggagcgcaggctgatgattaagcgtgacgtgaaatgtagccgctcaacggctgaactgcgtcgcgaactggttatcttgagtgagttcgatgttggcggaattcgtggtgtagcggtgaaatgcttagatatcacgaagaactccgattgcgaaggcagccaacaaggcctttactgacgctaaagctcgaaggtgcgggtatcgaacaggattagataccctggtagtccgcacggtaaacgatggatgcccgctgtttgcgatatactgtgagcggccaagagaaatcgttaagcatcccacctggggagtacgccggcaacggtgaaactcaaaggaattgacgggggcccgcacaagcggaggaacatgtggtttaattcgatgatacgcgaggaaccttacccgggcttgaactgccagcgaacgattcagagatgatgaggtccttcgggacgctggtggaggtgctgcatggttgtcgtcagctcgtgccgtgaggtgtcggcttaagtgccataacgagcgcaacccttttctttagttgccatcaggtaatgctgggcactctggagatactgccaccgtaaggtgtgaggaaggtggggatgacgtcaaatcagcacggcccttacgtccggggctacacacgtgttacaatggggggtacagagagtcggatatacgcaagtatgttctaatccttaaagccttcctcagttcggattggggtctgcaacccgaccccatgaagctggattcgctagtaatcgcgcatcagccatggcgcggtgaatacgttcccgggccttgtacacaccgcccgtcaagccatgaaagccgggggcgcttgaagtccgtgaccgcaaggatcggcctagagcgaaactggtaattggggctaagtcgtaacaaggtagccgtaccggaaggtgcggctggaacacctcctttct

SEQ ID NO: 1517 - DNA, 1493 bp, Prevotella salivae
agagtttgatcctggctcaggatgaacgctagctacaggcttaacacatgcaagtcgaggggaaacgacattgaagcttgcttcgatgggcgtcgaccggcgcacgggtgagtaacgcgtatccaacctgcctctgactaagggataacccggcgaaagtcggactaataccttatgaggttttcagcagacatctaacgaaaacgaaagatttatcggtcagtgatggggatgcgtctgattagcttgttggcggggtaacggcccaccaaggcaacgatcagtaggggttctgagaggaaggtcccccacattggaactgagacacggtccaaactcctacgggaggcagcagtgaggaatattggtcaatgggcgagagcctgaaccagccaagtagcgtgcaggatgacggccctatgggttgtaaactgcttttatgtggggataaagtgagctacgtgtagtttattgcaggtaccacatgaataaggaccggctaattccgtgccagcagccgcggtaatacggaaggtccaggcgttatccggatttattgggtttaaagggagcgtaggccgtggattaagcgtgttgtgaaatgtagacgctcaacgtctgaattgcagcgcgaactggttcacttgagtatgcacaacgtaggcggaattcgtcgtgtagcggtgaaatgcttagatatgacgaagaactccgattgcgaaggcagcttacgggagcacaactgacgctgaagctcgaaggtgcgggtatcaaacaggattagataccctggtagtccgcacagtaaacgatggatgcccgttgttagttcacttatgaattagcgaccaagcgaaagcattaagcatcccacctggggagtacgccggcaacggtgaaactcaaaggaattgacgggggcccgcacaagcggaggaacatgtggtttaattcgatgatacgcgaggaaccttacccgggcttgaattgcagacgaacgattcagagatgatgaggcccttcggggcgtctgtgaaggtgctgcatggttgtcgtcagctcgtgccgtgaggtgtcggcttaagtgccataacgagcgcaaccccttttttcagttgccatcaggtgatgctgggcactctggagatactgccaccgtaaggtgtgaggaaggtggggatgacgtcaaatcagcacggcccttacgtccggggctacacacgtgttacaatggccggtacagagcgttggtcgtgtgcaaatacgatctaatccttaaagccggtcccagttcggactggggtctgcaacccgaccccacgaagctggattcgctagtaatcgcgcatcagccatggcgcggtgaatacgttcccgggccttgtacacaccgcccgtcaagccatgaaagccgggggtgcctgaagtctgtgaccgcaaggaacggcctagggcaaaactggtgattggggctaagtcgtaacaaggtaacc

SEQ ID NO: 1518 - DNA, 1327 bp, Prevotella sp.
  BI-42
  modified_base (529)..(529): a, c, t, g, unknown or other
tgagtttgatcctggctcaggatgaacgctagctacaggcttaacacatgcaagtcgagggaccggcgcacgggtgagtaacgcgtatccaacctgcccaccacttggggataaccttgcgaaagtaagactaatacccaatgattaaagtcggtgatggatggggatgcgtctgattagcttgttggcggggtaacggcccaccaaggcaacgatcagtaggggttctgagaggaaggtcccccacattggaactgagacacggtccaaactcctacgggaggcagcagtgaggaatattggtcaatggacgagagtctgaaccagccaagtagcgtgcaggatgacggcctatgggttgtaaactgcttttataagggaatatgcatgtaccttatgaataaggaccggctaattccgtgccagcagccgcggtaatacggaaggtccgggcgttatccggatttattgggtttaaagggagcgtaggccggagattaagcgtgttgtgaaatgtagacgctcaacntctgcactgcagcgcgaactggtttccttgagtacgcacaaagtgggcggaattcgtggtgtagcggtgaaatgcttagatatcacgaagaactccgattgcgaaggcagctcactggagcgactgacgctgaagctcgaaagtgcgggtatcgaacaggattagataccctggtagtccgcacggtaaacgatggatgcccgctgttggtcggtcagcggccaagcgaaagcattaagcatcccacctggggagtacgccggcaacggtgaaactcaaaggaattgacgggggcccgcacaagcggaggaacatgtggtttaattcgatgatacgcgaggaaccttacccgggcttgaattgtgaaggtgctgcatggatgtcgtcagctcgtgccgtgaggtgtcggcttaagtgccataacgagcgcaacccctctccttagttgccatcagctgggcactctggggacactgccaccgtaaggtggaggaaggtggggatgacgtcaaatcagcacggcccttacgtccggggctacacacgtgttacaatggcaggcagagagacggtcccttgcaaaatggatcaaatccttcctgtctcagttcggatggggtctgcaacccgaccccagaagctggattcgctagtaatcgcgcatcagccatggcgcggtgaatacgtcccgggccttgtacacaccgcccgtcaagccatgaaagccgggggcgcctaaagtccgtgcggcctagggcgaaactggtaattggggctaagtcgtaacaaggtagccgt

SEQ ID NO: 1519 - DNA, 1459 bp, Prevotella sp.
  CM38
ctcaggatgaacgctagctacaggcttaacacatgcaagtcgcggggcagcatgggggttgcttgcaacccctgatggcgaccggcgcacgggtgagtaacgcgtatccaacctgcccttcaccacgggataacccggcgaaagtcggactaataccgtatgttgtccattgacggcatccgatttggacgaaaggcttagcggtgagggatggggatgcgtccgattagctcgacggcggggtaacggcccaccgtggcaacgatcggtaggggttctgagaggaaggtcccccacactggaactgagacacggtccagactcctacgggaggcagcagtgaggaatattggtcaatgggcggaagcctgaaccagccaagtagcgtgcaggatgacggccctatgggttgtaaactgcttttatgcggggataaaggggcccacgtgtgggtttttgcaggtaccgcatgaataaggaccggctaattccgtgccagcagccgcggtaatacggaaggtccgggcgttatccggatttattgggtttaaagggagcgtaggccgccccttaagcgtgttgtgaaatgcgggtgctcaacatccgacttgcagcgcgaactggggggcttgagtgcgccgaaagtaggcggaattcgtggtgtagcggtgaaatgcttagatatcacgaagaactccgattgcgaaggcagcttactgtagcgcaactgacgctgatgctcgaaagcgtgggtatcgaacaggattagataccctggtagtccacgcggtaaacgatggatgctcgttgtcggcctttgaggccggtgaccaagcgaaagcgttaagcatcccacctggggagtacgccggcaacggtgaaactcaaaggaattgacgggggcccgcacaagcggaggaacatgtggtttaattcgatgatacgcgaggaaccttacccgggcttgaactgcggcggaacgattccgagaggatgaggcccttcggggctgccgcggaggtgctgcatggttgtcgtcagctcgtgccgtgaggtgtcggcttaagtgccataacgagcgcaacccccgtcttcagttgccatcggatgatgccgggcactctggagatactgccaccgcaaggtgtgaggaaggtggggatgacgtcaaatcagcacggcccttacgtccggggctacacacgtgttacaatggcgcatacagagagtaggtggcatgcgagtgccatccaatccttaaagtgcgtctcagttcggactggggtctgcaacccgaccccacgaagctggattcgctagtaatcgcgcatcagccatggcgcggtgaatacgttcccgggccttgtacacaccgcccgtcaagccatgaaagccgggggcgcctgaagtccgtgaccgcgagggtcggcctagggtgaaaccggtgattggggctaag

SEQ ID NO: 1520 - DNA, 1452 bp, Prevotella sp.
  ICM1
aggatgaacgctagctacaggcttaacacatgcaagtcgaggggaaacggcattgagtgcttgcactctttggacgtcgaccggcgcacgggtgagtaacgcgtatccaaccttcccattactgtgggataacctgccgaaaggcagactaataccgcatagtcttcgatgacggcatcagatttgaagtaaagatttatcggtaatggatggggatgcgtctgattagcttgttggcggggtaacggcccaccaaggcgacgatcagtaggggttctgagaggaaggtcccccacattggaactgagacacggtccaaactcctacgggaggcagcagtgaggaatattggtcaatggacggaagtctgaaccagccaagtagcgtgcaggatgacggccctatgggttgtaaactgcttttgtatggggataaagttagggacgtgtccctatttgcaggtaccatacgaataaggaccggctaattccgtgccagcagccgcggtaatacggaaggtccaggcgttatccggatttattgggtttaaagggagcgtaggctggagattaagtgtgttgtgaaatgtagacgctcaacgtctgaattgcagcgcatactggttttcttgagtacgcacaacgttggcggaattcgtcgtgtagcggtgaaatgcttagatatgacgaagaactccgattgcgaaggcagctgacgggagcgcaactgacgcttaagctcgaaggtgcgggtatcaaacaggattagataccctggtagtccgcacagtaaacgatggatgcccgctgttggtacctggtatcagcggctaagcgaaagcattaagcatcccacctggggagtacgccggcaacggtgaaactcaaaggaattgacgggggcccgcacaagcggaggaacatgtggtttaattcgatgatacgcgaggaaccttacccgggcttgaattgcagaggaaggatttagagataatgacgcccttcggggcctctgtgaaggtgctgcatggttgtcgtcagctcgtgccgtgaggtgtcggcttaagtgccataacgagcgcaacccctctcttcagttgccatcaggttaagctgggcactctggagacactgccaccgtaaggtgtgaggaaggtggggatgacgtcaaatcagcacggcccttacgtccggggctacacacgtgttacaatggccggtacagagggatggtgtaatgcaaattgcatcaaatcttgaaagccggtcccagttcggactggggtctgcaacccgaccccacgaagctggattcgctagtaatcgcgcatcagccatggcgcggtgaatacgttcccgggccttgtacacaccgcccgtcaagccatgaaagccgggggtgcctgaagtccgtgaccgcaaggatcggcctagggcaaactggtgattgggg

SEQ ID NO: 1521 - DNA, 1458 bp, Prevotella sp.
  ICM55
acgctagctacaggcttaacacatgcaagtcgaggggaaacgacattgaagcttgcttcgatgggcgtcgaccggcgcacgggtgagtaacgcgtatccaacctgcctctgactaagggataacccggcgaaagtcggactaataccttatgaggttttcagcagacatctaatgaaaacgaaagatttatcggtcagtgatggggatgcgtctgattagcttgttggcggggtaacggcccaccaaggcaacgatcagtaggggttctgagaggaaggtcccccacattggaactgagacacggtccaaactcctacgggaggcagcagtgaggaatattggtcaatgggcgagagcctgaaccagccaagtagcgtgcaggatgacggccctatgggttgtaaactgcttttatgtggggataaagtgagctacgtgtagtttattgcaggtaccacatgaataaggaccggctaattccgtgccagcagccgcggtaatacggaaggtccaggcgttatccggatttattgggtttaaagggagcgtaggccgtggattaagcgtgttgtgaaatgtagacgctcaacgtctgaattgcagcgcgaactggttcacttgagtatgcacaacgtaggcggaattcgtcgtgtagcggtgaaatgcttagatatgacgaagaactccgattgcgaaggcagcttacgggagcacaactgacgctgaagctcgaaggtgcgggtatcaaacaggattagataccctggtagtccgcacagtaaacgatggatgcccgttgttagttcacttaagaattagcgaccaagcgaaagcattaagcatcccacctggggagtacgccggcaacggtgaaactcaaaggaattgacgggggcccgcacaagcggaggaacatgtggtttaattcgatgatacgcgaggaaccttacccgggcttgaattgcagacgaacgattcagagatgatgaggcccttcggggcgtctgtgaaggtgctgcatggttgtcgtcagctcgtgccgtgaggtgtcggcttaagtgccataacgagcgcaaccccttttttcagttgccatcaggtgatgctgggcactctggagatactgccaccgtaaggtgtgaggaaggtggggatgacgtcaaatcagcacggcccttacgtccggggctacacacgtgttacaatggccggtacagagcgttggttgtatgcaaatacgatctaatccttaaagccggtcccagttcggactggggtctgcaacccgaccccacgaagctggattcgctagtaatcgcgcatcagccatggcgcggtgaatacgttcccgggccttgtacacaccgcccgtcaagccatgaaagccgggggtgcctgaagtctgtgaccgcaaggaaacggcctagggcaaaactggtgattggggctaagtcgta

SEQ ID NO: 1522 - DNA, 1479 bp, Prevotella sp.
  JCM 6330
ggctcaggatgaacgctagctacaggcttaacacatgcaagtcgaggggaaacggcgtttagtgcttgcactgttcggacgtcgaccggcgcacgggtgagtaacgcgtatccaaccttcccataactaagggataacctgccgaaaggcagactaataccttatgtaattcttagatgacatcagaagagaatgaaagatttatcggttatggatggggatgcgtctgattagcttgttggcggggtaacagcccaccaaggcgacgatcagtaggggttctgagaggaaggtcccccacattggaactgagacacggtccaaactcctacgggaggcagcagtgaggaatattggtcaatgggcgagagcctgaaccagccaagtagcgtgcaggaagacggccctatgggttgtaaactgcttttgtatggggataaagtcaatcacgtgtgattgtttgcaggtaccatacgaataaggaccggctaattccgtgccagcagccgcggtaatacggaaggttcgggcgttatccggatttattgggtttaaagggagcgtaggccggagattaagtgtgttgtgaaatgtagacgctcaacgtctgacttgcagcgcatactggtttccttgagtacgcacaacgttggcggaattcgtcgtgtagcggtgaaatgcttagatatgacgaagaactccgattgcgaaggcagctgacgggagcgccactgacgcttaagctcgaaggtgcgggtatcgaacaggattagataccctggtagtccgcacagtaaacgatggatgcccgctgttggtacctggtatcagcggctaagcgaaagcattaagcatcccacctggggagtacgccggcaacggtgaaactcaaaggaattgacgggggcccgcacaagcggaggaacatgtggtttaattcgatgatacgcgaggaaccttacccgggcttgaattgcagaggaaggatttagagataatgacgcccttcggggtctctgtgaaggtgctgcatggttgtcgtcagctcgtgccgtgaggtgtcggcttaagtgccataacgagcgcaacccctctcttcagttgccatcaggtaatgctgggcactctggagacactgccaccgtaaggtgtgaggaaggtggggatgacgtcaaatcagcacggcccttacgtccggggctacacacgtgttacaatggccggtacagagggacggtgtaatgcaaattgcatccaatcttgaaagccggtcccagttcggactggggtctgcaacccgaccccacgaagctggattcgctagtaatcgcgcatcagccatggcgcggtgaatacgttcccgggccttgtacacaccgcccgtcaagccatgaaagccgggggtgcctgaagtccgtgaccggaaggatcggcctagggcaaaactggtgattggggctaagtcgtaacaaggtaacc

SEQ ID NO: 1523 - DNA, 1374 bp, Prevotella sp.
  SEQ053
tgcaagtcgcggggcagcatgagggttgcttgcaacctttgatggcgaccggcgcacgggtgagtaacacgtatccaacctactccttacaacggaataacccggcgaaagtcggactaataccgtatgatatcctatgcaggcatctaaytaggattaaaggtttagcggtaagggatggggatgcgtctgattaggcagttggcggggtaacggcccaccaaaccgacgatcagtaggggttctgagaggaaggtcccccacattggaactgagacacggtccaaactcctacgggaggcagcagtgaggaatattggtcaatggacggaagtctgaaccagccaagtagcgtgcaggatgacggccctatgggttgtaaactgcttttatacggggataaagttagggacgtgtccctatttgcaggtaccgtatgaataaggaccggctaattccgtgccagcagccgcggtaatacggaaggtccgggcgttatccggatttattgggtttaaagggagcgtaggccgtagattaagtgtgttgtgaaatgtagacgctcaacgtctgacttgcagcgcatactggtttacttgagtttgcacaacgttggcggaattcgtcgtgtagcggtgaaatgcttagatatgacgaagaactccgattgcgaaggcagcttgcgggagcaaaactgacgctgaagctcgaaagtgcgggtatcgaacaggattagataccctggtagtccgcacggtaaacgatggatgcccgttgtatggcctttcggctatgtgaccaagcgaaagcattaagcatcccacctggggagtacgccggcaacggtgaaactcaaaggaattgacgggggcccgcacaagcggaggaacatgtggtttaattcgatgatacgcgaggaaccttacccgggcttgaactgtaggygaacgatctagagatagtgaggcccttcggggcgcctacggaggtgctgcatggttgtcgtcagctcgtgccgtgaggtgtcggcttaagtgccataacgagcgcaacccctgttctcagttgccatcgggtgatgccgggcactctgaggatactgcctccgcaaggagtgaggaaggtggggatgacgtcaaatcagcacggcccttacgtccggggctacacacgtgttacaatggccggtacagagcgtcggtcgtatgcaaatacgatctaatctttaaaaccggtctcagttcggactggggtctgcaacccgaccccacgaagctggattcgctagtaatcgcgcatcagccatggcgcggtgaatacgttcccgggccttgtacacaccgcccgtcaagccatgaaagccgggggcgcctg

SEQ ID NO: 1524 - DNA, 1227 bp, Prevotella sp.
  SEQ065
agtcgagggaccggcgcacgggtgagtaacgcgtatccaacctwcccattactgtgggataacctgccgaaaggcagactaataccgcatrgttaaagtcggtaatggatggggatgcgtctgattagcttgttggcggggtaacggcccaccaaggcaacgatcagtaggggttctgagaggaaggtcccccacattggaactgagacacggtccaaactcctacgggaggcagcagtgaggaatattggtcaatggacgagagtctgaaccagccaagtagcgtgcaggatgacggcctatgggttgtaaactgcttttgtatggggatatgcaggtaccatacgaataaggaccggctaattccgtgccagcagccgcggtaatacggaaggtccgggcgttatccggatttattgggtttaaagggagcgtaggcyggagattaagtgtgttgtgaaatgtagacgctcaacgtctgacttgcagcgcatactggtttccttgagtacgcacaacgttggcggaattcgtcgtgtagcggtgaaatgcttagatatgacgaagaactccgattgcgaaggcagctgacgggagcgactgacgcttaagctcgaaggtgcgggtatcgaacaggattagataccctggtagtccgcacagtaaacgatggatgcccgctgttggtatatcagcggctaagcgaaagcattaagcatcccacctggggagtacgccggcaacggtgaaactcaaaggaattgacgggggcccgcacaagcggaggaacatgtggtttaattcgatgatacgcgaggaaccttacccgggcttgaattgtgaaggtgctgcatggttgtcgtcagctcgtgccgtgaggtgtcggcttaagtgccataacgagcgcaacccctctcttcagttgccatcagctgggcactctggagacactgccaccgtaaggtggaggaaggtggggatgacgtcaaatcagcacggcccttacgtccggggctacacacgtgttacaatggccggcagagggatggtgtaatgcaaattgcatcaaatcttgccggtcccagttcggatggggtctgcaacccgaccccagaagctggattcgctagtaatcgcgcatcagccatggcgcggtgaatacgttcccgggccttgtacacaccgcccgtcaagccatgaaagccgggggtgcctgaagtccgtacc

SEQ ID NO: 1525 - DNA, 1273 bp, Prevotella sp.
  SEQ072
tgatcctggctcaggatgaacgctagctacaggcttaacacatgcaagtcgcgggaccggcgcacgggtgagtaacgcgtatccaaccttcccattactacggcataccccgttgaaaggcggcctaattccgtatgcagaaagtcggtaatggatggggatgcgtccgattagccagtcggcggggtaacggcccaccgaggcatcgatcggtaggggttctgagaggaaggtcccccacactggaactgagacacggtccagactcctacgggaggcagcagtgaggaatattggtcaatgggcgtaagcctgaaccagccaagtagcgtgcaggatgacggcctatgggttgtaaactgcttttatgcggggatatgcaggtaccgcatgaataaggaccggctaattccgtgccagcagccgcggtaatacggaaggtccgggcgttatccggatttattgggtttaaagggagcgtaggcagttttttaagcgtgctgtgaaatgtaccggctcaaccggtgatgtgcagcgcgaactgggaatcttgagtacgcagtaagcaggcggaattcgtggtgtagcggtgaaatgcttagatatcacgaagaactccgattgcgtaggcagcttgctgtagcgactgacgctgaagctcgaaagtgcgggtatcgaacaggattagataccctggtagtccgcacggtaaacgatggatgcccgctgtcggtcggtcggtggccaagcgaaagcgttaagcatcccacctggggagtacgccggcaacggtgaaactcaaaggaattgacgggggcccgcacaagcggaggaacatgtggtttaattcgatgatacgcgaggaaccttacccgggcttgaactgtggaggtgctgcatggttgtcgtcagctcgtgccgtgaggtgtcggcttaagtgccataacgagcgcaaccccttttttcagttgccatcggccgggcactctgtgaatactgccgccgtaaggtggaggaaggtggggatgacgtcaaatcagcacggcccttacgtccggggstacacacgtgttacaatggcgcgcagcgagtcggccgtatgtaaatacggtccaatccttcgcgcctcagttcggatggggtctgcaacccgaccccagaagctggattcgctagtaatcgcgcatcagccatggcgcggtgaatacgttcccgggccttgtacacaccgcccgtcaagccatgaaagccgggggtgcctgaagtccgtacc

SEQ ID NO: 1526 - DNA, 1274 bp, Prevotella sp.
  SEQ116
ttgatcctggctcaggatgaacgctagctacaggcttaacacatgcaagtcgagggaccggcgcacgggtgagtaacgcgtatccaactttcccattactgtggaataacctgccgaaaggcagactaataccgcatagttaaagtcggtaatggatggggatgcgtctgattagcttgttggcggggtaacggcccaccaaggcgacgatcagtaggggttctgagaggaaggtcccccacattggaactgagacacggtccaaactcctacgggaggcagcagtgaggaatattggtcaatgggcgagagcctgaaccagccaagtagcgtgcaggatgacggcctatgggttgtaaactgcttttgtatggggatatgcaggtaccatacgaataaggaccggctaattccgtgccagcagccgcggtaatacggaaggtccaggcgttatccggatttattgggtttaaagggagcgtaggccggagattaagtgtgttgtgaaatgtagacgctcaacgtctgacttgcagcgcatactggtttccttgagtacgcacaacgttggcggaattcgtcgtgtagcggtgaaatgcttagatatgacgaagaactccgattgcgaaggcagctgacgggagcgactgacgcttaagctcgaaggtgcgggtatcaaacaggattagataccctggtagtccgcacagtaaacgatggatgcccgctgttggtatatcagcggctaagcgaaagcattaagcatcccacctggggagtacgccggcaacggtgaaactcaaaggaattgacgggggcccgcacaagcggaggaacatgtggtttaattcgatgatacgcgaggaaccttacccgggcttgaattgtgaaggtgctgcatggttgtcgtcagctcgtgccgtgaggtgtcggcttaagtgccataacgagcgcaacccctctcttcagttgccatcagctgggcactctggagacactgccaccgtaaggtggaggaaggtggggatgacgtcaaatcagcacggcccttacgtccggggctacacacgtgttacaatggccggcagagggacggtgtaatgcaaattgcatccaatcttgccggtcccagttcggatggggtctgcaacccgaccccagaagctggattcgctagtaatcgcgcatcagccatggcgcggtgaatacgttcccgggccttgtacacaccgcccgtcaagccatgaaagccgggggtgcctgaagtccgtacc

SEQ ID NO: 1527 - DNA, 1340 bp, Prevotella sp.
  SG12
cccctgatggcgaccggcgcacgggtgagtaacgcgtatccaacctgcccttcaccacgggataacccggcgaaagtcggactaataccgtatgttgtccattgacggcatccgatttggacgaaaggcttagcggtgagggatggggatgcgtccgattagcttgacggcggggtaacggcccaccgtggcaacgatcggtaggggttctgagaggaaggtcccccacactggaactgagacacggtccagactcctacgggaggcagcagtgaggaatattggtcaatgggcggaagcctgaaccagccaagtagcgtgcaggatgacggccctatgggttgtaaactgcttttatgcggggataaaggggcccacgtgtgggtttttgcaggtaccgcatgaataaggaccggctaattccgtgccagcagccgcggtaatacggaaggtccgggcgttatccgggatttattgggtttaaagggagcgtaggccgccccttaagcgtgttgtgaaatgcgggtgctcaacatccgacttgcagcgcgaactggggggcttgagtgcgccgaaagtaggcggaattcgtggtgtagcggtgaaatgcttagatatcacgaagaactccgattgcgaaggcagcttactgtagcgcaactgacgctgatgctcgaaagcgtgggtatcgaacaggattagataccctggtagtccacgcggtaaacgatggatgctcgttgtcggcctttatggtcggtgaccaagcgaaagcgttaagcatcccacctggggagtacgccggcaacggtgaaactcaaaggaattgacgggggcccgcacaagcggaggaacatgtggtttaattcgatgatacgcgaggaaccttacccgggcttgaactgcggcggaacgattccgagaggatgaggcccttcggggctgccgcggaggtgctgcatggttgtcgtcagctcgtgccgtgaggtgtcggcttaagtgccataacgagcgcaacccccgtcttcagttgccatcgggttatgctgggcactctggagatactgccaccgcaaggtgtgaggaaggtggggacgacgtcaaatcagcacggcccttacgtccggggctacacacgtgttacaatggcgcatacagagagtaggtggcatgcgaatgccatccaatccttaaagtgcgtctcagttcggactggggtctgcaacccgaccccacgaagctggattcgctagtaatcgcgcatcagccatggcgcggtgaatacgttcccgggccttgtacacaccgcccgtcaagccatgaaagccgggggggcggcc

SEQ ID NO: 1528 - DNA, 1451 bp, Prevotella sp.
  oral clone AA020
ttcaggatgaacgctagctacaggcttaacacrtgcaagtcgaggggaaacgacggggaagcttgcttctccggtcgtcgaccggcgcacgggtgagtaacgcgtatccaacctgcctctgaccaagggataacccgtcgaaagtcggactaataccttatgcagtcgtcggaagtcatctgatgacgacgaaagatttcatcggtgagagatggggatgcgtctgattagcttgttggcggggtaacggcccaccaaggcgacgatcagtaggggttctgagaggaaggtcccccacattggaactgagacacggtccaaactcctacgggaggcagcagtgaggaatattggtcaatggacgagagtctgaaccagccaagtagcgtgcaggatgacggccctatgggttgtaaactgcttttatgcggggataaagtgagggacgtgtccttcattgcaggtaccgcatgaataaggaccggctaattccgtgccagcagccgcggtaatacggaaggtccgggcgttatccggatttattgggtttaaagggagcgtaggccgtggattaagcgtgttgtgaaatgtagacgctcaacgtctgacttgcagcgcgaactggtccacttgagtgtgcacaacgcaggcggaattcgtcgtgtagcggtgaaatgcttagatatgacgaagaaccccgattgcgaaggcagcttgcgggagcacgactgacgctgaagctcgaaagtgcgggtatcgaacaggattagataccctggtagtccgcacggtaaacgatggatgcccgttatcaggctttttagtctggtgaccaagcgaaagcattaagcatcccacctggggagtacgccggcaacggtgaaactcaaaggaattgacgggggcccgcacaagcggaggaacatgtggtttaattcgatgatacgcgaggaaccttacccgggcttgaattgcagacgtacgattcagagatgaagaggcccttcggggcgtctgtgaaggtgctgcatggttgtcgtcagctcgtgccgtgaggtgtcggcttaagtgccataacgagcgcaacccctattctcggttgccatcgggtaatgccgggcactccgtggagactgccaccgtaagtgtgaggaagtggggacgacgtcaaatcagcacggsccttacgtccggggctacacacgtgttacaatggccggtacagcgagtcggccgcatgcaaatgcggtccaatcctgaaagccggtcccagttcggaccggggtctgcaacccgaccccgcgaagccggattcgctagtaatcgcgcatcagccatggcgcggtgaatacgttcccgggccttgtacacaccgcccgtcaagccatgaaagccgggggtgcctgaagtccgttaccgcgagggtcggcctaaggcaaaaccggtgattg

SEQ ID NO: 1529 - DNA, 1365 bp, Prevotella sp.
  oral clone ASCG10
  modified_base (1)..(1): a, c, t, g, unknown or other
  modified_base (259)..(259): a, c, t, g, unknown or other
ngagtttgatcttggctcaggatgaacgctagctacaggcttaacacatgcaagtcgagggaccggcgcacgggtgcgtaacgcgtatcaaacctgcctcatactcggggatagccttgcgaaagtaagattaatacccgatgttcaaagtcggtatgagatggtgatgcgtccgattaggtagtaggcggggtaacggcccacctagccttcgatcggtaggggttctgagaggaaggtcccccacactgtaactganacacggtccagactcctacgggaggcagcagtgaggaatattggtcaatggacgcaagtctgaaccagccaagtagcgtgaaggatgacggcctctgggttgtaaactgcttttagttgggaatatgtatgtaccttcagaaaaaggaccggctaattccgtgccagcagccgcggtaatacggaaggtccaggcgttatccggatttattgggtttaaagggagcgtaggcggattattaagtcagtggtgaaagacggtggctcaaccatcgttagccattgatactggtagtcttgagtgcagcaggggatgctggaactcgtggtgtagcggtgaaatgcttagatatcacgatgaactccgatcgcgaaggcaggtgtccgggctgactgacgctgaggctcgaaagtgtgggtatcaaacaggattagataccctggtagtccacacagtaaacgatgtatactcgcggtttgcgagtaagccgccaagcgaaagcattaagtataccacctggggagtacgccggcaacggtgaaactcaaaggaattgacgggggcccgcacaagcggaggaacatgtggtttaattcgatgatacgcgaggaaccttacccgggcttgaactatggaggtgctgcatggttgtcgtcagctcgtgccgtgaggtgtcggcttaagtgccataacgagcgcaaccctttttcttggttgccatcagctgggcactccagggatactgccatcgtaagatggaggaaggtggggatgacgtcaaatcagcacggcccttacgtccggggctacacacgtgttacaatggggggcagaaggtcgctacctggtgacaggatgctaatctcacctctctcagttcggatggagtctgcaacccgactccagaagctggattcgctagtaatcgcgcatcagccatggcgcggtgaatacgttcccgggccttgtacacaccgcccgtcacaccacgaaagtcggaagtacccaaagccggtgggtagccagccgtctaaggtaaagtcgatgattggggtgaagtcgtaacaaggtagccgtatcggaaggtgcggctggaacacctcctt

SEQ ID NO: 1530 - DNA, 1319 bp, Prevotella sp.
  oral clone ASCG12
  modified_base (334)..(334): a, c, t, g, unknown or other
gagtttgatcttggctcaggatgaacgctagctacaggcttaacacatgcaagtcgcgggaccggcgcacgggtgagtaacgcttatccaacctgcccttcaccacgggataacccggcgaaagtcggactaataccgtatgttgaaaggcggtgaaggatggggatgcgtccgattagctggacggcggggtaacggcccaccgtggcaacgatcggtaggggttctgagaggaaggtcccccacactggaactgagacacggtccagactcctacgggaggcagcagtgaggaatattggtcaatgggcgtaagcctgaaccagccaagtancgtgcaggatgacggccttatggttgtaaactgcttttatgcggggatatgcaggtaccgcatgaataaggaccggctaattccgtgccagcagccgcggtaatacggaaggtccgggcgttatccggatttattgggtttaaagggagcgtaggccgcgccttaagcgtgttgtgaaatccggttgctcaacatccggcttgcagcgcgaactggggcgcttgagtgcgcagaaagtaggcggaattcgtggtgtagcagtgaaatgcttagatatcacgaggaactccgattgcgaaggcagcctactgtagcgactgacgctgatgctcgaaagcgtgggtatcgaacaggattagataccctggtagtccacgcggtaaacgatggatgctcgttgtcggccggtcggtgaccaagcgaaagcgttaagcatcccacctggggagtacgccggcaacggtgaaactcaaaggaattgacgggggcccgcacaagcggaggaacatgtggtttaattcgatgatacgcgaggaaccttacccgggcttgaactgcggaggtgctgcatggttgtcgtcagctcgtgccgtgaggtgtcggcttaagtgccataacgagcgcaacccccgtcttcagttgccatcggccgggcactctggagatactgccaccgcaaggtggaggaaggtggggatgacgtcaaatgagcacggcccttacgtgggctacacacgtgctacaatggcgtacagagggcgacgaagccgcgaggtggagtgaatctcagtacgtctaagtccggatggagtctgcaacccgaccccagaagctggattcgctagtaatcgcgcatcagccatggcgcggtgaatacgttcccgggccttgtacacaccgcccgtcaagccatgaaagccgggggcgcctgaagtccgtgtcggcctagggtgaaaccggtgattggggctaagtcgtaacaagg

SEQ ID NO: 1531 - DNA, 1470 bp, Prevotella sp.
  oral clone AU069
agagtttgatcatggctcaggatgaacgctagctacaggcctaacacatgcaagtcgtggggcagcgggtatgcttgttttcaagtatatgccggcgaccggcgcacgggtgagtaacgcgtatccaacctgcccatcacaagggaataacccgtcgaaagtcggcctaatgccctatgtattccgatgaagtcctctgaatcggaataaagcatttgcggtgatggatggggatgcgtctgattagcttgtcggcggggtaacggcccaccgaggcaacgatcagtaggggttctgagaggaaggtcccccacattggaactgagacacggtccaaactcctacgggaggcagcagtgaggaatattggtcaatgggcgtgagcctgaaccagccaagtagcgtgcaggatgacggccctatgggttgtaaactgcttttatacggggataaagtgagggacgcgtccctttttgcaggtaccgtatgaataaggaccggctaattccgtgccagcagccgcggtaatacggaaggtcctggcgttatccggatttattgggtttaaagggagcgcaggctgcactttaagcgtgttgtgaaatgtaccggctcaaccggtaacgtgcagcgcgaactggggtgcttgagtacgaagagggaaggcggaactcgtggtgtagcggtgaaatgcttagatatcacgaggaactccgatcgcgaaggcagctttccgtttcggaactgacgctgaggctcgaaagtgcgggtatcgaacaggattaggtaccctggtagtccgcacggtaaacgatggatgcccgctgtcggcgccttgcgccggcggccaagcgaaagcgttaagcatcccacctggggagtacgccggcaacggtgaaactcaaaggaattgacgggggcccgcacaagcggaggaacatgtggtttaattcgatgatacgcgaggaaccttacccgggcttgaatcgcaggaagaacgatacagagatgttgaggtccttcgggactcctgcgaaggtgctgcatggttgtcgtcagctcgtgccgtgaggtgtcggcttaagtgccataacgagcgcaacccctctccccagttgccatcgggtgatgccgggcacttcggggacactgccgccgcaaggtgcgaagaaggccgggatgacgtcaaatcagcacggcccttacgtccggggctacacacgtgttacaatggccggcacagaaggccggtgcggcgcgagccgcatctaatcttgaaaaccggtcttagttcggactggggtctgcaacccgaccccacgaagctggattcgctagtaatcgcgcatcagccacggcgcggtgaatacgttcccgggccttgtacacaccgcccgtcaagccatgaaagccgggggtgcctgaagtccgtgaccgcgaggatcggcctagggcaaaactggtgattgg

SEQ ID NO: 1532 - DNA, 1446 bp, Prevotella sp.
  oral clone CY006
gagtttgattctggctcaggatgaacgctagctacaggcctaacacatgcgagtcgtggggcagcgggtatgcttgttttcaagtatatgccggcgaccggcgcacgggtgagtaacgcgtatccaacctgcccatcacaagggaataacccgtcgaaagtcggcctaatgccctatgtattccgatgaagtcctctgaatcggaataaagcatttgcggtgatggatggggatgcgtctgattagcttgtcggcggggtaacggcccaccgaggcaacgatcagtaggggttctgagaggaaggtcccccacattggaactgagacacggtccaaactcctacgggaggcagcagtgaggaatattggtcaatgggcgtgagcctgaaccagccaagtagcgtgcaggatgacggccctatgggttgtaaactgcttttatacggggataaaagggtgaacgtgttctcctttgcaggtaccgtatgaataaggaccggctaattccgtgccagcagccgcggtaatacggaaggtcctggcgttatccgggtttattgggtttaaagggagcgcaggctgcactttaagcgtgttgttaaatgtgccggctcaaccggtaacgtgcagcgcgaactggggtgcttgagcacgaagagggaaggcggaactcgtggtgtagcggtgaaatgcttagatatcattaggaactccgatcgcgaaggcagctttccgtttcggaactgacgctgaggctcgaaagtgcgggtatcgaacaggattagataccctggtagtccgcacggtaaacgatggatgctcgctgttggatatttttattcagtggctaagtgaaaacgttaagcatcccacctggggagtacgccggcaacggtgaaactcaaaggaattgacgggggcccgcacaagcggaggaacatgtggtttaattcgatgatacgcgaggaaccttacccgggcttgaattgcagctgaacgatccagagatggtgaggcccttcggggcagctgtgaaggtgctgcatggttgtcgtcagctcgtgccgtgaggtgtcggcttaagtgccataacgagcgcaacccctctccgcagttgccatcggttgatgccgggcactctgcggacactgcctccgcaaggagtgaggaaggtggggatgacgtcaaatcagcacggcccttacgtccggggctacacacgtgttacaatggcgcgtacagagtgtcggtgctgtgcaaacagtatctaaccaataaaacgcgtcccagttcggaccggggtctgcaacccgaccccgcgaactggattcgctagtaatcgcgcatcagccatggcgcggtgaatacgttcccgggccttgtacacaccgcccgtcaagccatgaaagccgmgggcgcctgaagtccgtgaccgcaaggatcggc

SEQ ID NO: 1533 - DNA, 1524 bp, Prevotella sp.
  oral clone DA058
gagtttgatyctggctcaggatgaacgctagctacaggcttaacccatgcaagtcgaggggcatcaaattggttgcttgcaaccgatgttgscgaccggcgcacgggtgagtaacgcgtatccaaccttccctttactctggtatagcccagcgaaagttggattaataccggatgttatcgaaagctctcatgagactttgatcaaagattttatcggtaaaggatggggatgcgtctgattaggcagttggcggggtaacggcccaccaaaccgacgatcagtaggggttctgagaggaaggtcccccacattggaactgagacacggtccaaactcctacgggaggcagcagtgaggaatattggtcaatggacgtaagtctgaaccagccaagtagcgtgcaggatgactgccctatgggttgtaaactgcttttatgcggggataaagtcagccacgtgtggttgtttgcaggtaccgcatgaataaggaccggctaattccgtgccagcagccgcggtaatacggaaggtccgggcgttatccggatttattgggtttaaagggagcgtaggctgttggttaagcgtgttgtgaaatgtagatgctcaacatctgaattgcagcgcgaactgtccgacttgagtgcgcggaaagcaggcggaattcgttgtgtagcggtgaaatgcttagatatgacgaagaactccgattgcgaaggcagcttgctgtagcgtaactgacgctgaagctcgaaagtgcgggtatcgaacaggattagataccctggtagtccgcacggtaaacgatggatgctcgctgtgtgcttatttttagtatgcggctaagggaaaccattaagcatcccacctggggagtacgccggcaacggtgaaactcaaaggaattgacgggggcccgcacaagcggaggaacatgtggtttaattcgatgatacgcgaggaaccttacccgggcttgaactgccggtgctggcatgagagatcatgctttccttcgggacactggtggaggtgctgcatggttgtcgtcagctcgtgccgtgaggtgtcggcttaagtgccataacgagcgcaacccctgtcgtcagttgccatcaggtaatgctgggcactctggtgatactgccaccgtaaggtgtgaggaaggtggggatgacgtcaaatcagcacggcccttacgtccggggctacacacgtgttacaatggcgtgtacagcgagtcggtaccgggcaaccggtatccaatcaatataacacgtctcagttcggactggggtctgcaacccgaccccacgaagctggattcgctagtaatcgcgcatcagccatggcgcggtgaatacgttcccgggccttgtacacaccgcccgtcaagccatgaaagccgggggcgcttgaagtccgtgaccgcaaggatcggcctagagcgaaactggtaattggggctaagtcgtaacaaggtagccgtaccggaaggtgcggctggaacacctccttc

SEQ ID NO: 1534 - DNA, 1356 bp, Prevotella sp.
  oral clone FL019
gagtttgattctggctcaggatgaacgctagctacaggcctaacacatgcaagtcgtgggaccggcgcacgggtgagtaacgcgtatccaacctgcccatcacaagggaataacccgtcgaaagtcggcctaatgccctatgtgtaaaggcggtgatggatggggatgcgtctgattagcttgtcggcggggtaacggcccaccgaggcgacgatcagtaggggttctgagaggaaggtcccccacattggaactgagacacggtccaaactcctacgggaggcagcagtgaggaatattggtcaatgggcgtgagcctgaaccagccaagtagcgtgcaggatgacggcctatgggttgtaaactgcttttatacggggatatgcaggtaccgtatgaataaggaccggctaattccgtgccagcagccgcggtaatacggaaggtcctggcgttatccggatttattgggtttaaagggagcgcaggctgcactttaagcgtgttgtgaaatgtaccggctcaaccggtaacgtgcagcgcgaactggggtgcttgagtacgaagagggaaagcggaactcgtggtgtagcggtgaaatgcttagatatcacgaggaactccgatcgcgaaggcagctttccgtttcgactgacgctgaggctcgaaagtgcgggtatcgaacagggttagataccctggtagtccgcacggtaaacgatggatgctcgctgttggatattcagtggctaagtgaaaacgttaagcatcccacctggggagtacgccggcaacggtgaaactcaaaggaattgacgggggcccgcacaagcggaggaacatgtggtttaattcgatgatacgcgaggaaccttacccgggcttgaattgtgaaggtgctgcatggttgtcgtcagctcgtgccgtgaggtgtcggcttaagtgccataacgagcgcaacccctctccgcagttgccatcggccgggcactctgcggacactgcctccgcaaggaggaggaaggtggggatgacgtcaaatcagcacggcccttacgtccggggctacacacgtgttacaatggcgcgcagagtgtcggtgctgtgcaaacagtatctaatcaatcgcgtcccagttcggacggggtctgcaacccgaccccggaagctggattcgctagtaatcgcgcatcagccatggcgcggtgaatacgttcccgggccttgtacacaccgcccgtcaagccatgaaagccgggggcgcctgaagtccgttcggcctagggcgagaccggtgattggggctaagtcgtaacaaggtagccgtaccggaaggtgcggctggatcacctcctt

SEQ ID NO: 1535 - DNA, 1356 bp, Prevotella sp.
  oral clone FU048
gagtttgattctggctcaggatgaacgctagctacaggcttaacacatgcaagtcgagggaccggcgcacgggtgagtaacgcgtatccaaccttcccattactgtggaataacctgccgaaaggcagactaataccgcatggttaaagtcggtaatggatggggatgcgtctgattagcttgttggcggggtaacggcccaccaaggcgacgatcagtaggggttctgagaggaaggtcccccacatcggaactgagacacggtccaaactcctacgggaggcagcagtgaggaatattggtcaatggacgtaagtctgaaccagccaagtagcgtgcaggatgacggcctatgggttgtaaactgcttttgtatggggatatgcaggtaccatacgaataaggaccggctaattccgtgccagcagccgcggtaatacggaaggtccaggcgttatccggatttattgggtttaaagggagcgtaggccggagattaagtgtgttgtgaaatgtagacgctcaacgtctgacttgcagcgcatactggtttccttgagtacgcacaacgttggcggaattcgtcgtgtagcggtgaaatgcttagatatgacgaagaactccgattgcgaaggcagctgacgggagcgactgacgcttaagctcgaaggtgcgggtatcaaacaggattagataccctggtagtccgcacagtaaacgatggatgcccgctgttggtatatcagcggctaagcgaaagcattaagcatcccacctggggagtacgccggcaacggtgaaactcaaaggaattgacgggggcccgcacaagcggaggaacatgtggtttaattcgatgatacgcgaggaaccttacccgggcttgaattgtgaaggtgctgcatggttgtcgtcagctcgtgccgtgaggtgtcggcttaagtgccataacgagcgcaacccctctcttcagttgccatcagctgggcactctggagacactgccaccgtaaggtggaggaaggtggggatgacgtcaaatcagcacggcccttacgtccggggctacacacgtgttacaatggccggcagagggacggtgtaatgcaaattgcatccaatcttgccggtcccagttcggatggggtctgcaacccgaccccagaagctggattcgctagtaatcgcgcatcagccatggcgcggtgaatacgttcccgggtcttgtacacaccgcccgtcaagccatgaaagccgggggtgcctgaagtccgttcggcctagggcaaaactggtgattggggctaagtcgtaacaaggtagccgtaccggaaggtgcggttggatcacctcctt

SEQ ID NO: 1536 - DNA, 1354 bp, Prevotella sp.
  oral clone FW035
gagtttgatcctggctcaggatgaacgctagctacaggcttaacacatgcaagtcgagggaccggcgaatgggtgagtaacgcgtatccaacctgcccccggctggggtataacccgtcgaaaggcggcctaatcccccatggttaaagccggccggggatggggatgcgtccgattagcttgctggtgaggtaacggctcaccagggcatcgatcggtaggggttctgagaggaaggtcccccacactggtactgagacacggaccagactcctacgggaggcagcagtgaggaatattggtcaatgggcgcaagcctgaaccagccaagtagcgtgcaggatgaaggcctatgggtcgtaatctgcttttatgtggggatatgcaggtaccacatgaataaggaccggctaattccgtgccagcagccgcggtaatacggaaggtccgggcgttatccggatttattgggtttaaagggagcgtaggccgcctcttaagcgtgttgtgaaaaccgggcgctcaccgtccggcttgcagcgcgaactggggggcttgagtgcgtgcgacgccggcggaattcgtcgtgtagcggtgaaatgcttagatatgacgaggaactccgattgcgaaggcagctggcgagtgcgactgacgctaatgctcgaaggcgcgggtatcgaacaggattagataccctggtagtccgcgctgtaaacgatggatgcccgccgtgggtatttccgcggccaagcgaaagcgttaagcatcccacctggggagtacgccggcaacggtgaaactcaaaggaattgacgggggcccgcacaagcggaggaacatgtggtttaattcgatgatacgcgaggaaccttacccgggcttgaattgcgaaggtgctgcatggttgtcgtcagctcgtgccgtgaggtgtcggcttaagtgccataacgagcgcaacccctctccgcagttgccatcggccgggcactctgcggacactgccgccgcaaggtggaggaaggtggggatgacgtcaaatcagcacggcccttacgtccggggctacacacgtgttacaatggccggcagagagttgcgcgcgcaagcgttgccaatccctccggcctcagttcggatggggtctgcaacccgaccccagaagctggattcgctagtaatcgcgcatcagccatggcgcggtgaatacgttcccgggccttgtacacaccgcccgtcaagccatgaaagctgggggcgcctgaagtccgtgtcggcctagggcgaaaccggtgattggggctaagtcgtaacaaggtagccgtaccggaaggtgcggctggatcacctcctt

SEQ ID NO: 1537 - DNA, 1356 bp, Prevotella sp.
  oral clone GI030
gagtttgattctggctcaggatgaacgctagctacaggcttaacacatgcaagtcgagggaccggcgcacgggtgagtaacgcgtatccaacctacccattactgtgggataacctgccgaaaggcagactaataccgcatggttaaagtcggtaatggatggggatgcgtctgattagcttgttggcggggtaacggcccaccaaggcaacgatcagtaggggttctgagaggaaggtcccccacattggaactgagacacggtccaaactcctacgggaggcagcagtgaggaatattggtcaatggacggaagtctgaaccagccaagtagcgtgcaggatgacggcctatgggttgtaaactgcttttgtatggggatatgcaggtaccatacgaataaggaccggctaattccgtgccagcagccgcggtaatacggaaggtccaggcgttatccggatttattgggtttaaagggagcgtaggccggagattaagtgtgttgtgaaatgtagacgctcaacgtctgacttgcagcgcatactggtttccttgagtacgcacaacgttggcggaattcgtcgtgtagcggtgaaatgcttagatatgacgaagaactccgattgcgaaggcagctgacgggagcgactgacgcttaagctcgaaggtgcgggtatcgaacaggattagataccctggtagtccgcacagtaaacgatggatgcccgctgttggtatatcagcggctaagcgaaagcattaagcatcccacctggggagtacgccggcaacggtgaaactcaaaggaattgacgggggcctgcacaagcggaggaacatgtggtttaattcgatgatacgcgaggaaccttacccgggcttgaattgtgaaggtgctgcatggttgtcgtcagctcgtgccgtgaggtgtcggcttaagtgccataacgagcgcaacccctctcttcagttgccatcagctgggcactctggagacactgccaccgtaaggtggaggaaggtggggatgacgtcaaatcagcacggcccttacgtccggggctacacacgtgttacaatggccggcagagggatggtgtaatgcaaattgcatcaaatcttgccggtcccagttcggatggggtctgcaacccgaccccagaagctggattcgctagtaatcgcgcatcagccatggcgcggtgaatacgttcccgggccttgtacacaccacccgtcaagccatgaaagccgggggtgcctgaagtccgttcggcctagggcaaaactggtgattggggctaagtcgtaacaaggtagccgtaccggaaggtgcggctggatcacctcctt

SEQ ID NO: 1538 - DNA, 1356 bp, Prevotella sp.
  oral clone GI032
gagtttgatcctggctcaggatgaacgctagctacaggcttaacacatgcaagtcgagggaccggcgcacgggtgagtaacgcgtatccaacctgcctctgactaagggataacccggcgaaagtcggactaataccttatgaggaaagtcggtcagtgatggggatgcgtctgattagcttgttggcggggtaacggcccaccaaggcaacgatcagtaggggttctgagaggaaggtcccccacattggaactgagacacggtccaaactcctacgggaggcagcagtgaggaatattggtcaatgggcgagagcctgaaccagccaagtagcgtgcaggatgacggcctatgggttgtaaactgcttttatgtggggatatgcaggtaccacatgaataaggaccggctaattccgtgccagcagccgcggtaatacggaaggtccaggcgttatccggatttattgggtttaaagggagcgtaggccgtggattaagcgtgttgtgaaatgtagacgctcaacgtctgaattgcagtgcgaactggttcacttgagtatgcacaacgtaggcggaattcgtcgtgtagcggtgaaatgcttagatatgacgaagaactccgattgcgaaggcagcttacgggagcaactgacgctgaagctcgaaggtgcgggtatcaaacaggattagataccctggtagtccgcacagtaaacgatggatgcccgttgttagttaattagcgaccaagcgaaagcattaagcatcccacctggggagtacgccggcaacggtgaaactcaaaggaattgacgggggcccgcacaagcggaggaacatgtggtttaattcgatgatacgcgaggaaccttacccgggcttgaattgtgaaggtgctgcatggttgtcgtcagctcgtgccgtgaggtgtcggcttaagtgccataacgggcgcaacccctctcttcagttgccatcagctgggcactctggagacactgccaccgtaaggtggaggaaggtggggatgacgtcaaatcagcacggcccttacgtccggggctacacacgtgttacaatggccggcagagggacggtgtaatgcaaattgcatccaatcttgccggtcccagttcggatggggtctgcaacccgaccccagaagctggattcgctagtaatcgcgcatcagccatggcgcggtgaatacgttcccgggccttgtacacaccgcccgtcaagccatgaaagccgggggtgcctgaagtccgttcggcctagggcaaaactggtaattggggctaagtcgtaacaaggtagccgtaccggaaggtgcggctggatcacctcctt

SEQ ID NO: 1539 - DNA, 1341 bp, Prevotella sp.
  oral clone GI059
gagtttgatcctggctcaggatgaacgctagctacaggcttaacacatgcaagtcgagggaccggcgcacgggtgagtaacgcgtatccaaccttcccattactgtgggataacctgccggaaggcagactaatacctcatagttaaagtcggtaatggatggggatgcgtctgattagcttgttggcggggtaacggcccaccaaggcaacgatcagtaggggttctgagaggaaggtcccccacattggaactgagacacggtccaaactcctacgggaggcagcagtgaggaatattggtcaatggacgtaagtctgaaccagccaagtagcgtgcaggatgacggcctatgggttgtaaactgcttttgtatggggatatgcaggtaccatacgaataaggaccggctaattccgtgccagcagccgcggtaatacggaaggttcgggcgttatccggatttattgggtttaaagggagcgtaggccggagattaagtgtgttgtgaaatgtagacgctcaacgtctgacttgcagcgcatactggtttccttgagtacgcacaacgttggcggaattcgtcgtgtagcggtgaaatgcttagatatgacgaagaactccgattgcgaaggcagctgacgggagcgactgacgctgaagctcgaaggtgcgggtatcgaacaggattagataccctggtagtccgcacagtaaacgatggatgcccgctgttggtatatcagcggctaagcgaaagcattaagcatcccacctggggagtacgccggcaacggtgaaactcaaaggaattgacgggggcccgcacaagcggaggaacatgtggtttaattcgatgatacgcgaggaaccttacccgggcttgaattgtgaaggtgctgcatggttgtcgtcagctcgtgccgtgaggtgtcggcttaagtgccataacgagcgcaacccctctcttcagttgccatcagctgggcactctggagacactgccaccgtaaggtggaggaaggtggggatgacgtcaaatcagcacggcccttacgtccggggctacacacgtgttacaatggccggcagagggacggtgtaatgcaaattgcatccaatcttgccggtcccagttcggatggggtctgcaacccgaccccagaagctggattcgctagtaatcgcgcatcagccatggcgcggtgaatacgttcccgggccttgtacacaccgcccgtcaagccatgaaagccgggggtgcctgaagtccgttcggcctagggcaaaactggtaattggggctaagtcgtaacaaggtagccgtaccggaaggtgcgg

SEQ ID NO: 1540 - DNA, 1357 bp, Prevotella sp.
  oral clone GU027
gagtttgattctggctcaggatgaacgctagctacaggcttaacacatgcaagtcgcgggaccggcgcacgggtgagtaacgcgtatccaacctgcccttcaccacgggataacccggcgaaagtcggactaataccgtatgttgaaaggcggtgaaggatggggatgcgtccgattagccagacggcggggtaacggcccaccgtggcgacgatcggtaggggttctgagaggaaggtcccccacactggaactgagacacggtccagactcctacgggaggcagcagtgaggaatattggtcaatgggcgtaagcctgaaccagccaagtagcgtgcaggatgacggcctatgggttgtaaactgcttttatgcggggatatgcaggtaccgcatgaataaggaccggctaattccgtgccagcagccgcggtaatacggaaggtccgggcgttatccggatttattgggtttaaagggagcgtaggccgcgccttaagcgtgttgtgaaatccgggtgctcaacatccggcttgcagcgcgaactggggcgcttgagtgcgcagaaagtaggcggaattcgtggtgtagcggtgaaatgcttagatatcacgaggaactccgattgcgaaggcagcctactgtagcgactgacgctgatgctcgaaagcgtgggtatcgaacaggattagataccctggtagtccacgcggtaaacgatggatgctcgttgtcggccggtcggtgaccaagcgaaagcgttaagcatcccacctggggagtacgccggcaacggtgaaactcaaaggaattgacgggggcccgcacaagcggaggaacatgtggtttaattcgatgatacgcgaggaaccttacccgggcttgaactgcggaggtgctgcatggttgtcgtcagctcgtgccgtgaggtgtcggcttaagtgccataacgagcgcaacccccgtcttcagttgccatcggccgggcactctggagatactgccaccgcaaggtggaggaaggtggggatgacgtcaaatcagcacggcccttacgtccggggctacacacgtgttacaatggcgcacagagagtcggtggcatgcgagtgccatccaatcctctgcgtctcagttcggatggggtctgcaacccgaccccagaagctggattcgctagtaatcgcgcatcagccatggcgcggtgaatacgttcccgggccttgtacacaccgcccgtcaagccatgaaagccgggggcgcctgaagtccgtgtcggcctagggtgaaaccggtgattggggctaagtcgtaacaaggtagccgtaccggaaggtgcggctggatcacctcctt

SEQ ID NO: 1541 - DNA, 1357 bp, Prevotella sp.
  oral clone HF050
gagtttgattctggctcaggatgaacgctagctacaggcttaacacatgcaagtcgagggaccggcgcacgggtgcgtaacgcgtatcaaacctgcctcatactcggggatagccttgcgaaagtaagattaatacccgatgttcaaagtcggtatgagatggtgatgcgtccgattaggtagtaggcggggtaacggcccacctagccttcgatcggtaggggttctgagaggaaggtcccccacactggaactgagacacggtccagactcctacgggaggcagcagtgaggaatattggtcaatggacgcaagtctgaaccagccaagtagcgtgcaggatgacggcctctgggttgtaaactgcttttagttgggaatatgtatgtaccttcagaaaaaggaccggctaattccgtgccagcagccgcggtaatacggaaggtccaggcgttatccggatttattgggtttaaagggagcgtaggcggattattaagtcagtggtgaaagacggtggctcaaccatcgttaaccattgaaactggtagtcttgagtgcagacagggatgctggaactcgtggtgtagcggtgaaatgcttagatatcacgatgaactccgatcgcgaaggcaggtgtccgggctgactgacgctgaggctcgaaagtgtgggtatcacacaggattagataccctggtagtccacacagtaaacgatgtatactcgcggtttgcgagtaagccgccaagcgaaagcattaagtataccacctggggagtacgccggcaacggtgaaactcaaaggaattgacgggggcccgcacaagcggaggaacatgtggtttaattcgatgatacgcgaggaaccttacccgggcttgaactatggaggtgctgcatggttgtcgtcagctcgtgccgtgaggtgtcggcttaagtgccataacgagcgcaacccttttccttggttgccatcagctgggcactccagggaaactgccatcggtaagatggaggaaggtggggatgacgtcgaatcagcacggcccttacgtccggggctacacacgtgttacaatggggggcagaaggtcgctacctggtgacaggatgctaatctgccctctctcagttcggatggagtctgcaacccgactccagaagctggattcgctagtaatcgcgcatcagccatggcgcggtgaatacgttcccgggccttgtacacaccgcccgtcaagccatgaaagccgggggtgcctgaaagccgtgtcggcctagggtaaaactggtgattggggctaagtcataacaaggtacccgtaccggaaggtgcggctggaacacctcctt

SEQ ID NO: 1542 - DNA, 1518 bp, Prevotella sp.
  oral clone ID019
gagtttgatcctggctcaggatgaacgctagctacaggcttaacacatgcaagtcgaggggcagcatggaagaagcttgcttcttctgatggcgaccggcgcacgggtgcgtaacgcgtatcaaacctgcctcatactcggggatagccttgcgaaagtaagattaatacccgatgttattagttctccgcatggtggactaatcaaagatttatcggtatgagatggtgatgcgtccgattaggtagtaggcggggtaacggcccacctagccttcgatcggtaggggttctgagaggaaggtcccccacactggaactgagacacggtccagactcctacgggaggcagcagtgaggaatattggtcaatggacgaaagtctgaaccagccaagtagcgtgcaggatgacggccctccgggttgtaaactgctttcagtcgggaataaaaaaagggacgtgtcccttattgtatgtaccttcagaaaaaggaccggctaattccgtgccagcagccgcggtaatacggaaggtccaggcgttatccggatttattgggtttaaagggagcgtaggcggattgttaagtcagcggttaaagggtgtggctcaaccatacattgccgttgaaactggcgatcttgagtgcagacagggatgccggaattcgtggtgtagcggtgaaatgcttagatatcatgaagaactccgatcgcgaaggcaggtgtccgggctgcaactgacgctgaggctcgaaagtgtgggtatcaaacaggattagataccctggtagtccacacagtaaacgatgtatactcgcggtttgcgatagattgtaagccgccaagcgaaagcattaagtataccacctggggagtacgccggcaacggtgaaactcaaaggaattgacgggggcccgcacaagcggaggaacatgtggtttaattcgatgatacgcgaggaaccttacccgggcttgaactaacggtgacgaatctagagatagatttttcttcggacaccgttggaggtgctgcatggttgtcgtcagctcgtgccgtgaggtgtcggcttaagtgccataacgagcgcaacccttctcctcggttgccatcgggtaatgccgggcactccgtggacactgccatcgtaagatgtgaggaaggtggggatgacgtcaaatcagcacggcccttacgtccggggctacacacgtgttacaatggccggtacagagggatggtgtaatgcaaattgcatcatatcttgaaagccggtcccagttcggactggggtctgcaacccgaccccacgaagctggattcgctagtaatcgcgcatcagccatggcgcggtgaatacgttcccgggccttgtacacaccgcccgtcaagccatgaaagccgggggtgcctgaagtccgtgaccgcaaggatcggcctagggcaaaactggtgattggggctaagtcgtaacaaggtagccgtaccggaaggtgcggctggaacacctcctt

SEQ ID NO: 1543 - DNA, 1269 bp, Prevotella sp.
  oral clone IDR-CEC-0055
tcctggctcaggatgaacgctagctacaggcttaacacatgcaagtcgagggaccggcgcacgggtgagtaacgcgtatccaaccttcccataactaaggaataccccgtagaaatgcggcctaatcccttatggttaaagtcggttatggatggggatgcgtctgattagcttgctggcggggtaacggcccaccagggcatcgatcagtaggggttctgagaggaaggtcccccacattggaactgagacacggtccaaactcctacgggaggcagcagtgaggaatattggtcaatgggcggaagcctgaaccagccaagtagcgtgcaggatgacggcctatgggtcgtaaactgctttttaaggtgaatatgcatgtagccttggaataaggaccggctaattccgtgccagcagccgcggtaatacggaaggtccaggtgttatccggatttattgggtttaaagggagcgtaggccgcaggttaagtgtgttgtgaaaagcagtcgcccaacgtctgccttgcagcgcaaactgtcctgcttgagtgcgcacaacgcaggcggaattcgtcgtgtagcggtgaaatgcttagatatgacgaagaactccgattgcgaaggcagcttgcgggagcgactgacgctgaagctcgaaagtgcgggtatcgaacaggattagataccctggtagtccgcacggtaaacgctggatgcccgtttttggctagtcagagaccaagcgaaagcattaagcatcccacctggggagtacgccggcaacggtgaaactcaaaggaattgacgggggcccgcacaagcggaggaacatgtggtttaattcgatgatacgcgaggaaccttacccgggcttgaattgtgaaggtgctgcatggttgtcgtcagctcgtgccgtgaggtgtcggcttaagtgccataacgagcgcaacccctttcttcagttgccatcggccgggcactctgtagatactgccgccgtaaggtggaggaaggtggggatgacgtcaaatcagcacggcccttacgtccggggctacacacgtgttacaatggggggcagcgagcgggatgcccgcaaggtcattcaaatcaatcccccctcagttcggatggggtctgcaacccgaccccagaagctggattcgctagtaatcgcgcatcagccatggcgcggtgaatacgttcccgggccttgtacacaccgcccgtcaagccatgaaagccgggggtgcctgaagtccgtac

SEQ ID NO: 1544 - DNA, 1355 bp, Prevotella sp.
  oral clone IK053
gagtttgattctggctcaggatgaacgctagctacaggcttaacacatgcaagtcgcgggaccggcgcacgggtgagtaacgcgtatccaacctacctattaccacgggataacccggcgaaagtcggactaataccgtatgtgtaaagcggtaatagatggggatgcgtccgattagttagttggcggggtaacggcccaccaagacgtcgatcggtaggggttctgagaggaaggtcccccacactggaactgagacacggtccagactcctacgggaggcagcagtgaggaatattggtcaatgggcgtaagcctgaaccagccaagtagcgtgcaggatgacggcctatgggttgtaaactgcttttatgcaagaatatgcaggtattgcatgaataaggaccggctaattccgtgccagcagccgcggtaatacggaaggtccgagcgttatccggatttattgggtttaaagggagcgtaggcggccttttaagcgtgttgtgaaattcagttgctcaacatctgacttgcagcgcgaactggggggcttgagtatgctgaaggtaggcggaattcgtggtgtagcggtgaaatgcttagatatcacgaagaactccgattgcgaaggcagcttactgcagctactgacgctgatgctcgaaagcgtgggtatcgaacaggattagataccctggtagtccacgcggtaaacgatggatgctcgttgttggtatatcagtgaccaagtgaaaacgttaagcatcccacctggggagtacgccggcaacggtgaaactcaaaggaattgacgggggcccgcacaagcggaggaacatgtggtttaattcgatgatacgcgaggaaccttacccgggcttgaactgcggaggtgctgcatggttgtcgtcagctcgtgccgtgaggtgtcggcttaagtgccataacgagcgcaacccctttttatagttgccatcggccgggcactctgtagatactgccgccgaaggtggaggaaggcggggatgacgtcaaatcatcacggcccttacgtccggggctacacacgtgttacaatggcgcgcagcgagttggtgttatgtgagtagcatctaatcctgcgcgcctcagttcggatggggtctgcaacccgaccccagaagctggattcgctagtaatcgcgcatcagccatggcgcggtgaatacgttcccgggccttgtacacaccgcccgtcaagccatgaaagccgggggcgcctgaagtccgtgtcggcctaaggtgaaaccggtgattggggctaagtcgtaacaaggtagccgtaccggaaggtgcggctggatcacctcctt

SEQ ID NO: 1545 - DNA, 1356 bp, Prevotella sp.
  oral clone IK062
gagtttgattctggctcaggatgaacgctagctacaggcttaacacatgcaagtcgagggaccggcgcacgggtgcgtaacgcgtatcaaacctgcctcatactcggggatagccttgcgaaagtaagattaatacccgatgttcaaagtcggtatgagatggtgatgcgtccgattaggtagtaggcggggtaacggcccacctagccttcgatcggtaggggttctgagaggaaggtcccccacactggaactgagacacggtccagactcctacgggaggcagcagtgaggaatattggtcaatggacgaaagtctgaaccagccaagtagcgtgcaggatgacggcctctgggttgtaaactgcttttagttgggaatatgtatgtaccttcagaaaaaggaccggctaattccgtgccagcagccgcggtaatacggaaggtccaggcgttatccggatttattgggtttaaagggagcgtaggcggattattaagtcagtggtgaaagacggtggctcaaccatcgttagccattgaaactggtagtcttgagtgcagacagggatgctggaactcgtggtgtagcggtgaaatgcttagatatcacgatgaactccgatcgcgaaggcaggtgtccgggctgactgacgctgaggctcgaaagtgtgggtatcaaacaggattagataccctggtagtccacacagtaaacgatgtatactcgcggtttgcgtgtaagccgccaagcgaaagcattaagtataccacctggggagtacgccggcaacggtgaaactcaaaggaattgacgggggcccgcacaagcggaggaacatgtggtttaattcgatgatacgcgaggaaccttacccgggcttgaactatggaggtgctgcatggttgtcgtcagctcgtgccgtgaggtgtcggcttaagtgccataacgagcgcaacccttttccttggttgccatcagctgggcactccagggatactgccatcgtaagatggaggaaggtggggatgacgtcaaatcagcacggcccttacgtccggggctacacacgtgttacaatggggggcagaaggtcgctacctggtgacaggatgctaatctcacctctctcagttcggatggagtctgcaacccgactccagaagctggattcgctagtaatcgcgcatcagccatggcgcggtgaatacgttcccgggccttgtacacaccgcccgtcaagccatgaaagccgggggtgcctgaaagccgtgtcggcctagggtaaaactggtgattggggctaagtcgtaacaaggtagccgtaccggaaggtgcggctggatcacctcctt

SEQ ID NO: 1546 - DNA, 1285 bp, Prevotella sp.
  oral clone P4PB_83 P2
gatgaacgctagctacaggcttaacacatgcaagtcgagggaccggcgcacgggtgagtatcgcgtatccaaccttcccattactgtgggataacctgccgaaaggcagactaataccgcatggttaaagtcggtaatggatggggatgcgtctgattagcttgttggcggggtaacggcccaccaaggcgacgatcagtaggggttctgagaggaaggtcccccacattggaactgagacacggtccaaactcctacgggaggcagcagtgaggaatattggtcaatggacgtaagtctgaaccagccaagtagcgtgcaggatgacggcctatgggttgtaaactgcttttacaggggaatatgcatgtaccctgcgaataaggaccggctaattccgtgccagcagccgcggtaatacggaaggtcctggtgttatccggatttattgggtttaaagggagcgtaggccgtagattaagtgtgttgtgaaatgtagtcgcccaacgtctgccttgcagcgcaaactggtttacttgagtacgcacaacgcaggcggaattcgtcgtgtagcggtgaaatgcttagatatgatgaagaactcctattgcgaaggcagcttgcgggagcgactgacgctgaggctcgaaagtgcgggtatcgaacaggattagataccctggtagtccgcacggtaaacgatggatgcccgtttttggctagccagagaccaagcgaaagcattaagcatcccacctggggagtacgccggcaacggtgaaactcaaaggaattgacgggggcccgcacaagcggaggacatgtggttaattcgatgatacgcgaggaaccttacccgggcttgaattgtgaaggtgctgcatggttgtcgtcagctcgtgccgtgaggtgtcggcttaagtgccataacgagcgcaacccctctcttcagttgccatcagctgggcactctggagacactgccaccgtaaggtggaggaaggtggggatgacgtcaaatcagcacggcccttacgtccggggctacacacgtgttacaatggccggcagagggatggtgtaatgcaaattgcatcaaatcttgccggtcccggttcggatggggtctgcaacccgaccccagaagctggattcgctagtaatcgcgcatcagccatggcgcggtgaatacgttcccgggccttgtacacaccgcccgtcaagccatgaaagccgggggtgcctgaagttcgtagcgacctagggcaaaactggtgatgggggc

SEQ ID NO: 1547 - DNA, 1508 bp, Prevotella sp.
  oral taxon 292
agagtttgatcctggctcaggatgaacgctagctacaggcttaacacatgcaagtcgaggggaaacgggggaatagcttgctattctttgtcgtcgaccggcgcacgggtgagtaacgcgtatccaaccttcccataactaaggaataccccgtagaaatgcggcctaatcccttatggtctcttatgcctgtcatgggaataagagtaaagatttatcggttatggatggggatgcgtctgattagcttgctggcggggtaacggcccaccagggcatcgatcagtaggggttctgagaggaaggtcccccacattggaactgagacacggtccaaactcctacgggaggcagcagtgaggaatattggtcaatgggcgtaagcctgaaccagccaagtagcgtgcaggatgacggccctatgggttgtaaactgctttttaaggtgaataaagaggggcacgcgtgccctgttgcatgtagccttggaataaggaccggctaattccgtgccagcagccgcggtaatacggaaggtccgggtgttatccggatttattgggtttaaagggagcgtagsccgcaggttaagtgtgttgtgaaaagcagtcgcccaacgtctgccttgcagcgcaaactgtcctgcttgagtgcgcacaacgcaggcggaattcgtcgtgtagcggtgaaatgcttagatatgacgaagaactccgattgcgaaggcagcttgcgggagcgcaactgacgctgaagctcgaaagtgcgggtatcgaacaggattagataccctggtagtccgcacggtaaacgctggatgcccgtttttggcttattttaagtcagagaccaagcgaaagcattaagcatcccacctggggagtacgccggcaacggtgaaactcaaaggaattgacgggggcccgcacaagcggaggaacatgtggtttaattcgatgatacgcgaggaaccttacccgggcttgaattgccagagacggctccagagatggagcttcccttcggggctctggtgaaggtgctgcatggttgtcgtcagctcgtgccgtgaggtgtcggcttaagtgccataacgagcgcaacccctttcttcagttgccatcgggtaatgccgggcactctgtagatactgccgccgtaaggtgtgaggaaggtggggatgacgtcaaatcagcacggcccttacgtccggggctacacacgtgttacaatggtcggagcagcaggaagctacctggcgacaggatgctgatcccgaaacccggcctcagttcggactggagtctgcaacccgactccacgaagccggattcgctagtaatcgcgcatcagccatggcgcggtgaatacgttcccgggccttgtacacaccgcccgtcaagccatgaaagccgggggtgcctgaaagccgtgaccgcgagggtcggcctagggtaaaaccggtgattggggctaagtcgtaacaaggtagccgtaccggaaggtgc

SEQ ID NO: 1548 - DNA, 1533 bp, Prevotella sp.
  oral taxon 299
ttacaatgtagagtttgatcctggctcaggatgaacgctagctacaggcttaacacatgcaagtcgaggggcagcatgttggttgcttgcaaccaatgatggcgaccggcgcacgggtgagtaacgcgtatccaacctacccaatactcaggcataacccgttgaaagacggactaattcctgatggtatgtatttttctcatgatttatacattaaagaacttcggtattggatggggatgcgtctgattagtttgttggtgaggtaacggctcaccaaggcatcgatcagtaggggttctgagaggaaggtcccccacattggaactgagacacggtccaaactcctacgggaggcagcagtgaggaatattggtcaatggatgaaaatctgaaccagccaagtagcgtgcaggatgacggccctatgggttgtaaactgcttttatgtgagaataaagttaggtatgtatacttatttgcatgtatcacatgaataaggaccggctaattccgtgccagcagccgcggtaatacggaaggtccaggcgttatccggatttattgggtttaaagggtgcgtaggccgtttgataagcgtgctgtgaaatatagtggctcaacctctatcgtgcagcgcgaactgtcgaacttgagtgcgtagtaggtaggcggaattcgtggtgtagcggtgaaatgcttagatatcacgaagaactccgattgcgaaggcagcttaccgtaacgttactgacgcttaagcacgaaggtgcgggtatcgaacaggattagataccctggtagtccgcacagtaaacgatggatgctcgctgttggccttttatggtcagtggcttagcgaaagcgttaagcatcccacctggggagtacgccggcaacggtgaaactcaaaggaattgacgggggcccgcacaagcggaggaacatgtggtttaattcgatgatacgcgaggaaccttacccgggcttgaactgcagctgaacgattcagagatgatgaggcccttcggggcagctgtggaggtgctgcatggttgtcgtcagctcgtgccgtgaggtgtcggcttaagtgccataacgagcgcaaccccttttcttagttgccatcaggtaatgctgggcactctgggaatactgccaccgtaaggtgtgaggaaggtggggatgacgtcaaatcagcacggcccttacgtccggggctacacacgtgttacaatggcgcatacagaatgttggtttcatgcaaatgagatctaatcttcaaagtgcgtctcagttcggactggggtctgcaacccgaccccacgaagctggattcgctagtaatcgcgcatcagccatggcgcggtgaatacgttcccgggccttgtacacaccgcccgtcaagccatgaaagccgggggcgcctaaagtccgtgaccgcaagggtcggcctagggtgaaactggtgattggggctaagtcgtaacaaggtagccgtaccggaaggtgcggctggaacacctcctttct

SEQ ID NO: 1549 - DNA, 1209 bp, Prevotella sp.
  oral taxon 300
gatgaacgctagctacaggcttaacacatgcaagtcgaggggaaacgggagaatagcttgctattctttgtcgtcgaccggcgcacgggtgagtaacgcgtatccaaccttcccatagctaaggaataccccgtagaaatgcggcctaatcccttatggtctcttatacctgacatcggaataagagtaaagatttatcggttatggatggggatgcgtctgattagcttgctggcggggtaacggcccaccagggcatcgatcagtaggggttctgagaggaaggtcccccacattggaactgagacacggtccaaactcctacgggaggcagcagtgaggaatattggtcaatgggcgagagcctgaaccagccaagtagcgtgcaggatgacggccctatgggtgtgtaaactgctttttaaggtgaataaagaagggcacgtgtgccctgttgcatgtagccttggaataaggaccggctaattccgtgccagcagccgcggtaatacggaaggtccaggtgttatccggatttattgggtttaaagggagcgtaggccgcaggttaagtgtgttgtgaaaagcagtcgcccaacgtctgccttgcagcgcaaactgtcctgcttgagtgcgcacaacgcaggcggaattcgtcgtgtagcggtgaaatgcttagatatgacgaagaactccgattgcgaaggcagcttgcgggagcgcaactgacgctgaagctcgaaagtgcgggtatcgaacaggattagataccctggtagtccgcacggtaaacgctggatgcccgtttttggcttattttaagtcagagaccaagcgaaagcattaagcatcccacctggggagtacgccggcaacggtgaaactcaaaggaattgacgggggcccgcacaagcggaggaacatgtggtttaattcgatgatacgcgaggaaccttacccggggcttgaattgccagagacggctccagagatggagcttcccttcgggggctctggtgacggtgctgcatgggttgtcgtcagctcgtgccgtgaggtgtcagcttaagtgccataacgagcgcaccccctttcttcagttgccatcggggtattgccctggcactctgtaaaatccgccgccgatcgggttgaggaagggtgggactacgtcaaatagcaggccctacgtcgggctaacaggttaaa

SEQ ID NO: 1550 - DNA, 1521 bp, Prevotella sp.
  oral taxon 302
agagtttgatcctggctcaggatgaacgctagctacaggcttaacacatgcaagtcgaggggaaacgacattgaaagcttgcttttaatgggcgtcgaccggcgcacgggtgcgtaacgcgtatcgaacctgccctttactcagggatagccttgcgaaagtaagattaatacctgatagtgttgtgatgaggcatcttgttgcaactaaagatttattggtaaaggatggcgatgcgtctgattaggtagtaggcggggtaacggcccacctagccgacgatcagtaggggttctgagaggaaggtcccccacattggaactgagacacggtccaaactcctacgggaggcagcagtgaggaatattggtcaatgggcgagagcctgaaccagccaagtagcgtgcaggatgacggccctctgggttgtaaactgcttttagttgggaacaaaaaaggcgacgtgtcgcctctggagtgtaccatcagaaaaaggaccggctaattccgtgccagcagccgcggtaatacggaaggtccaggcgttatccggatttattgggtttaaagggagcgtaggcggacgattaagtcagctgtgaaagtttgcggctcaaccgtaaaattgcagttgaaactggttgtcttgagtgcacgcagggatgttggaattcatggtgtagcggtgaaatgcttagatatcatgaagaactccgatcgcgaaggcatatgtccggagtgcaactgacgctgaggctcgaaagtgcgggtatcgaacaggattagataccctggtagtccgcacagtaaacgatgaatactcgcagtatgcgatatagtgtatgctgccaagtgaaaacgttaagtattccacctggggagtacgccggcaacggtgaaactcaaaggaattgacgggggcccgcacaagcggaggaacatgtggtttaattcgatgatacgcgaggaaccttacccgggcttgaactaagcaggaagatgggcagagaggcctgttgtcttcggacctgcttggaggtgctgcatggttgtcgtcagctcgtgccgtgaggtgtcggcttaagtgccataacgagcgcaacccttctccacgtttgccatcaggtagagctgggcactccgtggatactgccatcgtaagatgtgaggaaggtggggatgacgtcaaatcagcacggcccttacgtccggggctacacacgtgttacaatggccggtacagagggaagccaccaggcgactgggcgctgatccattaaaaccggtctcagttcggactggagtctgcaacccgactccacgaagctggattcgctagtaatcgcgcatcagccatggcgcggtgaatacgttcccgggccttgtacacaccgcccgtcaagccatgaaagccgggggtgcctgaaagctgtgaccgtaaggggcggcctagggtaaaaccggtgattggggctaagtcgtaacaaggtagccgtaccggaaggtgcggctggaacacct

SEQ ID NO: 1551 - DNA, 1505 bp, Prevotella sp.
  oral taxon 310
gagtttgatcctggctcaggatgaacgctagctacaggcttaacacatgcaagtcgaggggaaacggcatttagtgcttgcaccgaatggacgtcgaccggcacacgggtgagtaacgcgtatccaaccttcccacaactaagggataacctgccgaaaggcagactaataccttatgtaatcctttgatggcatcagataaggataaaagatttatcggtaaaggatggggatgcgtctgattagcttgttggtgaggtaaaggctcaccaaggcgacgatcagtaggggttctgagaggaaggtcccccacattggaactgagacacggtccaaactcttacgggaggcagcagtgaggaatattggtcaatgggcggaagcctgaaccagccaagtagcgtgcaggaagacggccctatgggttgtaaactgcttttatacgagaataatttgatgcacgtgtgcgttattgcatgtatcgtatgaataaggaccggctaattccgtgccagcagccgcggtaatacggaaggtccaggcgttatccggatttattgggtttaaagggagtgtaggcggtttgttaagcgtgttgtgaaatttaggtgctcaacatttaacttgcagcgcgaactgtcagtcttgagtacacgcaacgtatgcggaattcatggtgtagcggtgaaatgcttagatatcatgaagaactccgattgcgaaggcagcatacgggagtgtaactgacgcttaagctcgaaggtgcgggtatcgaacaggattagataccctggtagtccgcacagtaaacgatggatgcccgctgttagcgcctggcgttagcggctaagcgaaagcattaagcatcccacctggggagtacgccggcaacggtgaaactcaaaggaattgacgggggcccgcacaagcggaggaacatgtggtttaattcgatgatacgcgaggaaccttacccgggcttgaattgcagaggaattatttagagataaatacgcccttcggggtctctgtgaaggtgctgcatggttgtcgtcagctcgtgccgtgaggtgtcggcttaagtgccataacgagcgcaaccccttttcttagttgccatcaggtaatgctgggcactctgggaacactgccaccgcaaggtgtgaggaaggtggggatgacgtcaaatcagcacggcccttacgtccggggctacacacgtgttacaatggccggtacagagggatggtgtaatgcaaattgcatcaaatcttaaaagccggtcccagttcggactgaggtctgcaacccgacctcacgaagctggattcgctagtaatcgcgcatcagccatggcgcggtgaatacgttcccgggccttgtacacaccgcccgtcaagccatgaaagccgggggtgcctgaagttcgtaaccgtaaggagcgacctagggcaaaactggtaattggggctaagtcgtaacaaggtagccgtaccggaaggtgc

SEQ ID NO: 1552 - DNA, 1534 bp, Prevotella sp.
  oral taxon 317
ttacaatggagagtttgatcctggctcaggatgaacgctagctacaggcttaacacatgcaagtcgcggggcagcatgggggttgcttgcaatccctgatggcgaccggcgcacgggtgagtaacgcgtatccaacctgcccttcaccacgggataacccggcgaaagtcggactaataccgtatgttgtccattgacggcatccgatttggacgaaaggcttagcggtgagggatggggatgcgtccgattagctcgacggcggggtaacggcccaccgtggcgacgatcggtaggggttctgagaggaaggtcccccacactggaactgagacacggtccagactcctacgggaggcagcagtgaggaatattggtcaatgggcgtaagcctgaaccagccaagtagcgtgcaggatgacggccctatgggttgtaaactgcttttatgcggggataaaggagcccacgtgtgggctttttgcaggtaccgcatgaataaggaccggctaattccgtgccagcagccgcggtaatacggaaggtccgggcgttatccggatttattgggtttaaagggagcgtaggccgccccttaagcgtgttgtgaaatgcgggtgctcaacatccgacttgcagcgcgaactggggggcttgagtgcgccgaaagtaggcggaattcgtggtgtagcggtgaaatgcttagatatcacgaagaactccgattgcgaaggcagcttactgtagcgcaactgacgctgatgctcgaaagcgtgggtatcgaacaggattagataccctggtagtccacgcggtaaacgatggatgctcgttgtcggcctttgaggccggtgaccaagcgaaagcgttaagcatcccacctggggagtacgccggcaacggtgaaactcaaaggaattgacgggggcccgcacaagcggaggaacatgtggtttaattcgatgatacgcgaggaaccttacccgggcttgaactgcggcggaacgattccgagaggatgaggcccttcggggctgccgcggaggtgctgcatggttgtcgtcagctcgtgccgtgaggtgtcggcttaagtgccataacgagcgcaacccccgtcttcagttgccatcgggttatgccgggcactctggagatactgccaccgcaaggtgtgaggaaggtggggatgacgtcaaatcagcacggcccttacgtccggggctacacacgtgttacaatggcgcatacagagagtaggtggcatgcgaatgccatccaatccttaaagtgcgtctcagttcggactggggtctgcaacccgaccccacgaagctggattcgctagtaatcgcgcatcagccatggcgcggtgaatacgttcccgggccttgtacacaccgcccgtcaagccatgaaagccgggggcgcctgaagtccgtgaccgcgagggtcggcctagggtgaaaccggtgattggggctaagtcgtaacaaggtagccgtaccggaaggtgcggctggaacacctcctttct

SEQ ID NO: 1553 - DNA, 1434 bp, Prevotella sp.
  oral taxon 472
tggcgaccggcgcacgggtgagtaacgcgtatccaacctgcccttcaccacgggataacccggcgaaagtcggactaataccgtatgttgtccattgacggcatccgatttggacgaaaggctttgcggtgaaggatggggatgcgtccgattagctggacggcggggtaacggcccaccgtggctacgatcggtaggggttctgagaggaaggtcccccacactggaactgagacacggtccagactcctacgggaggcagcagtgaggaatattggtcaatgggcgtaagcctgaaccagccaagtagcgtgcaggatgacggccctatgggttgtaaactgcttttatgcggggataaagtggcccacgtgtgggtttttgcaggtaccgcatgaataaggaccggctaattccgtgccagcagccgcggtaatacggaaggtccgggcgttatccggatttattgggtttaaagggagcgtaggccgcgccttaagcgtgttgtgaaatccgggtgctcaacatccggcttgcagcgcgaactggggcgcttgagtgcgctgaaagtaggcggaattcgtggtgtagcggtgaaatgcttagatatcacgaggaactccgattgcgaaggcagcctactgtagcgctactgacgctgatgctcgaaagcgtgggtatcgaacaggattagataccctggtagtccacgcggtaaacgatggatgctcgttgtcggcccttcgggtcggtgaccaagcgaaagcgttaagcatcccacctggggagtacgccggcaacggtgaaactcaaaggaattgacgggggcccgcacaagcggaggaacatgtggtttaattcgatgatacgcgaggaaccttacccgggcttgaactgcggcggaacgattcggagacgatgaggcccttcggggccgccgcggaggtgctgcatggttgtcgtcagctcgtgccgtgaggtgtcggcttaagtgccataacgagcgcaacccccgtcttcagttgccatcgggtgatgccgggcactctggagatactgccaccgcaaggtgcgaggaaggtggggatgacgtcaaatcagcacggcccttacgtccggggctacacacgtgttacaatggcgcatacagagagtcggtggcatgcgaatgccatccaatcctcaaagtgcgtctcagttcggactggggtctgcaacccgaccccacgaagctggattcgctagtaatcgcgcatcagccatggcgcggtgaatacgttcccgggccttgtacacaccgcccgtcaagccatgaaagccgggggcgcctgaagtccgtgaccgcgagggtcggcctagggtgaaaccggtgattggggctaagtcgtaacaaggtagccgtaccggaaggtgcggctggaacacctcctttct

SEQ ID NO: 1554 - DNA, 1504 bp, Prevotella sp.
  oral taxon 781
gagtttgatcctggctcaggatgaacgctagctacaggcttaacacatgcaagtcgcggggcagcatgttggttgcttgcaaccgatgatggcgaccggcgcacgggtgagtaacgcgtatccaacctacctattaccacgggataacccggcgaaagtcggactaataccgtatgtagtcctccaatggcatcagcagtggactaaaggtttggcggtaatagatggggatgcgtccgattagctagttggtgaggtaatggctccccaaggcttcgatcggtaggggttctgagaggaaggtcccccacactggaactgagacacggtccagactcctacgggaggcagcagtgaggaatattggtcaatggacgagagtctgaaccagccaagtagcgtgcaggatgactgccctatgggttgtaaactgcttttatgcggggataaagtgaggaacgtgttctctattgcaggtaccgcatgaataaggaccggctaattccgtgccagcagccgcggtaatacggaaggttcaggcgttatccggatttattgggtttaaagggagcgtaggccgttttttaagcgtgttgtgaaatgtaccggctcaaccggtgatgtgcagcgcgaactggaagacttgagtgcgtagtaagcaggcggaattcgtggtgtagcggtgaaatgcttagatatcacgaagaactccgatagcgcaggcagcttgctgcatcgcaactgacgctgatgctcgaaagcgtgggtatcaaacaggattagataccctggtagtccacgcggtaaacgatggatgctcgttgtcaggcctttgggtttggtgaccaagtgaaaacgttaagcatcccacctggggagtacgccggcaacggtgaaactcaaaggaattgacgggggcccgcacaagcggaggaacatgtggtttaattcgatgatacgcgaggaaccttacccgggcttgaactgcggcggaacgattcagagatgatgaggtccttcgggactgccgcggaggtgctgcatggttgtcgtcagctcgtgccgtgaggtgtcggcttaagtgccataacgagcgcaaccccttttcttagttgccatcgggtaatgccgggcactctgggaatactgccaccgtaaggtgtgaggaaggtggggatgacgtcaaatcagcacggcccttacgtccggggctacacacgtgttacaatggcgcatacagatagttggttgtgtgcaaacatgatctaatctttaaagtgcgtctcagttcggactggggtctgcaacccgaccccacgaagctggattcgctagtaatcgcgcatcagccatggcgcggtgaatacgttcccgggccttgtacacaccgcccgtcaagccatgaaagccgggggcgcctgaagtccgtgaccgcgagggtcggcctagggtgaaaccggtgattggggctaagtcgtaacaaggtagccgtaccggaaggtgc

SEQ ID NO: 1555 - DNA, 1505 bp, Prevotella sp.
  oral taxon 782
gagtttgatcctggctcaggatgaacgctagctacaggcttaacacatgcaagtcgaggggaaacggcgttgagtgcttgcactcttcggacgtcgaccggcgcacgggtgagtaacgcgtatccaaccttcccatgactgggggataacctgccgaaaggcagactaataccccatggtcttcactgacggcatcatatgtgaagtaaagattcatcggtcatggatggggatgcgtctgattagcttgttggcggggtaacggcccaccaaggcaacgatcagtaggggttctgagaggaaggtcccccacattggaactgagacacggtccaaactcctacgggaggcagcagtgaggaatattggtcaatgggcgcaagcctgaaccagccaagtagcgtgcaggacgacggccctatgggttgtaaactgcttttgtacggggataaaacggcggacgcgtccgtccttgcaggtaccgtacgaataaggaccggctaattccgtgccagcagccgcggtaatacggaaggtccgggcgttatccggatttattgggtttaaagggagcgtaggccggggattaagtgtgttgtgaaatgtagacgctcaacgtctgacttgcagcgcatactggttcccttgagtacgcacaacgtcggcggaattcgtcgtgtagcggtgaaatgcttagatatgacgaagaactccgattgcgaaggcagctgacgggagcgcaactgacgcttaagctcgaaggtgcgggtatcgaacaggattagataccctggtagtccgcacggtaaacgatggatgcccgctgttggtacctggtatcagcggctaagcgaaagcattaagcatcccacctggggagtacgccggcaacggtgaaactcaaaggaattgacgggggcccgcacaagcggaggaacatgtggtttaattcgatgatacgcgaggaaccttacccgggcttgaattgcaggagaacgatacagagatgttgaggtccttcgggactcctgtgaaggtgctgcatggttgtcgtcagctcgtgccgtgaggtgtcggcttaagtgccataacgagcgcaacccctctcttcagttgccatcaggttatgctgggcactctggagacactgccaccgtaaggtgtgaggaaggtggggatgacgtcaaatcagcacggcccttacgtccggggctacacacgtgttacaatggccggtacagagggacggtgcaacgcaagttgcatccaatcttgaaagccggtcccagttcggactggggtctgcaacccgaccccacgaagctggattcgctagtaatcgcgcatcagccatggcgcggtgaatacgttcccgggccttgtacacaccgcccgtcaagccatgaaagccgggggtgcctgaagtccgtgaccggaaggatcggcctagggcaaaactggtgattggggctaagtcgtaacaaggtagccgtaccggaaggtgc

SEQ ID NO: 1556 - DNA, 1386 bp, Prevotella sp.
  oral taxon F68
agagtttgatcctggctcaggatgaacgctggctacaggcttaacacatgcaagtcgtggggaaacgattggaggcgcttgcgcctctgaggcgtcgaccggcgcacgggtgagtaacgcgtatccaacctgccccgcggcaagggataatccgcagaaatgcggtctaataccttatgtgctccgaagaggacatctgattcggagcaaaggcttgccgccgcgggatggggatgcgtctgattagatagtaggcggggtaacggcccacctagtcgtcgatgggtaggggttctgagaggaaggtcccccacattggaactgagacacggtccaaactcctacgggaggcagcagtgaggaatattggtcaatgggcgagagcctgaaccagccaagtagcgtgcaggaagacggccctatgggttgtaaactgcttttatacgggaataaagtttgccacgtgtggcattttgcatgtaccgtaagaaaaaggatcggctaattccgtgccagcagccgcggtaatacggaagatccgagcgttatccggatttattgggtttaaagggagcgtaggcgggaatccaagtcagttgtgaaaccctgcggctcaaccgtagtcgtgcagttgaaactggatttcttgagtgcgcacagggcagacggaatttgtggtgtagcggtgaaatgcttagatatcacgaagaactccgatcgcgaaggcagtctgccggggcgctactgacgctgaggctcgaaagtgcgggtatcaaacaggattagataccctggtagtccgcactgtaaacgatggatacccgtggtcggttttttttattcggtcaccaagcgaaagcgttaagtatcccacctggggagtacgccggcaacggtgaaactcaaaggaattgacgggggcccgcacaagcggaggaacatgtggtttaattcgatgatacgcgaggaaccttacccgggcttgaattgcagaggaagtcaccggagacggtgatgtctttatagtctctgtgaaggtgctgcatggttgtcgtcagctcgtgccgtgaggtgtcggcttaagtgccataacgagcgcaacccctttttccggttgccatcaggtgatgctgggcactccggagacactgccatcgtaagatgtgaggaaggtggggatgacgtcaaatcagcacggcccttacgtccggggctacacacgtgttacaatggccggtacagaaggcagctcccacgcgagtggttgcgaatcccgaaagccggtcccagttcggactggagtctgcaacccgactccacgaagctggattcgctagtaatcgcgcatcagccacggcgcggtgaatacgttcccgggccttgtac

SEQ ID NO: 1557 - DNA, 1216 bp, Prevotella sp.
  oral taxon G60
gatgaacgctagctacaggcttaacacatgcaagtcgaggggaaacgatgagagagcttgctctctcaggcgtcgaccggcgcacgggtgagtaacgcgtatccaacctgcccattacaggggaataaccttgcgaaagtaagactaatgccccatggtattctcagcagacatctaatgaggattaaagatttatcggtaatggatggggatgcgtctgattagcttgttggcggggtaacggcccaccaaggcaacgatcagtaggggttctgagaggaaggtcccccacattggaactgagacacggtccaaactcctacgggaggcagcagtggggaatattggtcaatggacgagagtctgaaccagccaagtagcgtgcaggatgacggccctatgggttgtaaactgcttttataggggaataaagtgatctacgtgtagtttattgtatgtaccctatgaataaggaccggctaattccgtgccagcagccgcggtaatacggaaggttcgggcgttatccggatttattgggtttaaagggagcgtaggccgtagattaagcgtgttgtgaaatgtagatgctcaacatctgacttgcagcgcgaactggtttactagagtgtgcacaacgtaggcggaattcgtcgtgtagcggtgaaatgcttagatatgacgaagaactccgattgcgaaggcagcttacgggagcacaactgacgctgaagctcgaaggtgcgggtatcaaacaggattagataccctggtagtccgcacagtaaacgctggatgcccgctgttggttcattagagtcagcggccaagcgaaagcattaagcatcccacctggggagtacgccggcaacggtgaaactcaaaggaattgacgggggcccgcacaagcggaggaacatgtggtttaattcgatgatacgcgaggaaccctaccccgggcctgaaattgcagacgaacgcggcagagatgccaagggcccttcggggcgtctgtgaaggtgctgcattggtgtcgtcagctcgtgccgtgaggtgtcggcctaagtgccataacgagcgcaaccccttttcttagttgccatcagggtcatgcctgggcactcatggaaaatccgcccacgataggggtgtaggaacgggtgggaaatacgttcaaatcaccacggcccttacgttcgggggcctacacctgtta

SEQ ID NO: 1558 - DNA, 1211 bp, Prevotella sp.
  oral taxon G70
gatgaacgctggctacaggcttaacacatgcaagtcgaggggaaacggcattgagtgcttgcactgaatggacgtcgaccggcgcacgggtgagtaacgcgtatccaaccttcccgttactgcgggataacctgccgaaaggcagactaataccgcatgttcttcgatgacggcatcagattcgaagcaaagatccgtcggtaacggagggggatgcgtctgattagctggttggcggggcgacggcccaccaaggcgacgatcagtaggggttctgagaggaaggtcccccacattggaactgagacacggtccaactcctacgggaggcagcagtgaggaatattggtcaatgggcggaagcctgaaccagccaagtagcgtgcaggaggacggccctacgggtgtgtaaactgcttttatgcggggataaagtgagggacgcgtccctttttgcaggtaccgcatgaataaggaccggctaattccgtgccagcagccgcggtaatacggaaggtccgggcgttatccggatttattgggtttaaagggagcgtaggccgtggattaagcgtgttgtgaaatgcaggtgctcaacgtctgcactgcagcgcgaactggtccacttgagtgtgcgcaacgcaggcggaattcgtcgtgtagcggtgaaatgcttagatatgacgaagaactccgattgcgaaggcagcttgcgggagcacaactgacgctgaagctcgaaagtgcgggtatcgaacaggattagataccctggtagtccgcacggtaaacgatggatgcccgttgtcaggctgtttcagcctggtgaccaagcgagagcattaagcatcccacctggggagtacgccggcaacggtgaaactcaaaggaattgacgggggcccgcacaagcggaggatcatgtggtttaattcgatgatacgcgaggaacctgacccggggcttgaattgcagacgaacgattcagagatgatgaggcccttcggggcgtctgtgacaggtgctgcatgggttgtcgtcagctcgtgccgtgaggtgtcagcctaaagtgccatagcgagcgccagcccctttcttcagtttgcacagggtgatgcctgggcactctgaaaaccctgccaccgcaagggtgtgaggaagggtggcaatacgtcaaacaccacgaccctacgttcggggcaacacagttt

SEQ ID NO: 1559 - DNA, 1218 bp, Prevotella sp.
  oral taxon G71
gatgaacgctagctacaggcttaacacatgcaagtcgaggggaaacggcgaagggtgcttgcactctccggacgtcgaccggcgcacgggtgagtaacgcgtatccaaccttcccatgaccgggggataacctgccgaaaggcagactaataccccatggccttcactgacggcatcatatgtgaagtaaagattcatcggtcatggatggggatgcgtctgattagcttgttggcggggaaacggcccaccaaggcgacgatcagtaggggttctgagaggaaggtcccccacattggaactgagacacggtccaaactcctacgggaggcagcagtgaggaatattggtcaatgggcgcaagcctgaaccagccaagtagcgtgcaggatgacggccctatgggttgtaaactgcttttgtacggggataaaacggcggacgtgtccgtccttgcaggtaccgtacgaataaggaccggctaattccgtgccagcagccgcggtaatacggaaggtccgggcgttatccggatttattgggtttaaagggagcgtaggccggggattaagtgtgttgtgaaatgtagacgctcaacgtctgacttgcagcgcatactggttcccttgagtacgcacaacgttggcggaattcgtcgtgtagcggtgaaatgcttagatatgacgaagaactccgattgcgaaggcagctgacgggagcgcaactgacgcttaagctcgaaggtgcgggtatcgaacaggattagataccctggtagtccgcacggtaaacgatggatgcccgctgttggtacctggtatcagcggctaagcgaaagcattaagcatcccacctggggagtacgccggcaacggtgaaactcaaaggaattgacgggggcccgcacaagcggaggaacatgtggtttaattcgatgatacgcgaggaaccttacccggggcttgaattgcaagagaacgatacaagagatgttgagggtccttcgggactcctgtgaaggtgctgcatggttgtcgtcagctcgtgccgtgaggtgtcggcctaagtgccataccgaggcgcaccccctctcttcagttgcccatcaaggtattgcctggcacctcttggaaacccggtgccacccttaggggtttaggaaagggtggggagttacgttaaattccccacgggcctttactttcgggggcctcacct

SEQ ID NO: 1560 - DNA, 1433 bp, Prevotella sp.
  sp24
atgcaagtcgaggggcagcatgatcgaagcttgctttgattgatggcgaccggcgcacgggtgagtaacgcgtatccaaccttccctttagtagaggatagcccggcgaaagtcggattaatactctatattgtatttagaagacatctgaagaataccaaaggtttaccgctaaaggatggggatgcgtctgattaggttgttggcggggtaacggcccaccaagcctacgatcagtaggggttctgagaggaaggtcccccacattggaactgagacacggtccaaactcctacgggaggcagcagtgaggaatattggtcaatggacgaaagtctgaaccagccaagtagcgtgcaggatgacggccctatgggttgtaaactgcttttatatagggataaagtcggggacgtgtccccgtttgtaggtactatatgaataaggaccggctaattccgtgccagcagccgcggtaatacggaaggtccaggcgttatccggatttattgggtttaaagggagcgcaggctgatgattaagcgtgacgtgaaatgtagccgctcaacggctgtactgcgtcgcgaactggttatcttgagtgagttcgatgttggcggaattcgtggtgtagcggtgaaatgcttagatatcacgaagaactccgattgcgaaggcagccaacaaggcctttactgacgctaaagctcgaaggtgcgggtatcgaacaggattagataccctggtagtccgcacggtaaacgatggatgcccgctgtttgcgatatactgtgagcggccaagagaaatcgttaagcatcccacctggggagtacgccggcaacggtgaaactcaaaggaattgacgggggcccgcacaagcggaggaacatgtggtttaattcgatgatacgcgaggaaccttacccgggcttgaactgcagcggaaggatacagagatgttgacgccttcggggccgctgtggaggtgctgcatggttgccgtcagctcgtgccgtgaggtgtcggcttaagtgccataacgagcgcaacccttttctttagttgccatcaggtaatgctgggcactctggagatactgccaccgtaaggtgtgaggaaggtggggatgacgtcaaatcagcacggcccttacgtccggggctacacacgtgttacaatgggaggtacagagagctggatgtacgcaagtacgttctaatcctaaaagccttcctcagttcggattggggtctgcaacccgaccccatgaagctggattcgctagtaatcgcgcatcagccatggcgcggtgaatacgttcccgggccttgtacacaccgcccgtcaagccatgaaagccgggggcgcttgaagtccgtgaccgcaaggatcggcctagagcgaaactggtaattggggctaagtcgtaa

SEQ ID NO: 1561 - DNA, 1433 bp, Prevotella sp.
  sp34
atgcaagtcgaggggcagcatgatcgaagcttgctttgattgatggcgaccggcgcacgggtgagtaacgcgtatccaaccttccctttagtagaggatagcccggcgaaagtcggattaatactctatgttgtatttagaagacatctgaagaataccaaaggtttaccgctataggatggggatgcgtctgattaggttgttggcggggtaacggcccaccaagcctacgatcagtaggggttctgagaggaaggtcccccacattggaactgagactcggtccaaactcctacgggaggcagcagtgaggaatattggtcaatggacgaaagtctgaaccagccaagtagcgtgcaggatgacggccctatgggttgtaaactgcttttatatagggataaagtcggggacgtgtccccgtttgtaggtactatatgaataaggaccggctaattccgtgccagcagccgcggtaatacggaaggtccaggcgttatccggatttattgggtttaaagggagcgcaggctgatgattaagcgtgacgtgaaatgtagccgctcaacggctgaactgcgtcgcgaactggttatcttgagtgagttcgatgttggcggaattcgtggtgtagcggtgaaatgcttagatatcacgaagaactccgattgcgaaggcagccaacaaggcctttactgacgctaaagctcgaaggtgcgggtatcgaacaggattagataccctggtagtccgcacggtaaacgatggatgcccgctgtttgcgatatactgtgagcggccaagagaaatcgttaagcatcccacctggggagtacgccggcaacggtgaaactcaaaggaattgacgggggcccgcacaagcggaggaacatgtggtttaattcgatgatacgcgaggaaccttacccgggcttgaactgcagcggaaggatacagagatgttgacgccttcggggccgctgtggaggtgctgcatggttgtcgtcagctcgtgccgtgaggtgtcggcttaagtgccataacgagcgcaacccttttctttagttgccatcaggtaatgctgggcactctggagatactgccaccgtaaggtgtgaggaaggtggggatgacgtcaaatcagcacggcccttacgtccggggctacacacgtgttacaatgggaggtacagagagctggatgtacgcaagtacgttctaatcctaaaagccttcctcagttcggattggggtctgcaacccgaccccatgaagctggattcgctagtaatcgcgcatcagccatggcgcggtgaatacgttcccgggccttgtacacaccgcccgtcaagccatgaaagccgggggcgcttgaagtccgtgaccgcaaggatcggcctagagcgaaactggtaattggggctaagtcgtaa

SEQ ID NO: 1562 - DNA, 1488 bp, Prevotella stercorea
agagtttgatcctggctcaggatgaacgctagctacaggcttaacacatgcaagtcgaggggcagcatgtcggttgcttgcaaccgatgatggcgaccggcgcacgggtgagtaacgcgtatccaacctacccttgtccatcggataacccgtcgaaaggcggcctaacacgatatgcggttcacagcaggcatctaacgtgaacgaaatgtgaaggagaaggatggggatgcgtctgattagcttgttggcggggtaacggcccaccaaggctacgatcagtaggggttctgagaggaaggtcccccacattggaactgagacacggtccaaactcctacgggaggcagcagtgaggaatattggtcaatggacgagagtctgaaccagccaagtagcgtgcaggatgacggccctatgggttgtaaactgcttttatagggggataaagtgtgccacgtgtggcatattgcaggtaccctatgaataaggaccggctaattccgtgccagcagccgcggtaatacggaaggtccgggcgttatccggatttattgggtttaaagggagcgtaggccgtttggtaagcgtgttgtgaaatgtcggggctcaacctgggcattgcagcgcgaactgccagacttgagtgcgcaggaagtaggcggaattcgtcgtgtagcggtgaaatgcttagatatgacgaagaactccgattgcgaaggcagcctgctgtagcgcaactgacgctgaagctcgaaagcgtgggtatcgaacaggattagataccctggtagtccacgcggtaaacgatggatgctcgctgtttgcgtctgacgtaagcggccaagcgaaagcgttaagcatcccacctggggagtacgccggcaacggtgaaactcaaaggaattgacgggggcccgcacaagcggaggaacatgtggtttaattcgatgatacgcgaggaaccttacccgggcttgaactgtaggcgaacgattcagagatgatgaggcccttcggggcgcctatggaggtgctgcatggttgtcgtcagctcgtgccgtgaggtgtcggcttaagtgccataacgagcgcaacccttgttcgtagttgccatcgggtgatgccgggcactctgcgaagactgcctccgtaaggagtgaggaaggtggggatgacgtcaaatcagcacggcccttacgtccggggctacacacgtgttacaatggcatgtacagaaagcggggtgtatgcaaatacgctcgaatccctaaaacatgtctcagttcggactggggtctgcaacccgaccccacgaagctggattcgctagtaatcgcgcatcagccatggcgcggtgaatacgttcccgggccttgtacacaccgcccgtcaagccatgaaagccgggggcgcctaaagtccgtgaccgcgagggtcggcctagggtgaaaccggtgattggggctaagtcgtaacaaggtaacc

SEQ ID NO: 1563 - DNA, 1533 bp, Prevotella tannerae
tacaatgtagagtttgatcctggctcaggatgaacgctggctacaggcttaacacatgcaagtcgtggggcagcggatgcttagcttgctaagtatgccggcgaccggcgcacgggtgagtaacgcgtaccgaacctgcccatcacacagggataggcttgcgaaagcaagattaatactgatggtctcagttgtatgcatgtatgattgagtaaagccttcgggcggtgatggatggcggtgcgtcccattaggacgttggcggggtaacggcccaccaatccttcgatgggtaggggttctgagaggaaggtcccccacattggaactgagatacggtccaaactcctacgggaggcagcagtgaggaatattggtcaatgggcgagagcctgaaccagccaagtagcgtgcgggatgaaggcccttgtggtcgtaaaccgcttttatcagtgaataaagtgcaccacgtgtggtgtcattgcaggtagctgaagaaaaaggaccggctaattccgtgccagcagccgcggtaatacggaaggtccgggcgttatccggaattattgggtttaaagggagcgcaggcgggagtataagtcagctgttaaatatcagagcccaactctgttatgcagttgaaactatatttcttgagtacgcacagggatggcggaattcagggtgtagcggtgaaatgcttagatatcctgaagaactccgatcgcgaaggcagccatccggagcgtaactgacgctgaggctcgaaggtgcgggtatcgaacaggattagataccctggtagtccgcacggtaaacgatgaatactcgcagttcggccgtttaggtcgagttgtccagcgaaagcgttaagtattccacctggggagtacgccggcaacggtgaaactcaaaggaattgacgggggcccgcacaagcggaggaacatgtggtttaattcgatgatacgcgaggaaccttacccgggcttgaaccaagagtgcggagtgcagagatgcgctttttcttcggacacttttggaggtgctgcatggttgtcgtcagctcgtgccgtgaggtgtcggcttaagtgccataacgagcgcaacccttttctacgtttgccatcgggtaatgccgggaactccgtggatactgccgccgcaaggcggaggaaggtggggatgacgtcaaatcagcacggcccttacgtccggggctacacacgtgttacaatggtcggagcagcaggaagctacctggcgacaggatgctgatcccaaaacccggcctcagttcggactggagtctgcaacccgactccacgaagccggattcgctagtaatcgcgcatcagccatggcgcggtgaatacgttcccgggccttgtacacaccgcccgtcaagccatgaaagccgggggtgcctgaaagccgtgaccgcgagggtcggcctagggtaaaaccggtgattggggctaagtcgtaacaaggtagccgtaccggaaggtgcggctggaacacctcctttct

SEQ ID NO: 1564 - DNA, 1536 bp, Prevotella timonensis
ttacaatgtagagtttgatcctggctcaggatgaacgctagctacaggcttaacacatgcaagtcgcagggtaacatgaggaaagcttgctttccttgatgacgactggcgcacgggtgagtaacgcgtatccaaccttcccataactacgggataacccgttgaaagacggcctaataccgtatgacatcgtttgctgacatcaaataacgattaaaggtttagcggttatggatggggatgcgtctgattagcttgttggcggggtaacggcccaccaaggcgacgatcagtaggggttctgagaggaaggtcccccacattggaactgagacacggtccaaactcctacgggaggcagcagtgaggaatattggtcaatgggcgagagcctgaaccagccaagtagcgtgcaggatgacggccctatgggttgtaaactgcttttatgtggggataaagtgcgtgacgtgtcatgcattgcaggtaccacatgaataaggaccggctaattccgtgccagcagccgcggtaatacggaaggtccgggcgttatccggatttattgggtttaaagggagcgtaggctgtctattaagcgtgttgtgaaatttaccggctcaaccggtggcttgcagcgcgaactggtcgacttgagtatgcaggaagtaggcggaattcatggtgtagcggtgaaatgcttagatatcatgacgaactccgattgcgcaggcagcttactgtagcataactgacgctgatgctcgaaagtgcgggtatcaaacaggattagataccctggtagtccgcacggtaaacgatggatgctcgctattcgtcctatttggatgagtggccaagtgaaaacattaagcatcccacctggggagtacgccggcaacggtgaaactcaaaggaattgacgggggcccgcacaagcggaggaacatgtggtttaattcgatgatacgcgaggaaccttacccgggcttgaactgccagcgaacgatacagagatgttgaggcccttcggggcgctggtggaggtgctgcatggttgtcgtcagctcgtgccgtgaggtgtcggcttaagtgccataacgagcgcaacccttttctttagttgccatcaggtgatgctgggcactctatggatactgccaccgtaaggtgtgaggaaggtggggatgacgtcaaatcagcacggcccttacgtccggggctacacacgtgttacaatggggcatacagagtgttggcttaacgcaagtttggtctaatcttcaaagtgtctcccagttcggattggggtctgcaacccgaccccatgaagctggattcgctagtaatcgcgcatcagccatggcgcggtgaatacgttcccgggccttgtacacaccgcccgtcaagccatgaaagctgggggtgcctgaagtccgtaaccgttaaggagcggcctagggcaaaactggtgattggggctaagtcgtaacaaggtagccgtaccggaaggtgcggctggaacacctcctttct

SEQ ID NO: 1565 - DNA, 1531 bp, Prevotella veroralis
tacaatggagagtttgatcctggctcaggatgaacgctagctacaggcttaacacatgcaagtcgaggggaaacggcgttgagtgcttgcactcttcggacgtcgaccggcgcacgggtgagtaacgcgtatccaaccttcccataactaagggataacctgccgaaaggcagactaataccttatgtaattcttagatgacatcagaagagaatgaaagatttatcggttatggatggggatgcgtctgattagcttgttggtggggtaacagcccaccaaggcaacgatcagtaggggttctgagaggaaggtcccccacattggaactgagacacggtccaaactcctacgggaggcagcagtgaggaatattggtcaatgggcgagagcctgaaccagccaagtagcgtgcaggatgacggccctatgggttgtaaactgcttttgtatggggataaagtcaatcacgtgtgattgtttgcaggtaccatacgaataaggaccggctaattccgtgccagcagccgcggtaatacggaaggttcgggcgttatccggatttattgggtttaaagggagcgtaggccggagattaagtgtgttgtgaaatgtagacgctcaacgtctgacttgcagcgcatactgttttccttgagtacgcacaacgttggcggaattcgtcgtgtagcggtgaaatgcttagatatgacgaagaactccgattgcgaaggcagctgacgggagcgccactgacgcttaagctcgaaggtgcgggtatcgaacaggattagataccctggtagtccgcacagtaaacgatggatgcccgctgttggtacctagtatcagcggctaagcgaaagcattaagcatcccacctggggagtacgccggcaacggtgaaactcaaaggaattgacgggggcccgcacaagcggaggaacatgtggtttaattcgatgatacgcgaggaaccttacccgggcttgaattgcagaggaaggatttagagataatgacgcccttcggggtctctgtgaaggtgctgcatggttgtcgtcagctcgtgccgtgaggtgtcggcttaagtgccataacgagcgcaacccctctcttcagttgccatcaggtgatgctgggcactctggagacactgccaccgtaaggtgtgaggaaggtggggatgacgtcaaatcagcacggcccttacgtccggggctacacacgtgttacaatggccggtacagagggacggtgtaatgcaaattgcatccaatcttgaaagccggtcccagttcggactggggtctgcaacccgaccccacgaagctggattcgctagtaatcgcgcatcagccatggcgcggtgaatacgttcccgggccttgtacacaccgcccgtcaagccatgaaagccgggggtgcctgaagtccgtgaccgcaaggatcggcctagggcaaaactggtgattggggctaagtcgtaacaaggtagccgtaccggaaggtgcggctggaacacctcctt

SEQ ID NO: 1566 - DNA, 1302 bp, Prevotellaceae bacterium P4P_62 P1
gaacgctagctacaggcttaacacatgcaagtcgagggaccggcgcacgggtgcgtaacgcgtatcgaacctgccctttactcagggatagccttgcgaaagtaagattaatacctgatagttaaagttggtaaaggatggcgatgcgtctgattaggtagtaggcggggtaatggcccacctagccgacgatcagtaggggttctgagaggaaggtcccccacattggaactgagacacggtccaaactcctacgggaggcagcagtgaggaatattggtcaatggacgagagtctgaaccagccaagtagcgtgcaggatgacggcctctgggttgtaaactgcttttagttgggaacaggagtgtaccatcagaaaaaggaccggctaattccgtgccagcagccgcggtaatacggaaggtccaggcgttatccggatttattgggtttaaagggagcgtaggcggacgattaagtcagctgtgaaagtttgcggctcaaccgtaaaattgcagttgaaactggttgtcttgagtgcacgcagggatgttggaattcatggtgtagcggtgaaatgcttagatatcatgaagaactccgatcgcgaaggcatatgtccggagtgactgacgctgaggctcgaaagtgcgggtatcgaacaggattagataccctggtagtccgcacagtaaacgatgaatactcgcagtatgcgtgtatgctgccaagtgaaaacgttaagtattccacctggggagtacgccggcaacggtgaaactcaaaggaattgacgggggcccgcacaagcggaggaacatgtggtttaattcgatgatacgcgaggaaccttacccgggcttgaactatggaggtgctgcatggttgtcgtcagctcgtgccgtgaggtgtcggcttaagtgccataacgagcgcaacccttctccacgtttgccatcagctgggcactccgtggatactgccatcgtaagatggaggaaggtggggatgacgtcaaatcagcacggcccttacgtccggggctacacacgtgttacaatggccggcagagggaagccaccaggcgactgggcgctgatccattccggtctcagttcggatggagtctgcaacccgactccagaagctggattcgctagtaatcgcgcatcagccatggcgcggtgaatacgttcccgggccttgtacacaccgcccgtcaagccatgaaagccgggggtgcctgaaagctgtggcggcctagggtaaaaccggtgattggggctaagtcgtaacaaggta

SEQ ID NO: 1567 - DNA, 1465 bp, Prochlorococcus marinus
ggctcaggatgaacgctggcggcgtgcttaacacatgcaagtcgaacgaaccttcgggttagtggcggacgggtgagtaacgcgtgagaatctgccctcaggagggggataacggttggaaacgaccgctaataccccatatgcctactggtgaaacgaatttcgcctgaggatgagctcgcgtctgattagcttgttggtgaggtaatggctcaccaaggcttcgatcagtagctggtctgagaggatgatcagccacactgggactgagacacggcccagactcctacgggaggcagcagtggggaattttccgcaatgggcgaaagcctgacggagcaacgccgcgtgagggacgaaggcctctgggctgtaaacctcttttctcaaggaagaagatatgacggtacttgaggaataagccacggctaattccgtgccagcagccgcggtaatacgggagtggcaagcgttatccggaattattgggcgtaaagcgtccgcaggcggcttttcaagtctgctgttaaagcgtggagcttaactccatcatggcagtggaaactgaaaggcttgagtatggtaggggcagagggaattcccggtgtagcggtgaaatgcgtagatatcgggaagaacaccagtggcgaaggcgctctgctgggccattactgacgctcatggacgaaagccaggggagcgaaagggattagatacccctgtagtcctggccgtaaacgatgaacactaggtgtcgggggaatcgaccccttcggtgtcgtagctaacgcgttaagtgttccgcctggggagtacgcacgcaagtgtgaaactcaaaggaattgacgggggcccgcacaagcggtggagtatgtggtttaattcgatgcaacgcgaagaaccttaccagggtttgacatcctgcgaacctcttagaaatttgagggtgccttcgggaatgcagtgacaggtggtgcatggctgtcgtcagctcgtgtcgtgagatgttgggttaagtcccgcaacgagcgcaacccacgtttttagttgccagcatttagttgggcactctagaaagaccgccggtgataaaccggaggaaggtgtggatgacgtcaagtcatcatgccccttacaccctgggctacacacgtactacaatgctacggacaaagggcagcaaactcgcgagagctagcaaatcccataaaccgtggctcagttcagatcgtaggctgcaactcgcctacgtgaagtaggaatcgctagtaatcgcaggtcagcatactgcggtgaatacgttcccgggccttgtacacaccgcccgtcacaccatggaagttggccatgcccgaagtcgttactccaacccttgtggaggaggacgccgaaggtggggctaatgactggggtgaagtcgtaacaaggtagccgtaccggaaggtgcggctggatcacctcctaa

SEQ ID NO: 1568 - DNA, 1320 bp, Propionibacteriaceae bacterium NML 02-0265
gctggcggcgtgcttaacacatgcaagtcgaacgagtggcgaacgggtgagtaacacgtgagcaacctacccttgacactggaataagcgctcgaaagggcgtctaataccggatattgaaaggcggtcaaggatgggctcgcggcctatcagctagttggtgaggtaacggctcaccaaggcttcgacgggtagccggcctgagagggcgaccggccacactgggactgagatacggcccagactcctacgggaggcagcagtggggaatattgcacaatgggcgcaagcctgatgcagcaacgccgcgtgcgggatgacggccttcgggttgtaaaccgctttcagcaccgacgatgacggtaggtgcagaagaaggaccggccaactacgtgccagcagccgcggtgatacgtagggtccgagcgttgtccggaattattgggcgtaaagagctcgtaggcggtttgtcgcgtcggaagtgaaaactcagggcttaactctgagcctgcttccgatacgggcagactagaggaagttaggggagaacggaattcctggtggagcggtggaatgcgcagatatcaggaggaacaccggtggcgaaggcggttctctgggactcctgacgctgaggagcgaaagcgtggggagcaaacaggcttagataccctggtagtccacgccgtaaacggtgggcactaggtgtgggtcgatccgtgccgtagctaacgcattaagtgccccgcctggggagtacggccgcaaggctaaaactcaaaggaattgacgggggcccgcacaagcggcggagcatgcggattaattcgatgcaacgcgaagaaccttacctgggtttgacatatacaggtggtgcatggctgtcgtcagctcgtgtcgtgagatgttgggttaagtcccgcaacgagcgcaaccctcgtcctatgttgccagcggccggggactcataggagactgccggggtcaactcggaggaaggtggggatgaggtcaagtcatcatgccccttatgtccagggcttcacgcatgctacaatggctggcaaagggctgcgaaaccgcaaggtttagcgaatcccaaccagtctcagttcggatggggtctgcaactcgaccccagaagtcggagtcgctagtaatcgcagatcagcaacgctgcggtgaatacgttcccgggccttgtacacaccgcccgtcaagtcatgaaagtcggcaacacccgaagccggtgcccagggagccgtcgaaggtggggctggtaattaggactaagtcgtaacaaggtagccgtaccggaag

SEQ ID NO: 1569 - DNA, 1522 bp, Propionibacterium acidipropionici
agagtttgatcctggctcaggacgaacgctggcggcgtgcttaacacatgcaagtcgaacggtaaggccctttcgggggtacacgagtggcgaacgggtgagtaacacgtgagtaacctgcccacttcttcgggataacgctaggaaactggtgctaataccggatatgagctttcaccgcatggtgggggttggaaagtgtttgtggtggtggatggactcgcggcctatcagcttgttggtgaggtagtggctcaccaaggcggtgacgggtagccggcctgagagggtgaccggccacattgggactgagatacggcccagactcctacgggaggcagcagtggggaatattgcacaatgggcggaagcctgatgcagcaacgccgcgtgcgggatgacggccttcgggttgtaaaccgctttcaccaggggcgaaggcattcttttggggtgttgacggtacctggagaagaagcaccggctaactacgtgccagcagccgcggtgatacgtagggtgcgagcgttgtccggatttattgggcgtaaagggctcgtaggcggttgatcgcgtcggaagtgaaaacttggggcttaaccctgagcgtgctttcgatacgggttgacttgaggaaggtaggggagaatggaattcctggtggagcggtggaatgcgcagatatcaggaggaacaccagtggcgaaggcggttctctggacctttcctgacgctgaggagcgaaagcgtggggagcaaacaggcttagataccctggtagtccacgctgtaaacggtgggtactaggtgtggggtccattccacggattccgtgccgtagctaacgcattaagtaccccgcctggggagtacggccgcaaggctaaaactcaaaggaattgacggggccccgcacaagcggcggagcatgcggattaattcgatgcaacgcgaagaaccttacctgggtttgacatggattggtaacggtcagagatggccgccccccttgtgggccggttcacaggtggtgcatggctgtcgtcagctcgtgtcgtgagatgttgggttaagtcccgcaacgagcgcaaccctcgtccactgttgccagcatttggttggggactcagtggagaccgccggggtcaactcggaggaaggtggggatgacgtcaagtcatcatgccccttatgtccagggcttcacgcatgctacaatggccggtacaaagagtggcgacatcgtgaggtggagcgaatctcagaaagccggtctcagttcggattggggtctgcaactcgaccccatgaagtcggagtcgctagtaatcgcagatcagcaacgctgcggtgaatacgttcccggggcttgtacacaccgcccgtcaagtcatgaaagtcggtaacacccgaagccggtggcccaacacgttctgcgtgggggagtcgtcgaaggtgggactggtaattaggactaagtcgtaacaaggtagccgtaccggaaggtgcggctggatcacct

SEQ ID NO: 1570 - DNA, 1326 bp, Propionibacterium acnes
  modified_base (46)..(46): a, c, t, g, unknown or other
  modified_base (1301)..(1301): a, c, t, g, unknown or other
  modified_base (1316)..(1316): a, c, t, g, unknown or other
  modified_base (1320)..(1320): a, c, t, g, unknown or other
gtgagtaacacgtgagtaacctgcccttgactttgggataacttcnggaaactggggctaataccggataggagctcctgctgcatggtgggggttggaaagtttcggcggttggggatggactcgcggcttatcagcttgttggtggggtagtggcttaccagggctttgacgggtagccggcctgagagggtgaccggccacattgggactgagatacggcccagactcctacgggaggcagcagtggggaatattgcacaatgggcggaagcctgatgcatcaacgccgcgtgcgggatgacggccttcgggtgtaaccgctttcgctgtgacgaagcgtgagtgacgtatgggtagaagcaccggctaactacgtgccagcaccgcggtgatactagggtgcgagcgttgtccggatttattgggcgtaaagggctgtaggtggttgatcgcgtcggaagtgtaatcttggggcttaaccctgagcgtgctttcatacgggttgacttgaggaaggtaggggagaatggaattcctggtggagcggtggaatgcgcaatatcagaggaacaccagtggcgaaggcggttctctgggcctttcctgacgctgaggagcgaaagcgtggggagcgaacaggcttagataccctggtagtccacgctgtaaacggtgggtactaggtgtggggtccattccacgggttccgcgccgtaactaacgctttaagtaccccgcctggggagtacggccgcaaggctaaacctcaaaggaattgacggggccccgcacaagcggcggagcatgcggattaattcgatgcaacgcgtataaccttggatgggtttgacatggatcgggagtgctcaaagatgggtgtgcctcttttggggtcggttcacaggtggtgcatggctgtcgtcagctcgtgtcgtgagatgttgggttaagtcccgcaacgagcgcaacccttgttcactgttgccagcacgttatggtggggactcagtggagaccgccggggtcaactcggaggaaggtggggatgacgtcaagtcatcatgccccttatgtccagggcttcacgcatgctacaatggctggtacagagagtggcgagcctgtgagggtgagcgaatctcggaaagccggtctcagttcggattggggtctgcaactcgacctcatgaagtcggagtcgctagtaatcgcagatcagcaacgctgcggtgaatacgttcccggggcttgtacacaccgcccgtcaagtcatgaaagttggtaacacccgaagccgntggcctaaccgttgngggngagccg

SEQ ID NO: 1571 - DNA, 1500 bp, Propionibacterium avidum
tcaggacgaacgctggcggcgtgcttaacacatgcaagtcgaacggaaagggccttcgggggtactcgagtggcgaacgggtgagtaacacgtgagtaacctgcccttgacttcgggataacttcaggaaactggggctaataccggataggaatccttgctgcatggtgggggttggaaagcttcggcggttttggatggactcgcggcttatcagcttgttggtggggtagtggcttaccaaggctttgacgggtagccggcctgagagggcgaccggccacattgggactgagatacggcccagactcctacgggaggcagcagtggggaatattgcacaatgggcggaagcctgatgcagcaacgccgcgtgcgggatgacggccttcgggttgtaaaccgctttcagcaggggcgaacttgtggtgacggtacctgcagaagaagcaccggctaactacgtgccagcagccgcggtgatacgtagggtgcgagcgttgtccggatttattgggcgtaaagagctcgtaggtggttgattgcgtcggaagtgaaaacttggggcttaaccctgagcgtgctttcgatacgggttgacttgaggaaggtaggggagaatggaattcctggtggagcggtggaatgcgcagatatcaggaggaacaccagtggcgaaggcggttctctggacctttcctgacgctgaggagcgaaagcgtggggagcgaacaggcttagataccctgggtagtccacgctgtaaacggtgggtactaggtgtggggtccattccacggattccgtgccgtagctaacgcattaagtaccccgcctggggagtacggccgcaaggtaaaactcaaaggaattgacggggccccgcacaagcggcggagcatgcggattaattcgatgcaacgcgaagaaccttacctgggtttgacatggactgggagtgctcagagatgggtatgcctccttgtggggctggttcacaggtggtgcatggctgtcgtcagctcgtgtcgtgagatgttgggttaagtcccgcaacgagcgcaaccctcgttcactgttgccagcacgttatggtggggactcagtggagaccgccggggtcaactcggaggaaggtggggatgacgtcaagtcatcatgccccttatgtccagggcttcacgcatgctacaatggccggtacaaagagttgcgagcctgtgagggtgagcgaatctcggaaagccggtctcagttcggattggggtctgcaactcgaccccatgaagtcggagtcgctagtaatcgcagatcagcaacgctgcggtgaatacgttcccggggcttgtacacaccgcccgtcaagtcatgaaagtcggtaacacccgaagccggtggcctaacctgtgtgggggagccgtcgaaggtgggactggtaattaggactaagtcgtaacaaggtagccgtaccggaaggtgcggctggatcacctcctttct

SEQ ID NO: 1572 - DNA, 1510 bp, Propionibacterium freudenreichii
agtttgatcctggctcaggacgaacgctggcggcgtgcttaacacatgcaagtcggacggtaaggcccctttcggggggtacacgagtggcgaacgggtgagtaacacgtgaggaacgtgcccttgacttcggtatagctccaggaaactggtggtaatcccgaatatgagcctggcctgcatgggttgggttggaaagctttatgcggtcagggatcgtctcgcggcctatcagcttgttggtggggtaatggcctaccaaggcagcgacgggtagccggcctgagagggtgaccggccacattgggactgagatacggcccagactcctacgggaggcagcagtggggaatattgcacaatgggcgcaagcctgatgcagcaacgccgcgtgcgggatgacggccttcgggttgtaaaccgctttcatccatgacgaagcgcaagtgacggtagtgggagaagaagcaccggctaactacgtgccagcagccgcggtgatacgtagggtgcgagcgttgtccggaattattgggcgtaaagagcttgtaggcggttgatcacgtcggaagtgaaattccagggcttaactctgggcttgctttcgatacgggttgacttgaggaatgtaggggagaatggaactctcggtggagcggtggaatgcgcagatatcgggaagaacaccagtggcgaaggcggttctctggacatttcctgacgctgagaagcgaaagcgtggggagcaaacaggcttagataccctggtagtccacgccgtaaacggtgggtactaggtgtgggtcccttccacggggtccgtgccgtagctaacgcattaagtaccccgcctggggagtacggccgcaaggctaaaactcaaaggaattgacggggccccgcacaagcggcggagcatgcggattaattcgatgcaacgcgaagaaccttacctgggtttgacatgtactggaagcgttcagagatgggcgtgcctttttggctggtacacaggtggtgcatggctgtcgtcagctcgtgtcgtgagatgttgggttaagtcccgcaacgagcgcaaccctcgtccaatgttgccagcagttcggctggggactcattggagaccgccggggccaactcggaggaaggtggggatgaggtcaagtcatcatgccccttatgtccagggcttcacgcatgctacaatggccggtacaaagagttgcgagcctgtgagggtgagcgaatctcagaaagccggtctcagttcggattggggtctgcaactcgaccccatgaagtcggagtcgctagtaatcgcagatcagcaacgctgcggtgaatacgttcccggggcttgtacacaccgcccgtcaagtcatgaaagtcggtaacacccgaagccggtggcccaaccttttggggggagccgtcgaaggtgggactggtgattaggactaagtcgtaacaaggtagccgtaccggaaggtgcggctggatcacctccttt

SEQ ID NO: 1573 - DNA, 1442 bp, Propionibacterium granulosum
tgatcatggctcaggacgaacgctggcggcgtgcttaacacatgcaagtcgtacggtaaggccctttcgggggtacacgagtggcgaacgggtgagtaacacgtgagtaacctgcccacaactttgggataacgctaggaaactggtgctaatactggatatgtgctcctgctgcatggtgggggttggaaagctccggcggttgtggatggactcgcggcctatcagcttgttggtggggtagtggcctaccaaggcggcgacgggtagccggcctgagagggtgaccggccacattgggactgagatacggcccagactcctacgggaggcagcagtggggaatattgcacaatgggcgcaagcctgatgcagcaacgccgcgtgcgggatgacggccttcgggttgtaaaccgctttcagcagggacgaagctttttgtgacggtacctgcagaagaagcaccggctaactacgtgccagcagccgcggtgatacgtagggtgcgagcgttgtccggatttattgggcgtaaagggctcgtaggcggttgatcgcgtcggaagtggaaacttgatgcttaacgttgagcgtgctttcgatacgggttgacttgaggaaggtaggggagaatggaattcctggtggagcggtggaatgcgcagatatcaggaggaacaccagtggcgaaggcggttctctggacctttcctgacgctgaggagcgaaagcgtggggagcgaacaggcttagataccctggtagtccacgctgtaaacggtgggtactaggtgtggggtccattccacggattctgtgccgtagctaacgcattaagtaccccgcctggggagtacggccgcaaggctaaaactcaaaggaattgacggggccccgcacaagcggcggagcatgcggattaattcgatgcaacgcgaagaaccttacctgggtttgacatggatcggaagcttccagagatggttgtgcctcttttggggtcggttcacaggtggtgcatggctgtcgtcagctcgtgtcgtgagatgttgggttaagtcccgcaacgagcgcaaccctcgtccactgttgccagcaattcggttggggactcagtggagaccgccggggtcaactcggaggaaggtggggatgacgtcaagtcatcatgccccttatgtccagggcttcacgcatgctacaatggccggtacagtgagttgcgacatcgtaaggtggagcgaatctcaaaaagccggtctcagttcggattggggtctgcaactcgacctcatgaagtcggagtcgctagtaatcgcagatcagcaacgctgcggtgaatacgttcccggggcttgtacacaccgcccgtcaagtcatgaaagtcggtaacactcgaagccggtggcctaacactttttgtgggggagctgtcgaaggtg

SEQ ID NO: 1574 - DNA, 1487 bp, Propionibacterium jensenii
agttttgattcctgggcttcaaggaacgaaaccgctgggtggcgttgcttaaccctgcaaagtcggaaccgggttaaggccccttttgggggggttaccacgaagtggcgaaccgggttgagtaaacaccgtggagttaacccttccccattccactttcgggattaacgctagggaaacctggtggctaaattcccggatatgagctctcatcgccatggtgggggttggaaagttctggcggtggtggatggactcgcgtcctatcagcttgttggtgaggttgtggctcaccaaggcgtcgacgggtagccggcctgagagggtgaccggccacattgggactgagatacggcccagactcctacgggaggcagcagtggggaatattgcacaatgggcgcaagcctgatgcagcaacgccgcgtgcgggatgacggccttcgggttgtaaaccgctttcaccagggacgaagtgcctttcggggtgtgacggtacctggagaagaagcaccggctaactacgtgccagcagccgcggtgatacgtagggtgcgagcgttgtccggatttattgggcgtaaagagctcgtaggtggttgatcacgtcggaagtgaaaacttggggcttaaccctgggcgtgctttcgatacgggttgacttgaggaaggtaggggagaatggaattcctggtggagcggtggaatgcgcagatatcaggaggaacaccagtggcgaaggcggttctctggacctttcctgacgctgaggagcgaaagcgtggggagcaaacaggcttagataccctggtagtccacgctgtaaacggtgggtactaggtgtggggtccattccacggattccgtgccgtagctaacgcattaagtaccccgcctggggagtacggccgcaggctaaactcaaaggaattgacggggccccgcacaagcggcggagcatgcggattaattcgatgcaacgcgaagaaccttacctgggtttgacatggattggtaacggtcagagatggccgccccccttgtgggccgattcacaggtggtgcatggctgtcgtcagctcgtgtcgtgagatgttgggttaagtcccgcaacgagcgcaaccctcgtccactgttgccagcaattcggttggggactcagtggagaccgccggggtcaactcggaggaaggtggggatgacgacaagtcatcatgccccttatgtccagggcttcacgcatgctacaatggctggtacaaagagttgcgacactgtgaggtggagcgaatctcaaaaagccagtctcagttcggattggggtctgcaactcgaccccatgaagtcggagtcgctagtaatcgcagatcagcaacgctgcggtgaatacgttcccggggcttgtacacaccgcccgtcaagtcatgaaagtcggtaacacccgaagccggtggcccaaccttttgggggggagccgtccaaggtgg

SEQ ID NO: 1575 - DNA, 1506 bp, Propionibacterium propionicum
tcaggacgaacgctggcggcgtgcttaacacatgcaagtcgaacggaaaggcccctttgggggtactcgagtggcgaacgggtgagtaacacgtgagtaacctgcccttgacttcgggataacttcaggaaactggggctaataccggatagacatccttgctgcatggtgggggttggaaagcttcggcggttttggatggactcgcggcttatcagcttgttggtggggtagtggcttaccaaggctttgacgggtagccggcctgagagggcgaccggccacattgggactgagatacggcccagactcctacgggaggcagcagtggggaatattgcacaatgggcggaagcctgatgcagcaacgccgcgtgcgggatgacggcttcgggttgtaaacccgctttcagcaggggcgaagcttttgtgacggtacctgcagaagaagcaccggctaactacgtgccagcagccgcggtgatacgtagggtgcgagcgttgtccggatttattgggcgtaaagagctcgtaggtggttgattgcgtcggaagtgaaaacttggggcttaaccctgagcgtgctttcgatacgggttgacttgaggaaggtaggggagaatggaattcctggtggagcggtggaatgcgcagatatcaggaggaacaccagtggcgaaggcggttctctggacctttcctgacgctgaggagcgaaagcgtggggagcgaacaggcttagataccctgggtagtccacgctgtaaacggtgggtactaggtgtggggtccattccacggattccgtgccgtagctaacgcattaagtaccccgcctggggagtacggccgcaaggctaaaactcaaaggaattgacggggccccgcacaagcggcggagcatgcggattaattcgatgcaacgcgaagaaccttacctgggtttgacatggactgggagtgctcagagatgggtatgcctccttgtggggctggttcacaggtggtgcatggctgtcgtcagctcgtgtcgtgagatgttgggttaagtcccgcaacgagcgcaaccctcgttcactgttgccagcacgttatggtggggactcagtggagaccgccggggtcaactcggaggaaggtggggatgacgtcaagtcatcatgccccttatgtccagggcttcacgcatgctacaatggccggtacaaagagttgcgagcctgtgagggtgagcgaatctcggaaagccggtctcagttcggattggggtctgcaactcgaccctatgaagtcggagtcgctagtaatcgcagatcagcaacgctgcggtgaatacgttcccggggcttgtacacaccgcccgtcaagtcatgaaagtcggtaacacccgaagccggtggcctaacctgtgtgggggagccgtcgaaggtgggactggtaattaggactaagtcgtaacaaggtagccgtaccggaaggtgcggctggatcacctcctttctaagg

SEQ ID NO: 1576 - DNA, 1530 bp, Propionibacterium sp.
  434-HC2
tttcattggagagtttgatcctggctcaggacgaacgctggcggcgtgcttaacacatgcaagtcgaacggaaaggccctgcttttgtggggtgctcgagtggcgaacgggtgagtaacacgtgagtaacctgcccttgactttgggataacttcaggaaactggggctaataccggataggagctcctgctgcatggtgggggttggaaagtttcggcggttggggatggactcgcggcttatcagcttgttggtggggtagtggcttaccaaggctttgacgggtagccggcctgagagggtgaccggccacattgggactgagatacggcccagactcctacgggaggcagcagtggggaatattgcacaatgggccggaagcctgatgcagcaacgccgcgtgcgggatgacggccttcgggttgtaaaccgctttcgcctgtgacgaagcgtgagtgacggtaatgggtaaagaagcaccggctaactacgtgccagcagccgcggtgatacgtagggtgcgagcgttgtccggatttattgggcgtaaagggctcgtaggtggttgatcgcgtcggaagtgtaatcttggggcttaaccctgagcgtgctttcgatacgggttgacttgaggaaggtaggggagaatggaattcctggtggagcggtggaatgcgcagatatcaggaggaacaccagtggcgaaggcggttctctgggcctttcctgacgctgaggagcgaaagcgtggggagcgaacaggcttagataccctggtagtccacgctgtaaacggtgggtactaggtgtggggtccattccacgggttccgtgccgtagctaacgctttaagtaccccgcctggggagtacggccgcaaggctaaaactcaaaggaattgacggggccccgcacaagcggcggagcatgcggattaattcgatgcaacgcgtagaaccttacctgggtttgacatggatcgggagtgctcagagatgggtgtgcctcttttggggtcggttcacaggtggtgcatggctgtcgtcagctcgtgtcgtgagatgttgggttaagtcccgcaacgagcgcaacccttgttcactgttgccagcacgttatggtggggactcagtggagaccgccggggtcaactcggaggaaggtggggatgacgtcaagtcatcatgccccttatgtccagggcttcacgcatgctacaatggctggtacagagagtggcgagcctgtgagggtgagcgaatctcggaaagccggtctcagttcggattggggtctgcaactcgacctcatgaagtcggagtcgctagtaatcgcagatcagcaacgctgcggtgaatacgttcccggggcttgtacacaccgcccgtcaagtcatgaaagttggtaacacccgaagccggtggcctaaccgttgtgggggagccgtcgaaggtgggactggtgattaggactaagtcgtaacaaggtagccgtaccggaaggtgcggctggatcacctcctttct

SEQ ID NO: 1577 - DNA, 1367 bp, Propionibacterium sp.
  H456
gagtttgatcctggctcaggacgaacgctggcggcgtgcttaacacatgcaagtcgaacgagtggcgaacgggtgagtaacacgtgagtaacctgcccttgacttcgggataacttcaggaaactggggctaataccggatagggaaaggcggttttggatggactcgcggcttatcagcttgttggtggggtagtggcttaccaaggctttgacgggtagccggcctgagagggcgaccggccacattgggactgagatacggcccagactcctacgggaggcagcagtggggaatattgcacaatgggcggaagcctgatgcagcaacgccgcgtgcgggatgacggccttcgggttgtaaaccgctttcagcaggggcgatgacggtacctgcagaagaagcaccggctaactacgtgccagcagccgcggtgatacgtagggtgcgagcgttgtccggatttattgggcgtaaagagctcgtaggtggttgattgcgtcggaagtgaaaacttggggcttaaccctgagcgtgctttcgatacgggttgacttgaggaaggtaggggagaatggaattcctggtggagcggtggaatgcgcagatatcaggaggaacaccagtggcgaaggcggttctctggacctcctgacgctgaggagcgaaagcgtggggagcgaacaggcttagataccctggtagtccacgctgtaaacggtgggtactaggtgtggggtattccgtgccgtagctaacgcattaagtaccccgcctggggagtacggccgcaaggctaaaactcaaaggaattgacggggccccgcacaagcggcggagcatgcggattaattcgatgcaacgcgaagaaccttacctgggtttgacatgcacaggtggtgcatggctgtcgtcagctcgtgtcgtgagatgttgggttaagtcccgcaacgagcgcaaccctcgttcactgttgccagcaygtggggactcagtggagaccgccggggtcaactcggaggaaggtggggatgacgtcaagtcatcatgccccttatgtccagggcttcacgcatgctacaatggccggcaaagagttgcgagcctgtgagggtgagcgaatctcggccggtctcagttcggatggggtctgcaactcgaccctagaagtcggagtcgctagtaatcgcagatcagcaacgctgcggtgaatacgttcccggggcttgtacacaccgcccgtcaagtcatgaaagtcggtaacacccgaagccggtgcctagggagccgtcgaaggtgggactggtaattaggactaagtcgtaacaaggtagccgtaccggaaggtgcggctggatcacctcctt

SEQ ID NO: 1578 - DNA, 966 bp, Propionibacterium sp.
  LG
  modified_base (876)..(876): a, c, t, g, unknown or other
  modified_base (900)..(900): a, c, t, g, unknown or other
  modified_base (914)..(914): a, c, t, g, unknown or other
  modified_base (947)..(949): a, c, t, g, unknown or other
ttttgtggggtgctcgagtggcgaacgggtgagtaacacgtgagtaacctgcccttgactttgggataacttcaggaaactggggctaataccggataggagctcctgctgcatggtgggggttggaaagtttcggcggttggggatggactcgcggcttatcagcttgttggtggggtagtggcttaccaaggctttgacgggtagccggcctgagagggtgaccggccacattgggactgagatacggcccagactcctacgggaggcagcagtggggaatattgcacaatgggcggaagcctgatgcagcaacgccgcgtgcgggatgacggccttcgggttgtaaaccgctttcgcctgtgacgaagcgtgagtgacggtaatgggtaaagaagcaccggctaactacgtgccagcagccgcggtgatacgtagggtgcgagcgttgtccggatttattgggcgtaaagggctcgtaggtggttgatcgcgtcggaagtgtaatcttggggcttaaccctgagcgtgctttcgatacgggttgacttgaggaaggtaggggagaatggaattcctggtggagcggtggaatgcgcagatatcaggaggaacaccagtggcgaaggcggttctctgggcctttcctgacgctgaggagcgaaagcgtggggagcgaacaggcttagataccctggtagtccacgctgtaaacggtgggtactaggtgtggggtccattccacgggttccgtgccgtagctaacgctttaagtaccccgcctggggagtacggccgcaaggctaaaactcaaaggaattgacggggccccgcacaagcggcggagcatgcggattaattcgatgcaacgcgtanaaccttacctgggtttgacatggntcgggagtgctcanagatgggtgtgcctcttttggggtcggttcacnnnggtgcatggctgtcgtc

SEQ ID NO: 1579 - DNA, 1359 bp, Propionibacterium sp.
  S555a
  modified_base (574)..(574): a, c, t, g, unknown or other
aaggccctgcttttgtggggtgctcgagtggcgaacgggtgagtacacacgtgagtaacctgcccttgactttgggataacttcaggaaactggggctaataccggataggagctcctgctgcatggtgggggttggaaagtttcggcggttggggatggactcgcggcttatcagcttgttggtggggtagtggcttaccaaggctttgacgggtagccggcctgagagggtgaccggccacattgggactgagatacggcccagactcctacgggaggcagcagtggggaatattgcacaatgggcggaagctgatgcagcaacgccgcgtgcgggatgacggccttcgggttgtaaaccgctttcgcctgtgacgaagcgtgagtgacggtaatgggtaaagaagcaccggctaactacgtgccagcagccgcggtgatacgtagggtgcgagcgttgtccggatttattgggcgttaaagggctcgtaggtggtggatcgcgtcggaagtgtaatcttggcggcttaaccctgagcgtgctttcgacacgggttgacttgaggaaggtangggagaatggaattcctggtggagcggtggaatgcgcagatatcaggaggaacaccagtggcgaaggcgttctctgggcctttcctgacgctgaggagcgaaagcgtggggagcgaacaggcttagataccctggtagtccacgctgtaaacggtgggtactaggtgtggggtccattccacgggttccgtgccgtactaacgctttaagtaccccgcctggggagtacggccgcaaggctaaaactcaaaggaattgacggggccccgcacaagcggcggagcatgcggattaattcgatgcaacgcgtagaaccttacctgggtttgacatggatcgggagtgctcagagatgggtgtgcctcttttggggtcggttcacaggtggtgcatggctgtcgtcagctcgtgtcgtgagatgttgggttaagtcccgcaacgagcgcaacccttgttcactgttgccagcacgttatggtggggactcagtggagaccgccggggtcaactcggaggaaggtggggatgacgtcaagtcatcatgccccttatgtccagggcttcacgcatgctacaatggctggtacagagagtggcgagcctgtgagggtgagcgaatctcggaaagccggtctcagttcggattggggtctgcaactcgacctcatgaagtcggagtcgctagtaatcgcagatcagcaacgctgcggtgaatacgttcccggggcttgtacacaccgcccgtcaagtcatgaaagttggtaacacccgaagccggtggccta

SEQ ID NO: 1580 - DNA, 1494 bp, Propionibacterium sp.
  oral taxon 192
gagtttgatcctggctcaggacgaacgctggcggcgtgcttaacacatgcaagtcgaacggtaaggccctttcgggggtacacgagtggcgaacgggtgagtaacacgtgagtaacctgcccctgactttgggataacggatggaaacgtttgctaataccggatattcagctcttgaggcatcttttgggttggaaagttttttcggttggggatgggctcgcgtcctatcagcttgttgttggggtagtggcctaccaaggcgtcgacgggtagccggcctgagagggcgaccggccacattgggactgagatacggcccagactcctacgggaggcagcagtggggaatattgcacaatggacggaagtctgatgcagcaacgccgcgtgcgggatgacggccttcgggttgtaaaccgctttcagccatgacgaagcgtgagtgacggtagtggtagaagaagcaccggctaactacgtgccagcagccgcggtgatacgtagggtgcgagcgttgtccggatttattgggcgtaaagagcttgtaggcggttgattgcgtcgaaagtgcaaactcagggcttaactctgagcctgctttcgatacgggttgacttgagggatgtaggggagaatggaattcccggtggagcggtggaatgcgcagatatcgggaggaacaccagtggcgaaggcggttctctggacatttcctgacgctgagaagcgaaagcgtggggagcaaacaggcttagataccctggtagtccacgctgtaaacggtgggcattaggtgtgggtcacattccacgtggtctgtgccgtagctaacgcattaagtaccccgcctggggagtacggccgcaaggctaaaactcaaaggaattgacggggccccgcacaagcggcggagcatgcggattaattcgatgcaacgcgaagaaccttacctgggtttgacatatgccggaagcatgcagagatgtgtgtgcctttttggtcggtttacaggtggtgcatggctgtcgtcagctcgtgtcgtgagatgttgggttaagtcccgcaacgagcgcaaccctcgtccaatgttgccagcacgttatggtggggactcattggagaccgccggggtcaactcggaggaaggtggggatgacgtcaagtcatcatgccccttatgtccagggcttcacgcatgctacaatggccggtacaaagagttgcgagcctgtgagggtgagcgaatctcataaagccggtctcagttcggattggggtctgcaactcgaccccatgaagtcggagtcgctagtaatcgcagatcagcaatgctgcggtgaatacgttctcggggcttgtacacaccgcccgtcaagtcatgaaagttggtaacacccgaagccggtggcctaacctttgtggggggagccgtcgaaggtgggactggtaattaggactaagtcgtaacaaggtagccgtaccggaaggtgc

SEQ ID NO: 1581 - DNA, 1467 bp, Propionibacterium thoenii
agttttgatcctggctcaggacgaaacgctggcggcgtgcttaacacatgcaattcgaacggtaaggcccttttcgggggtacaacgagtggccaacgggtgagtaacacgtgagtaaccctgcccatcacttcgggataacgctgggaaactggtgctaataccggatatgagctcctgctgcatggtgggggttggaaagtttttgcggtggtggatggactcgcgtcctatcagcttgttggtgaggttgtggctcaccaaggcgtcgacgggtagccggcctgagagggtgaccggccacattgggactgagatacggcccagactcctacgggaggcagcagtggggaatattgcacaatgggcgaaagcctgatgcagcaacgccgcgtgcgggatgacggccttcgggttgtaaaccgctttcaccagggacgaagggcctttcggggtttgacggtacctggagaagaagcaccggctaactacgtgccagcagccgcggtgatacgtagggtgcgagcgttgtccggatttattgggcgtaaagagctcgtaggtggttgatcgcgtcggaagtgaaaacttggggcttaaccctgggcgtgctttcgatacgggttgacttgtggaaggtaggggagaatggaattcttggtggagcggtggaatgcgcagatatcaggaggaacaccagtggcgaaggcggttctctggacctttcctgacgctgaggagcgaaagcgtggggagcaaacaggcttagataccctggtagtccacgctgtaaacggtgggtactaggtgtggggtccattccacggattccgttacgtagctattcgcttaagataccccgcctggggagtacggccgcaggctaaaactcaaaggaattgacggggccccgcacaagcggcggagcatgcggattaattcgatgcaacgcgaagaaccttacctgggtttgacatggattggtaacggtcagagatggccgccccccttgtgggccgattcacaggtggtgcatggctgtcgtcagctcgtgtcgtgagatgttgggttaagtcccgcaacgagcgcaaccctcgtccactgttgccagcaattcggttggggactcagctggagaccgccggggtcaactcggaggaaggtgggcaatgacgcacaagtcatcatgccccttatgtccagggcttcacgcatgctacaatggccggtacaaacagttgcgacactgtgaggtggagcgaatctcaaaaagccggtctcagttcggattggggtctgcaactcaaccccatgaagtcggagtcgctagtaatcgcagatcagcaacgctgcggtgaatacgttcccggggcttgtacacaccgcccgtcaagtcatgaaagtcagtaacacccttgagcgggtggccctacccttgtgggggggccgtcgaaggtggactggttc

SEQ ID NO: 1582 - DNA, 1401 bp, Proteus mirabilis
tcgagcggtaacaggagaaagcttgctttcttgctgacgagcggcggacgggtgagtaatgtatggggatctgcccgatagagggggataactactggaaacggtggctaataccgcataatgtctacggaccaaagcaggggctcttcggaccttgcactatcggatgaacccatatgggattagctagtaggtggggtaaaggctcacctaggcgacgatctctagctggtctgagaggatgatcagccacactgggactgagacacggcccagactcctacgggaggcagcagtggggaatattgcacaatgggcgcaagcctgatgcagccatgccgcgtgtatgaagaaggccttagggttgtaaagtactttcagcggggaggaaggtgataaggttaatacccttgtcaattgacgttacccgcagaagaagcaccggctaactccgtgccagcagccgcggtaatacggagggtgcaagcgttaatcggaattactgggcgtaaagcgcacgcaggcggtcaattaagtcagatgtgaaagccccgagcttaacttgggaattgcatctgaaactggttggctagagtcttgtagaggggggtagaattccatgtgtagcggtgaaatgcgtagagatgtggaggaataccggtggcgaaggcggccccctggacaaagactgacgctcaggtgcgaaagcgtggggagcaaacaggattagataccctggtagtccacgctgtaaacgatgtcgatttagaggttgtggtcttgaaccgtggcttctggagctaacgcgttaaatcgaccgcctggggagtacggccgcaaggttaaaactcaaatgaattgacgggggcccgcacaagcggtggagcatgtggtttaattcgatgcaacgcgaagaaccttacctactcttgacatccagcgaatcctttagagatagaggagtgccttcgggaacgctgagacaggtgctgcatggctgtcgtcagctcgtgttgtgaaatgttgggttaagtcccgcaacgagcgcaacccttatcctttgttgccagcacgtaatggtgggaactcaaaggagactgccggtgataaaccggaggaaggtggggatgacgtcaagtcatcatggcccttacgagtagggctacacacgtgctacaatggcagatacaaagagaagcgacctcgcgagagcaagcggaactcataaagtctgtcgtagtccggattggagtctgcaactcgactccatgaagtcggaatcgctagtaatcgtagatcagaatgctacggtgaatacgttcccgggccttgtacacaccgcccgtcacaccatgggagtgggttgcaaaagaagtaggtagcttaaccttcgggagggcg

SEQ ID NO: 1583 - DNA, 1402 bp, Proteus penneri
tcgagcggtaacagaagaaagcttgctttcttgctgacgagcggcggacgggtgagtaatgtatggggatctgcccgatagagggggataactactggaaacggtggctaataccgcatgacgtctacggaccaaagcaggggctcttcggaccttgcgctatcggatgaacccatatgggattagctagtaggtgaggtaatggctcacctaggcaacgatctctagctggtctgagaggatgatcagccacactgggactgagacacggcccagactcctacgggaggcagcagtggggaatattgcacaatgggcgcaagcctgatgcagccatgccgcgtgtatgaagaaggccttagggttgtaaagtactttcagcggggaggaaggtgataaagttaatacctttgtcaattgacgttacccgcagaagaagcaccggctaactccgtgccagcagccgcggtaatacggagggtgcaagcgttaatcggaattactgggcgtaaagcgcacgcaggcggtcaattaagtcagatgtgaaagccccgagcttaacttgggaattgcatctgaaactggttggctagagtcttgtagaggggggtagaattccacgtgtagcggtgaaatgcgtagagatgtggaggaataccggtggcgaaggcggccccctggacaaagactgacgctcaggtgcgaaagcgtggggagcaaacaggattagataccctggtagtccacgctgtaaacgatgtcgatttagaggttgtggtcttgaaccgtggcttctggagctaacgcgttaaatcgaccgcctggggagtacggccgcaaggttaaaactcaaatgaattgacgggggcccgcacaagcggtggagcatgtggtttaattcgatgcaacgcgaagaagcttacctactcttgacttccagcgaatcctttagagatagaggagtgccttcgggaacgctgagacaggtgctgcatggctgtcgtcagctcgtgttgtgaaatgttgggttaagtcccgcaacgagcgcaacccttatcctttgttgccagcgcgtaatggcgggaactcaaaggagactgccggtgataaaccggaggaaggtggggatgacgtcaagtcatcatggcccttacgagtagggctacacacgtgctacaatggcagatacaaagagaagcgacctcgcgagagcaagcggaactcataaagtctgtcgtagtccggattggagtctgcaactcgactccatgaagtcggaatcgctagtaatcgtagatcagaatgctacggtgaatacgttcccgggccttgtacacaccgcccgtcacaccatgggagtgggttgcaaaagaagtaggtagcttaaccttcgggagggcgc

SEQ ID NO: 1584 - DNA, 1374 bp, Proteus sp.
  HS7514
gagcggcggacgggtgagtaatgtatggggatctgcccgatagagggggataactactggaaacggtggctaataccgcataatgtctacggaccaaagcaggggctcttcggaccttgcactatcggatgaacccatatgggattagctagtaggtggggtaaaggctcacctaggcgacgatctctagctggtctgagaggatgatcagccacactgggactgagacacggcccagactcctacgggaggcagcagtggggaatattgcacaatgggcgcaagcctgatgcagccatgccgcgtgtatgaagaaggccttagggttgtaaagtactttcagcggggaggaaggtgataaggttaatacccttgtcaattgacgttacccgcagaagaagcaccggctaactccgtgccagcagccgcggtaatacggagggtgcaagcgttaatcggaattactgggcgtaaagcgcacgcaggcggtcaattaagtcagatgtgaaagccccgagcttaacttgggaattgcatctgaaactggttggctagagtcttgtagaggggggtagaattccatgtgtagcggtgaaatgcgtagagatgtggaggaataccggtggcgaaggcggccccctggacaaagactgacgctcaggtgcgaaagcgtggggagcaaacaggattagataccctggtagtccacgctgtaaacgatgtcgatttagaggttgtggtcttgaaccgtggcttctggagctaacgcgttaaatcgaccgcctggggagtacggccgcaaggttaaaactcaaatgaattgacgggggcccgcacaagcggtggagcatgtggtttaattcgatgcaacgcgaagaaccttacctactcttgacatccagcgaatcctttagagatagaggagtgccttcgggaacgctgagacaggtgctgcatggctgtcgtcagctcgtgttgtgaaatgttgggttaagtcccgcaacgagcgcaacccttatcctttgttgccagcacgtcatggtgggaactcaaaggagactgccggtgataaaccggaggaaggtggggatgacgtcaagtcatcatggcccttacgagtagggctacacacgtgctacaatggcagatacaaagagaagcgacctcgcgagagcaagcggaactcataaagtctgtcgtagtccggattggagtctgcaactcgactccatgaagtcggaatcgctagtaatcgtagatcagaatgctacggtgaatacgttcccgggccttgtacacaccgcccgtcacaccatgggagtgggttgcaaaagaagtaggtagcttaaccttcgggagggcgcttaccacttt

SEQ ID NO: 1585 - DNA, 1495 bp, Proteus vulgaris
gattgaacgctggcggcaggcctaacacatgcaagtcgagcggtaacagaggaaagcttgctttcttgctgacgagcggcggacgggtgagtaatgtatggggatctgcccgatagagggggataactactggaaacggtagctaataccgcatgacgtctacggaccaaagcaggggctcttcggaccttgcgctatcggatgaacccatatgggattagctagtaggtgaggtaatggctcacctaggcgacgatctctagctggtctgagaggatgatcagccacactgggactgagacacggcccagactcctacgggaggcagcagtggggaatattgcacaatgggcgcaagcctgatgcagccatgccgcgtgtatgaagaaggccttagggttgtaaagtactttcagcggggaggaaggtgttaagattaatactcttagcaattgacgttacccgcagaagaagcaccggctaactccgtgccagcagccgcggtaatacggagggtgcaagcgttaatcggaattactgggcgtaaagcgcacgcaggcggtcaattaagtcagatgtgaaagccccgagcttaacttgggaattgcatctgaaactggttggctagagtcttgtagaggggggtagaattccacgtgtagcggtgaaatgcgtagagatgtggaggaataccggtggcgaaggcggccccctggacaaagactgacgctcaggtgcgaaagcgtggggagcaaacaggattagataccctggtagtccacgctgtaaacgatgtcgatttggaggttgtgcccttgaggcgtggcttccggagctaacgcgttaaatcgaccgcctggggagtacggccgcaaggttaaaactcaaatgaattgacgggggcccgcacaagcggtggagcatgtggtttaattcgatgcaacgcgaagaaccttacctactcttgacatccagagaatcctttagagatagaggagtgccttcgggaactctgagacaggtgctgcatggctgtcgtcagctcgtgttgtgaaatgttgggttaagtcccgcaacgagcgcaacccttatcctttgttgccagcacgtaatggtgggaactcaaaggagactgccggtgataaaccggaggaaggtggggatgacgtcaagtcatcatggcccttacgagtagggctacacacgtgctacaatggcagatacaaagagaagcgacctcgcgagagcaagcggaactcataaagtctgtcgtagtccggattggagtctgcaactcgactccatgaagtcggaatcgctagtaatcgtagatcagaatgctacggtgaatacgttcccgggccttgtacacaccgcccgtcacaccatgggagtgggttgcaaaagaagtaggtagcttaaccttcgggagggcgcttaccactttgtgattcatgactggggtgaagtcctaacaaggtaaccgtaggggaac

SEQ ID NO: 1586 - DNA, 1397 bp, Providencia alcalifaciens
gtcgagcggtaacaggggaagcttgcttctcgctgacgagcggcggacgggtgagtaatgtatggggatctgcccgatagagggggataactactggaaacggtagctaataccgcataatctcttaggagcaaagcaggggaacttcggtccttgcgctatcggatgaacccatatgggattagctagttggtgaggtaatggctcaccaaggcgacgatccctagctggtctgagaggatgatcagccacactgggactgagacacggcccagactcctacgggaggcagcagtggggaatattgcacaatgggcgcaagcctgatgcagccatgccgcgtgtatgaagaaggccttagggttgtaaagtactttcagttgggaggaaggcgttgatgctaatatcatcaacgattgacgttaccaacagaagaagcaccggctaactccgtgccagcagccgcggtaatacggagggtgcaagcgttaatcggaattactgggcgtaaagcgcacgcaggcggttgattaagttagatgtgaaatccccgggcttaacctgggaatggcatctaagactgtcagctagagtcttgtagaggggggtagaattccatgtgtagcggtgaaatgcgtagagatgtggaggaataccggtggcgaaggcggccccctggacaaagactgacgctcaggtgcgaaagcgtggggagcaaacaggattagataccctggtagtccacgctgtaaacgatgtcgatttggaggttgttcccttgaggagtggcttccggagctaacgcgttaaatcgaccgcctggggagtacggccgcaaggttaaaactcaaatgaattgacgggggcccgcacaagcggtggagcatgtggtttaattcgatgcaacgcgaagaaccttacctactcttgacatccagagaatttagcagagatgctttagtgccttcgggaactctgagacaggtgctgcatggctgtcgtcagctcgtgttgtgaaatgttgggttaagtcccgcaacgagcgcaacccttatcctttgttgccagcgattcggtcgggaactcaaaggagactgccggtgataaaccggaggaaggtggggatgacgtcaagtcatcatggcccttacgagtagggctacacacgtgctacaatggcgtatacaaagagaagcgacctcgcgagagcaagcggaactcataaagtacgtcgtagtccggattggagtctgcaactcgactccatgaagtcggaatcgctagtaatcgtagatcagaatgctacggtgaatacgttcccgggccttgtacacaccgcccgtcacaccatgggagtgggttgcaaaagaagtaggtagcttaaccttcgggagggc

SEQ ID NO: 1587 - DNA, 1391 bp, Providencia rettgeri
  modified_base (939)..(939): a, c, t, g, unknown or other
  modified_base (956)..(956): a, c, t, g, unknown or other
  modified_base (1113)..(1113): a, c, t, g, unknown or other
  modified_base (1380)..(1380): a, c, t, g, unknown or other
gcggtaacaggggaagcttgcttctcgctgacgagcggcggacgggtgagtaatgtatggggatctgcccgatagagggggataactactggaaacggtagctaataccgcataatctctcaggagcaaagcaggggaacttcggtccttgcgctatcggatgaacccatatgggattagctagtaggtgaggtaatggctcacctaggcgacgatccctagctggtctgagaggatgatcagccacactgggactgagacacggcccagactcctacgggaggcagcagtggggaatattgcacaatgggcgcaagcctgatgcagccatgccgcgtgtatgaagaaggccctagggttgtaaagtactttcagtcgggaggaaggcgttgatgctaatatcatcaacgattgacgttaccgacagaagaagcaccggctaactccgtgccagcagccgcggtaatacggagggtgcaagcgttaatcggaattactgggcgtaaagcgcacgcaggcggttgattaagttagatgtgaaatccccgggcttaacctgggaatggcatctaagactggtcagctagagtcttgtagaggggggtagaattccatgtgtagcggtgaaatgcgtagagatgtggaggaataccggtggcgaaggcggccccctggacaaagactgacgctcaggtgcgaaagcgtggggagcaaacaggattagataccctggtagtccacgctgtaaacgatgtcgatttgaaggttgttcccttgaggagtggctttcggagctaacgcgttaaatcgaccgcctggggagtacggccgcaaggttaaaactcaaatgaattgacgggggcccgcacaagcggtggagcatgtggtttaattcgatgcaacgcgaagaaccttacctactcttgacatccagagaanttagcagagatgctttngtgccttcgggaactctgagacaggtgctgcatggctgtcgtcagctcgtgttgtgaaatgttgggttaagtcccgcaacgagcgcaacccttatcctttgttgccagcgattcggtcgggaactcaaaggagactgccggtgataaaccggagganggtggggatgacgtcaagtcatcatggcccttacgagtagggctacacacgtgctacaatggcgtatacaaagagaagcgacctcgcgagagcaagcggaactcataaagtrcgtcgtagtccggattggagtctgcaactcgactccatgaagtcggaatcgctagtaatcgtagatcagaatgctacggtgaatacgttcccgggccttgtacacaccgcccgtcacaccatgggagtgggttgcaaaagaagtaggtagcttanccttcgggagg

SEQ ID NO: 1588 - DNA, 1516 bp, Providencia rustigianii
ttgatcctggctcagattgaacgctggcggcaggcctaacacatgcaagtcgagcggtaacaggggaagcttgcttctcgctgacgagcggcggacgggtgagtaatgtatggggatctgcccgatagagggggataactactggaaacggtagctaataccgcataatctctttggagcaaagcaggggaacttcggtccttgcgctatcggatgaacccatatgggattagctagttggtggggtaatggctcaccaaggcgacgatccctagctggtctgagaggatgatcagccacactgggactgagacacggcccagactcctacgggaggcagcagtggggaatattgcacaatgggcgcaagcctgatgcagccatgccgcgtgtatgaagaaggccttagggttgtaaagtactttcagttgggaggaaggcgttgatgctaatatcatcaacgattgacgttaccaacagaagaagcaccggctaactccgtgccagcagccgcggtaatacggagggtgcaagcgttaatcggaattactgggcgtaaagcgcacgcaggcggttgattaagttagatgtgaaatccccgggcttaacctgggaatggcatctaagactggtcagctagagtcttgtagaggggggtagaattccatgtgtagcggtgaaatgcgtagagatgtggaggaataccggtggcgaaggcggccccctggacaaagactgacgctcaggtgcgaaagcgtggggagcaaacaggattagataccctggtagtccacgctgtaaacgatgtcgatttggaggttgttcccttgaggagtggcttccggagctaacgcgttaaatcgaccgcctggggagtacggccgcaaggttaaaactcaaatgaattgacgggggcccgcacaagcggtggagcatgtggtttaattcgatgcaacgcgaagaaccttacctactcttgacatccagagaatttagcagagatgctttagtgccttcgggaactctgagacaggtgctgcatggctgtcgtcagctcgtgttgtgaaatgttgggttaagtcccgcaacgagcgcaacccttatcctttgttgccagcacgtcatggtgggaactcaaaggagactgccggtgataaaccggaggaaggtggggatgacgtcaagtcatcatggcccttacgagtagggctacacacgtgctacaatggcgtatacaaagagaagcgacctcgcgagagcaagcggaactcataaagtacgtcgtagtccggattggagtctgcaactcgactccatgaagtcggaatcgctagtaatcgtagatcagaatgctacggtgaatacgttcccgggccttgtacacaccgcccgtcacaccatgggagtgggttgcaaaagaagtaggtagcttaaccttcgggagggcgcttaccactttgtgattcatgactggggtgaagtcgtaacaaggtaaccgtaggggaacctgcggctg

SEQ ID NO: 1589 - DNA, 1494 bp, Providencia stuartii
tgatcctggctcagattgaacgctggcggcaggcctaacacatgcaagtcgagcggtaacaggggaagcttgcttctcgctgacgagcggcggacgggtgagtaatgtatggggatctgcccgatagagggggataactactggaaacggtggctaataccgcataatctcttaggagcaaagcaggggaccttagggccttgcgctgtcggatgaacccatatgggattagctagtaggtaaggtaatggcttacctaggcgacgatccctagctggtctgagaggatgatcagccacactgggactgagacacggcccagactcctacgggaggcagcagtggggaatattgcacaatgggcgcaagcctgatgcagccatgccgcgtgtatgaagaaggccctagggttgtaaagtactttcagtcgggaggaaggcgttgatgttaataccatcaacgattgacgttaccgacagaagaagcaccggctaactccgtgccagcagccgcggtaatacggagggtgcaagcgttaatcggaattactgggcgtaaagcgcacgcaggcggttaattaagttagatgtgaaatccccgggcttaacctgggaatggcatctaagactggttagctagagtcttgtagaggggggtagaattccatgtgtagcggtgaaatgcgtagagatgtggaggaataccggtggcgaaggcggccccctggacaaagacttacgctcaggtgcgaaagcgtggggagcaaacaggattagataccctggtagtccacgctgtaaacgatgtcgatttggaggttgttccctagaggagtggcttccggagctaacgcgttaaatcgaccgcctggggagtacggccgcaaggttaaaactcaaatgaattgacgggggcccgcacaagcggtggagcatgtggtttaattcgatgcaacgcgaagaaccttacctactcttgacatccagagaatttagcagagatgctttagtgccttcgggagctctgagacaggtgctgcatggctgtcgtcaactcgtgttgtgaaatgttgggttaagtcccgcaacgagcgcaacccttatcctttgttgccagcgattcggtcgggaactcaaaggagactgccggtgataaaccggaggaaggtggggatgacgtcaagtcatcatggcccttacgagtagggctacacacgtgctacaatggcgtatacaaagagaagcgacctcgcgagagcaagcggaactcataaagtacgtcgtagtccggattggagtctgcaactcgactccatgaagtcggaatcgctagtaatcgtagatcagaatgctacggtgaatacgttcccgggccttgtacacaccgcccgtcacaccatgggagtgggttgcaaaagaagtaggtagcttaaccttcgggagggcgcttaccactttgtgatccatgactggggtgaagtcgtaacaaggtagc

SEQ ID NO: 1590 - DNA, 1445 bp, Pseudoclavibacter sp.
  Timone
gacgaacgctggcggcgtgcttaacacatgcaagtcgaacgatgaagccttagcttgctttggtggattagtggcgaacgggtgagtaacacgtgagcaacgtgcccaggactctggaataaccgcgggaaaccgtggctaataccggataggtgccgaggccgcatggtcttcggttggaaagtttttgcggttctggatcggctcacggcctatcagcttgttggtggggtaatggcctaccaaggcgacgacgggtagccggcctgagagggtgaccggccacactgggactgagacacggcccagactcctacgggaggcagcagtggggaatattgcacaatgggcgcaagcctgatgcagcaacgccgcgtgggggatgacggccttcgggttgtaaacctcttttagtagggaagaagcgcaagtgacggtacctgcagaaaaagcaccggctaactacgtgccagcagccgcggtaatacgtagggtgcaagcgttgtccggatttattgggcgtaaagagctcgtaggcggtttgtcgcgtctgctgtgaaagcccgaggctcaacctcgggtctgcagtgggtacgggcaggctagagtgcggtaggggagattggaattcctggtgtagcggtggaatgcgcagatatcaggaggaacaccgatggcgaaggcagatctctgggccgttactgacgctgaggagcgaaagcatggggagcgaacaggattagataccctggtagtccatgccgtaaacgttgggcgctagatgtggggacctttccacggtttctgtgtcgtagctaacgcattaagcgccccgcctggggagtacggccgcaaggctaaaactcaaaggaattgacgggggcccgcacaagcggcggagcatgcggattaattcgatgcaacgcgaagaaccttaccaaggcttgacatatatcggaatcggctagagatagtcgcgccctttgggtcggtatacaggtggtgcatggttgtcgtcagctcgtgtcgtgagatgttcggttaagtccggcaacgagcgcaacccttgtcctatgttrccagcacgttatggtgggaactcatgggatactgccgtggtcaacacggaggaaggtggggatgacgtcaaatcatcatgccccttatgtcttgggcttcacgcatgctacaatggccggtacaatgggctgcgataccgcgaggtggagcgaatcccaaaaagccggtctcagttcggattggggtctgcaactcgaccccatgaagtcggagtcgctagtaatcgcagatcagcattgctgcggtgaatacgttcccgggccttgtacacaccgcccgtcaagtcatgaaagtcggtaacacccgaagccggtggcctaaccttttggggggagctgtcgaaggtgggatcggtgattaggact

SEQ ID NO: 1591 - DNA, 1385 bp, Pseudoflavonifractor capillosus
tcgaacggagtgctcatgacggagttttcggacaacggattgggttacttagtggcggacgggtgagtaacgcgtgaggaacctgcctcggagtggggaataacacaccgaaaggtgtgctaataccgcataatgcagttgggtcgcatgactctgactgccaaagatttatcgctctgagatggcctcgcgtctgattagctagttggcggggtaacggcccaccaaggcgacgatcagtagccggactgagaggttgaccggccacattgggactgagacacggcccagactcctacgggaggcagcagtggggaatattgggcaatgggcgcaagcctgacccagcaacgccgcgtgaaggaagaaggctttcgggttgtaaacttcttttgtcagggacgaaacaaatgacggtacctgacgaataagccacggctaactacgtgccagcagccgcggtaatacgtaggtggcaagcgttatccggatttactgggtgtaaagggcgtgtaggcgggactgcaagtcaggtgtgaaaaccaggggctcaacctctggcctgcatttgaaactgtagttcttgagtgctggagaggcaatcggaattccgtgtgtagcggtgaaatgcgtagatatacggaggaacaccagtggcgaaggcggattgctggacagtaactgacgctgaggcgcgaaagcgtggggagcaaacaggattagataccctggtagtccacgccgtaaacgatggatactaggtgtggggggactgaccccctccgtgccgcagttaacacaataagtatcccacctggggagtacgatcgcaaggttgaaactcaaaggaattgacgggggcccgcacaagcggtggagtatgtggtttaattcgaagcaacgcgaagaaccttaccagggcttgacatcctactaacgaagcagagatgcattaggtgcccttcggggaaagtagagacaggtggagcatgggagtcgtcagctcgtgtcgtgagatgttgggttaagtcccgcaacgagcgcaacccctattgttagttgctacgcaagagcactctagcgagactgccgttgacaaaacggaggaaggtggggacgacgtcaaatcatcatgccccttatgtcctgggccacacacgtactacaatggtggttaacagagggaagcaataccgcgaggtggagcaaatccctaaaagccatcccagttcggattgcaggctgaaacccgcctgtatgaagttggaatcgctagtaatcgcggatcagcatgccgcggtgaatacgttcccgggccttgtacacaccgcccgtcacaccatgagagtcgggaacacccgaagtccgtagcctaaccgcaagga

SEQ ID NO: 1592 - DNA, 1382 bp, Pseudomonas aeruginosa
tcgagcggatgaagggagcttgctcctggattcagcggcggacgggtgagtaatgcctgggaatctgcctggtagtgggggataacgtccggaaacgggcgctaataccgcatacgtcctgagggagaaagtgggggatcttcggacctcacgctatcagatgagcctaggtcggattagctagttggtggggtaaaggcctaccaaggcgacgatccgtaactggtctgagaggatgatcagtcacactggaactgagacacggtccagactcctacgggaggcagcagtggggaatattggacaatgggcgaaagcctgatccagccatgccgcgtgtgtgaagaaggtcttcggattgtaaagcactttaagttgggaggaagggcagtagttaataccttgctgttttgacgttaccaacagaataagcaccggctaacttcgtgccagcagccgcggtaatacgaagggtgcaagcgttaatcggaattactgggcgtaaagcgcgcgtaggtggttcagcaagttggatgtgaaatccccgggctcaacctgggaactgcatccaaaactactgagctagagtacggtagagggtggtggaatttcctgtgtagcggtgaaatgcgtagatataggaaggaacaccagtggcgaaggcgaccacctggactgatactgacactgaggtgcgaaagcgtggggagcaaacaggattagataccctggtagtccacgccgtaaacgatgtcgactagccgttgggatccttgagatcttagtggcgcagctaacgcgataagtcgaccgcctggggagtacggccgcaaggttaaaactcaaatgaattgacgggggcccgcacaagcggtggagcatgtggtttaattcgaagcaacgcgaagaaccttacctggccttgacatgctgagaactttccagagatggattggtgccttcgggaactcagacacaggtgctgcatggctgtcgtcagctcgtgtcgtgagatgttgggttaagtcccgtaacgagcgcaacccttgtccttagttaccagcacctcgggtgggcactctaaggagactgccggtgacaaaccggaggaaggtggggatgacgtcaagtcatcatggcccttacggccagggctacacacgtgctacaatggtcggtacaaagggttgccaagccgcgaggtggagctaatcccataaaaccgatcgtagtccggatcgcagtctgcaactcgactgcgtgaagtcggaatcgctagtaatcgtgaatcagaatgtcacggtgaatacgttcccgggccttgtacacaccgcccgtcacaccatgggagtgggttgctccagaagtagctagtctaaccg

SEQ ID NO: 1593 - DNA, 851 bp, Pseudomonas fluorescens
  modified_base (25)..(31): a, c, t, g, unknown or other
  modified_base (557)..(557): a, c, t, g, unknown or other
  modified_base (669)..(669): a, c, t, g, unknown or other
  modified_base (783)..(784): a, c, t, g, unknown or other
  modified_base (810)..(810): a, c, t, g, unknown or other
  modified_base (814)..(814): a, c, t, g, unknown or other
  modified_base (830)..(830): a, c, t, g, unknown or other
  modified_base (841)..(841): a, c, t, g, unknown or other
tctcttgagagcggcggacgggtgnnnnnnncctaggaatctgcctggtagtgggggataacgctcggaaacggacgctaataccgcatacgtcctacgggagaaagcaggggaccttcgggccttgcgctatcagatgagcctaggtcggattagctagttggtgaggtaatggctcaccaaggcgacgatccgtaactggtctgagaggatgatcagtcacactggaactgagacacggtccagactcctacgggaggcagcagtggggaatattggacaatgggcgaaagcctgatccagccatgccgcgtgtgtgaagaaggtcttcggattgtaaagcactttaagttgggaggaagggcattaacctaatacgttagtgttttgacgttaccgacagaataagcaccggctaactctgtgccagcagccgcggtaatacagagggtgcaagcgttaatcggaattactgggcgtaaagcgcgcgtaggtggttcgttaagttggatgtgaaatccccgggctcaacctgggaactgcattcaaaactgtcnagctagagtatggtagagggtggtggaatttcctgtgtagcggtgaaatgcgtagatataggaaggaacaccagtggcgaaggcgaccacctggactgatactgacactgangtgcgaaaagcgtggggagcaaacaggattagataccctggtagtccacgccgtaaacgatgtcaactagccgttgggagccttgagctcttagtggcgcagctaacgcattannttgaccgcctggggagtacggccgcnaggntaaaactcaaatgaanttgacgggggnccgcacaagc

SEQ ID NO: 1594 - DNA, 1466 bp, Pseudomonas gessardii
agattgaacgctggcggcaggcctaacacatgcaagtcgagcggtagagagaagctttgcttctcttgagagcggcggacgggtgagtaatgcctaggaatctgcctggtagtgggggataacgttcggaaacggacgctaataccgcatacgtcctacgggagaaagcaggggaccttcgggccttgcgctatcagatgagcctaggtcggattagctagttggtggggtaatggctcaccaaggcgacgatccgtaactggtctgagaggatgatcagtcacactggaactgagacacggtccagactcctacgggaggcagcagtggggaatattggacaatgggcgaaagcctgatccagccatgccgcgtgtgtgaagaaggtcttcggattgtaaagcactttaagttgggaggaagggttgtagattaatactctgcaattttgacgttaccgacagaataagcaccggctaactctgtgccagcagccgcggtaatacagagggtgcaagcgttaatcggaattactgggcgtaaagcgcgcgtaggtggttagttaagttggatgtgaaatccccgggctcaacctgggaactgcattcaaaactgactgactagagtatggtagaggggggtggaatttcctgtgtagcggtgaaatgcgtagatataggaaggaacaccagtggcgaaggcgaccacctggactgatactgacactgaggtgcgaaagcgtggggagcaaacaggattagataccctggtagtccacgccgtaaacgatgtcaactagccgttgggagccttgagctcttagtggcgcagctaacgcattaagttgaccgcctggggagtacggccgcaaggttaaaactcaaatgaattgacgggggcccgcacaagcggtggagcatgtggtttaattcgaagcaacgcgaagaaccttaccaggccttgacatccaatgaactttctagagatagattggtgccttcgggaacattgagacaggtgctgcatggctgtcgtcagctcgtgtcgtgagatgttgggttaagtcccgtaacgagcgcaacccttgtccttagttaccagcacgttatggtgggcactctaaggagactgccggtgacaaaccggaggaaggtggggatgacgtcaagtcatcatggcccttacggcctgggctacacacgtgctacaatggtcggtacagagggttgccaagccgcgaggtggagctaatcccagaaaaccgatcgtagtccggatcgcagtctgcaactcgactgcgtgaagtcggaatcgctagtaatcgcgaatcagaatgtcgcggtgaatacgttcccgggccttgtacacaccgcccgtcacaccatgggagtgggttgcaccagaagtagctagtctaaccttcggcaggacggttaccacggtgtgattcatgactggggtgaagt

SEQ ID NO: 1595 - DNA, 1537 bp, Pseudomonas mendocina
tgaactgaagagtttgatcatggctcagattgaacgctggcggcaggcctaacacatgcaagtcgagcggatgaggggagcttgctccctgatttagcggcggacgggtgagtaatgtctaggaatctgcctggtagtgggggataacgttccgaaaggaacgctaataccgcatacgtcctacgggagaaagcaggggaccttcgggccttgcgctatcagatgagcctaggtcggattagctagttggtgaggtaatggctcaccaaggcgacgatccgtaactggtctgagaggatgatcagtcacactggaactgagacacggtccagactcctacgggaggcagcagtggggaatattggacaatgggcgaaagcctgatccagccatgccgcgtgtgtgaagaaggtcttcggattgtaaagcactttaagttgggaggaagggcattaacctaatacgttagtgttttgacgttaccaacagaataagcaccggctaacttcgtgccagcagccgcggtaatacgaagggtgcaagcgttaatcggaattactgggcgtaaagcgcgcgtaggtggttcgttaagttggatgtgaaagccccgggctcaacctgggaactgcatccaaaactggcgagctagagtacggtagagggtggtggaatttcctgtgtagcggtgaaatgcgtagatataggaaggaacaccagtggcgaaggcgaccacctggactgatactgacactgaggtgcgaaagcgtggggagcaaacaggattagataccctggtagtccacgccgtaaacgatgtcaactagccgttggaatccttgagattttagtggcgcagctaacgcattaagttgaccgcctggggagtacggccgcaaggttaaaactcaaatgaattgacgggggcccgcacaagcggtggagcatgtggtttaattcgaagcaacgcgaagaaccttacctggccttgacatgctgagaactttccagagatggattggtgccttcgggaactcagacacaggtgctgcatggctgtcgtcagctcgtgtcgtgagatgttgggttaagtcccgtaacgagcgcaacccttgtccttagttaccagcacctcgggtgggcactctaaggagactgccggtgacaaaccggaggaaggtggggatgacgtcaagtcatcatggcccttacggccagggctacacacgtgctacaatggtcggtacaaagggttgccaagccgcgaggtggagctaatcccataaaaccgatcgtagtccggatcgcagtctgcaactcgactgcgtgaagtcggaatcgctagtaatcgtgaatcagaatgtcacggtgaatacgttcccgggccttgtacacaccgcccgtcacaccatgggagtgggttgctccagaagtagctagtctaaccttcggggggacggttaccacggagtgattcatgactggggtgaagtcgtaacaaggtagccgtaggggaacctgcggctggatcacctcctta

SEQ ID NO: 1596 - DNA, 1517 bp, Pseudomonas monteilii
atcctggctcagattgaacgctgcggcaggcctaacacatgcaagtcgagcggatgacgggagcttgctccttgattcagcggcggacgggtgagtaatgcctaggaatctgcctggtagtgggggacaacgtttcgaaaggaacgctaataccgcatacgtcctacgggagaaagcaggggaccttcgggccttgcgctatcagatgagcctaggtcggattagctagttggtggggtaatggctcaccaaggcgacgatccgtaactggtctgagaggatgatcagtcacactggaactgagacacggtccagactcctacgggaggcagcagtggggaatattggacaatgggcgaaagcctgatccagccatgccgcgtgtgtgaagaaggtcttcggattgtaaagcactttaagttgggaggaagggcagtaagttaataccttgctgttttgacgttaccgacagaataagcaccggctaactctgtgccagcagccgcggtaatacagagggtgcaagcgttaatcggaattactgggcgtaaagcgcgcgtaggtggttcgttaagttggatgtgaaagccccgggctcaacctgggaactgcatccaaaactggcgagctagagtacggtagagggtggtggaatttcctgtgtagcggtgaaatgcgtagatataggaaggaacaccagtggcgaaggcgaccacctggactgatactgacactgaggtgcgaaagcgtggggagcaaacaggattagataccctggtagtccacgccgtaaacgatgtcaactagccgttggaatccttgagattttagtggcgcagctaacgcattaagttgaccgcctggggagtacggccgcaaggttaaaactcaaatgaattgacgggggcccgcacaagcggtggagcatgtggtttaattcgaagcaacgcgaagaaccttaccaggccttgacatgcagagaactttccagagatggattggtgccttcgggaactctgacacaggtgctgcatggctgtcgtcagctcgtgtcgtgagatgttgggttaagtcccgtaacgagcgcaacccttgtccttagttaccagcacgtaatggtgggcactctaaggagactgccggtgacaaaccggaggaaggtggggatgacgtcaagtcatcatggcccttacggcctgggctacacacgtgctacaatggtcggtacagagggttgccaagccgcgaggtggagctaatctcacaaaaccgatcgtagtccggatcgcagtctgcaactcgactgcgtgaagtcggaatcgctagtaatcgcgaatcagaatgtcgcggtgaatacgttcccgggccttgtacacaccgcccgtcacaccatgggagtgggttgcaccagaagtagctagtctaaccttcgggaggacggttaccacggtgtgattcatgactggggtgaagtcgtaacaaggtagccgtaggggaacctgcggctggatcacctc

SEQ ID NO: 1597 - DNA, 1348 bp, Pseudomonas poae
cttgagagcggcggacgggtgagtaatgcctaggaatctgcctggtagtgggggataacgttcggaaacggacgctaataccgcatacgtcctacgggagaaagcaggggaccttcgggccttgcgctatcagatgagcctaggtcggattagctagttggtgaggtaatggctcaccaaggcgacgatccgtaactggtctgagaggatgatcagtcacactggaactgagacacggtccagactcctacgggaggcagcagtggggaatattggacaatgggcgaaagcctgatccagccatgccgcgtgtgtgaagaaggtcttcggattgtaaagcactttaagttgggaggaagggcattaacctaatacgttagtgttttgacgttaccgacagaataagcaccggctaactctgtgccagcagccgcggtaatacagagggtgcaagcgttaatcggaattactgggcgtaaagcgcgcgtaggtggtttgttaagttggatgtgaaatccccgggctcaacctgggaactgcattcaaaactgactgactagagtatggtagagggtggtggaatttcctgtgtagcggtgaaatgcgtagatataggaaggaacaccagtggcgaaggcgaccacctggactaatactgacactgaggtgcgaaagcgtggggagcaaacaggattagataccctggtagtccacgccgtaaacgatgtcaactagccgttggaagccttgagcttttagtggcgcagctaacgcattaagttgaccgcctggggagtacggccgcaaggttaaaactcaaatgaattgacgggggcccgcacaagcggtggagcatgtggtttaattcgaagcaacgcgaagaaccttaccaggccttgacatccaatgaactttctagagatagattggtgccttcgggaacattgagacaggtgctgcatggctgtcgtcagctcgtgtcgtgagatgttgggttaagtcccgtaacgagcgcaacccttgtccttagttaccagcacgtaatggtgggcactctaaggagactgccggtgacaaaccggaggaaggtggggatgacgtcaagtcatcatggcccttacggcctgggctacacacgtgctacaatggtcggtacagagggttgccaagccgcgaggtggagctaatcccacaaaaccgatcgtagtccggatcgcagtctgcaactcgactgcgtgaagtcggaatcgctagtaatcgcgaatcagaatgtcgcggtgaatacgttcccgggccttgtacacaccgcccgtcacaccatgggagtgggttgcaccagaagtagcta

SEQ ID NO: 1598 - DNA, 1492 bp, Pseudomonas pseudoalcaligenes
attgaacgctggcggcaggcctaacacatgcaagtcgagcggatgaagggagcttgctccctgatttagcggcggacgggtgagtaatgcctaggaatctgcctggtagtgggggataacgttccgaaaggaacgctaataccgcatacgtcctacgggagaaagcaggggaccttcgggccttgcgctatcagatgagcctaggtcggattagctagttggtgaggtaatggctcaccaaggcgacgatccgtaactggtctgagaggatgatcagtcacactggaactgagacacggtccagactcctacgggaggcagcagtggggaatattggacaatgggcgaaagcctgatccagccatgccgcgtgtgtgaagaaggtcttcggattgtaaagcactttaagttgggaggaagggcagtaagctaataccttgctgttttgacgttaccgacagaataagcaccggctaacttcgtgccagcagccgcggtaatacgaagggtgcaagcgttaatcggaattactgggcgtaaagcgcgcgtaggtggttcgttaagttggatgtgaaagccccgggctcaacctgggaactgcatccaaaactggcgagctagagtacggtagagggtggtggaatttcctgtgtagcggtgaaatgcgtagatataggaaggaacaccagtggcgaaggcgaccacctggactgatactgacactgaggtgcgaaagcgtggggagcaaacaggattagataccctggtagtccacgccgtaaacgatgtcaactagccgttgggttccttgagaacttagtggcgcagctaacgcattaagttgaccgcctggggagtacggccgcaaggttaaaactcaaatgaattgacgggggcccgcacaagcggtggagcatgtggtttaattcgaagcaacgcgaagaaccttacctggccttgacatgctgagaactttccagagatggattggtgccttcgggaactcagacacaggtgctgcatggctgtcgtcagctcgtgtcgtgagatgttgggttaagtcccgtaacgagcgcaacccttgtccttagttaccagcacgtaatggtgggcactctaaggagactgccggtgacaaaccggaggaaggtggggatgacgtcaagtcatcatggcccttacggccagggctacacacgtgctacaatggtcggtacaaagggttgccaagccgcgaggtggagctaatcccataaaaccgatcgtagtccggatcgcagtctgcaactcgactgcgtgaagtcggaatcgctagtaatcgtgaatcagaatgtcacggtgaatacgttcccgggccttgtacacaccgcccgtcacaccatgggagtgggttgctccagaagtagctagtctaaccttcggggggacggttaccacggagtgattcatgactggggtgaagtcgtaacaaggtagccgtaggggaacctgc

SEQ ID NO: 1599 - DNA, 1394 bp, Pseudomonas putida
  modified_base (1384)..(1384): a, c, t, g, unknown or other
tcgagcggatgagaagagcttgctcttcgattcagcggcggacgggtgagtaatgcctaggaatctgcctggtagtgggggacaacgtttcgaaaggaacgctaataccgcatacgtcctacgggagaaagcaggggaccttcgggccttgcgctatcagatgagcctaggtcggattagctagttggtgaggtaatggctcaccaaggcgacgatccgtaactggtctgagaggatgatcagtcacactggaactgagacacggtccagactcctacgggaggcagcagtggggaatattggacaatgggcgaaagcctgatccagccatgccgcgtgtgtgaagaaggtcttcggattgtaaagcactttaagttgggaggaagggcattaacctaatacgttagtgttttgacgttaccgacagaataagcaccggctaactctgtgccagcagccgcggtaatacagagggtgcaagcgttaatcggaattactgggcgtaaagcgcgcgtaggtggtttgttaagttggatgtgaaagccccgggctcaacctgggaactgcatccaaaactggcaagctagagtacggtagagggtggtggaatttcctgtgtagcggtgaaatgcgtagatataggaaggaacaccagtggcgaaggcgaccacctggactgatactgacactgaggtgcgaaagcgtggggagcaaacaggattagataccctggtagtccacgccgtaaacgatgtcaactagccgttggaatccttgagattttagtggcgcagctaacgcattaagttgaccgcctggggagtacggccgcaaggttaaaactcaaatgaattgacgggggcccgcacaagcggtggagcatgtggtttaattcgaagcaacgcgaagaaccttaccaggccttgacatgcagagaactttccagagatggattggtgccttcgggaactctgacacaggtgctgcatggctgtcgtcagctcgtgtcgtgagatgttgggttaagtcccgtaacgagcgcaacccttgtccttagttaccagcacgttatggtgggcactctaaggagactgccggtgacaaaccggaggaaggtggggatgacgtcaagtcatcatggcccttacggcctgggctacacacgtgctacaatggtcggtacagagggttgccaagccgcgaggtggagctaatctcacaaaaccgatcgtagtccggatcgcagtctgcaactcgactgcgtgaagtcggaatcgctagtaatcgcgaatcagaatgtcgcggtgaatacgttcccgggccttgtacacaccgcccgtcacaccatgggagtgggttgcaccagaagtagctagtctaaccntcgggaggac

SEQ ID NO: 1600 - DNA, 1524 bp, Pseudomonas sp.
  2_1_26
agagtttgatcatggctcagattgaacgctggcggcaggcctaacacatgcaagtcgagcggatgaagggagcttgctcctgaattcagcggcggacgggtgagtaatgcctaggaatctgcctgatagtgggggataacgtccggaaacgggcgctaataccgcatacgtcctgagggagaaagtgggggatcttcggacctcacgctatcagatgagcctaggtcggattagctagttggtggggtaaaggcctaccaaggcgacgatccgtaactggtctgagaggatgatcagtcacactggaactgagacacggtccagactcctacgggaggcagcagtggggaatattggacaatgggcgaaagcctgatccagccatgccgcgtgtgtgaagaaggtcttcggattgtaaagcactttaagttgggaggaagggcagtaagttaataccttgctgttttgacgttaccaacagaataagcaccggctaacttcgtgccagcagccgcggtaatacgaagggtgcaagcgttaatcggaattactgggcgtaaagcgcgcgtaggtggttcagcaagttggatgtgaaatccccgggctcaacctgggaactgcatccaaaactactgagctagagtacggtagagggtggtggaatttcctgtgtagcggtgaaatgcgtagatataggaaggaacaccagtggcgaaggcgaccacctggactgatactgacactgaggtgcgaaagcgtggggagcaaacaggattagataccctggtagtccacgccgtaaacgatgtcgactagccgttgggatccttgagatcttagtggcgcagctaacgcgataagtcgaccgcctggggagtacggccgcaaggttaaaactcaaatgaattgacgggggcccgcacaagcggtggagcatgtggtttaattcgaagcaacgcgaagaaccttacctggccttgacatgctgagaactttccagagatggattggtgccttcgggaactcagacacaggtgctgcatggctgtcgtcagctcgtgtcgtgagatgttgggttaagtcccgtaacgagcgcaacccttgtccttagttaccagcacctcgggtgggcactctaaggagactgccggtgacaaaccggaggaaggtggggatgacgtcaagtcatcatggcccttacggccagggctacacacgtgctacaatggtcggtacaaagggttgccaagccgcgaggtggagctaatcccataaaaccgatcgtagtccggatcgcagtctgcaactcgactgcgtgaagtcggaatcgctagtaatcgtgaatcagaatgtcacggtgaatacgttcccgggccttgtacacaccgcccgtcacaccatgggagtgggttgctccagaagtagctagtctaaccgcaagggggacggttaccacggagtgattcatgactggggtgaagtcgtaacaaggtagccgtaggggaacctgcggctggatcacct

SEQ ID NO: 1601 - DNA, 1284 bp, Pseudomonas sp.
  G1229
cctaggaatctgcctggtagtgggggacaacgtttcgaaaggaacgctaataccgcatacgtcctacgggagaaagcaggggaccttcgggccttgcgctatcagatgagcctaggtcggattagctagttggtgaggtaatggctcaccaaggctacgatccgtaactggtctgagaggatgatcagtcacactggaactgagacacggtccagactcctacgggaggcagcagtggggaatattggacaatgggcgaaagcctgatccagccatgccgcgtgtgtgaagaaggtcttcggattgtaaagcactttaagttgggaggaagggttgtagattaatactctgcaattttgacgttaccgacagaataagcaccggctaactctgtgccagcagccgcggtaatacagagggtgcaagcgttaatcggaattactgggcgtaaagcgcgcgtaggtggttcgttaagttggatgtgaaatccccgggctcaacctgggaactgcatccaaaactggcgagctagagtatggtagagggtggtggaatttcctgtgtagcggtgaaatgcgtagatataggaaggaacaccagtggcgaaggcgaccacctggactgatactgacactgaggtgcgaaagcgtggggagcaaacaggattagataccctggtagtccacgccgtaaacgatgtcaactagccgttgggagccttgagctcttagtggcgcagctaacgcattaagttgaccgcctggggagtacggccgcaaggttaaaactcaaatgaattgacgggggcccgcacaagcggtggagcatgtggtttaattcgaagcaacgcgaagaaccttaccaggccttgacatccaatgaactttccagagatggattggtgccttcgggaacattgagacaggtgctgcatggctgtcgtcagctcgtgtcgtgagatgttgggttaagtcccgtaacgagcgcaacccttgtccttagttaccagcacgtaatggtgggcactctaaggagactgccggtgacaaaccggaggaaggtggggatgacgtcaagtcatcatggcccttacggcctgggctacacacgtgctacaatggtcggtacaaagggttgccaagccgcgaggtggagctaatcccataaaaccgatcgtagtccggatcgcagtctgcaactcgactgcgtgaagtcggaatcgctagtaatcgcgaatcagaatgtcgcggtgattacgttcccgggccttgtacacaccgcccg

SEQ ID NO: 1602 - DNA, 1402 bp, Pseudomonas sp.
  NP522b
catgcaagtcgagcggatgaagggagcttgcttctggattcagcggcggacgggtgagtaatgcctaggaatctgcctggtagtgggggacaacgttccgaaaggagcgctaataccgcatacgtcctacgggagaaagtgggggatcttcggacctcacgctatcagatgagcctaggtcggattagctagtaggtggggtaatggctcacctaggcgacgatccgtaactggtctgagaggatgatcagtcacactggaactgagacacggtccagactcctacgggaggcagcagtggggaatattggacaatgggcgaaagcctgatccagccatgccgcgtgtgtgaagaaggtcttcggattgtaaagcactttaagttgggaggaagggcagtaagttaataccttgctgttttgacgttaccaacagaataagcaccggctaacttcgtgccagcagccgcggtaatacgaagggtgcaagcgttaatcggaattactgggcgtaaagcgcgcgtaggtggtttggtaagatggatgtgaaatccccgggctcaacctgggaactgcatccataactgcctgactagagtacggtagagggtggtggaatttcctgtgtagcggtgaaatgcgtagatataggaaggaacaccagtggcgaaggcgaccacctggactgatactgacactgaggtgcgaaagcgtggggagcaaacaggattagataccctggtagtccacgccgtaaacgatgtcgactagccgttgggatccttgagatcttagtggcgcagctaacgcgataagtcgaccgcctggggagtacggccgcaaggttaaaactcaaatgaattgacgggggcccgcacaagcggtggagcatgtggtttaattcgaagcaacgcgaagaaccttacctggccttgacatgtccggaatcctgcagagatgcgggagtgccttcgggaatcggaacacaggtgctgcatggctgtcgtcagctcgtgtcgtggagatgttgggttaagtcccgtaacgagcgcaccctttgtccttagttaccagcacgttatggtgggcactctaaggagactgccggtgacaaaccggaggaaggtggggatgaggtcaagtcatcatggcccttacggccagggctacacacgtgctacaatggtcggttcagagggttgccaagccgcgaggtggagctaatcccagaaaaccgattgtagtccggatcgcagtctgcaactcgactgcggaagtcggaatcgctagtaatcgtgaatcagaatgtcacggtgaatacgttcccgggccttgtacactccgcccgtcacaccatgggagtgggttgctccagaagtagctagtctaaccgcaagggggac

SEQ ID NO: 1603 - DNA, 1363 bp, Pseudomonas stutzeri
gcttgctctctgattcagcggcggacgggtgagtaatgcctaggaatctgcctgrtagtgggggacaacgtttcgaaaggaacgctaataccgcatacgtcctacgggagaaagcaggggaccttcgggccttgcgctatcagatgagcctaggtcggattagctagttggtgaggtaacggctcaccaaggcgacgatccgtaactggtctgagaggatgatcagtcacactggaactgagacacggtccagactcctacgggaggcagcagtggggaatattggacaatgggcgaaagcctgatccagccatgccgcgtgtgtgaagaaggtcttcggattgtaaagcactttaagttgggaggaagggcattaacctaatacgttagtgttttgacgttaccgacagaataagcaccggctaacttcgtgccagcagccgcggtaatacgaagggtgcaagcgttaatcggaattactgggcgtaaagcgcgcgtaggtggtttgttaagttgaatgtgaaagccccgggctcaacctgggaactgcatccaaaactggcaagctagagtatggcagagggtggtggaatttcctgtgtagcggtgaaatgcgtagatataggaaggaacaccagtggcgaaggcgaccacctgggctaatactgacactgaggtgcgaaagcgtggggagcaaacaggattagataccctggtagtccacgccgtaaacgatgtcgactagccgttgggatccttgagatcttagtggcgcagctaacgcattaagtcgaccgcctggggagtacggccgcaaggttaaaactcaaatgaattgacgggggcccgcacaagcggtggagcatgtggtttaattcgaagcaacgcgaagaaccttaccaggccttgacatgcagagaactttccagagatggattggtgccttcgggaactctgacacaggtgctgcatggctgtcgtcagctcgtgtcgtgagatgttgggttaagtcccgtaacgagcgcaacccttgtccttagttaccagcacgttaaggtgggcactctaaggagactgccggtgacaaaccggaggaaggtggggatgacgtcaagtcatcatggcccttacggcctgggctacacacgtgctacaatggtcggtacaaagggttgccaagccgcgaggtggagctaatcccataaaaccgatcgtagtccggatcgcagtctgcaactcgactgcgtgaagtcggaatcgctagtaatcgtgaatcagaatgtcacggtgaatacgttcccgggccttgtacacaccgcccgtcacaccatgggagtgggttgctccagaagtagctagtcta

SEQ ID NO: 1604 - DNA, 1450 bp, Pseudomonas tolaasii
agagtttgatcctggctcagattgaacgctggcggcaggcctaacacatgcaagtcgagcggtagagagaagcttgcttctcttgagagcggcggacgggtgagtaatgcctaggaatctgcctggtagtgggggataacgtccggaaacggacgctaataccgcatacgtcctacgggagaaagcaggggaccttcgggccttgcgctatcagatgagcctaggtcggattagctagttggtgaggtaatggctcaccaaggcgacgatccgtaactggtctgagaggatgatcagtcacactggaactgagacacggtccagactcctacgggaggcagcagtggggaatattggacaatgggcgaaagcctgatccagccatgccgcgtgtgtgaagaaggtcttcggattgtaaagcactttaagttgggaggaagggcagttgcctaatacgtaactgttttgacgttaccgacagaataagcaccggctaactctgtgccagcagccgcggtaatacagagggtgcaagcgttaatcggaattactgggcgtaaagcgcgcgtaggtggtttgttaagttggatgtgaaatccccgggctcaacctgggaactgcattcaaaactgactgactagagtatggtagagggtggtggaatttcctgtgtagcggtgaaatgcgtagatataggaaggaacaccagtggcgaaggcgaccacctggactaatactgacactgaggtgcgaaagcgtggggagcaaacaggattagataccctggtagtccacgccgtaaacgatgtcaactagccgttggaagccttgagcttttagtggcgcagctaacgcattaagttgaccgcctggggagtacggccgcaaggttaaaactcaaatgaattgacsggggcccgcacaagcggtggagcatgtggtttaattcgaagcaacgcgaagaaccttaccaggccttgacatccaatgaactttccagagatggattggtgccttcgggaacattgagacaggtgctgcatggctgtcgtcagctcgtgtcgtgagatgttgggttaagtcccgtaacgagcgcaacccttgtccttagttaccagcacgttatggtgggcactctaaggagactgccggtgacaaaccggaggaaggtggggatgacgtcaagtcatcatggcccttacggcctgggctacacacgtgctacaatggtcggtacagagggttgccaagccgcgaggtggagctaatcccataaaaccgatcgtagtccggatcgcagtctgcaactcgactgcgtgaagtcggaatcgctagtaatcgcgaatcagaatgtcgcggtgaatacgttcccgggccttgtacaaaccgcccgtcacaccatgggagtgggttgcaccagaagtagctagtctaaccttcgggaggacgg

SEQ ID NO: 1605 - DNA, 1439 bp, Pseudomonas viridiflava
tgcgagtcgatcggtagagagaagcttgcttctcttgagagcggcggacgggtgagtaatgcctaggaatctgcctggtagtgggggataacgctcggaaacggacgctaataccgcatacgtcctacgggagaaagcaggggaccttcgggccttgcgctatcagatgagcctaggtcggattagctagttggtgaggtaatggctcaccaaggcgacgatccgtaactggtctgagaggatgatcagtcacactggaactgagacacggtccagactcctacgggaggcagcagtggggaatattggacaatgggcgaaagcctgatccagccatgccgcgtgtgtgaagaaggtcttcggattgtaaagcactttaagttgggaggaagggcagtaacctaatacgttattgttttgacgttaccgacagaataagcaccggctaactctgtgccagcagccgcggtaatacagagggtgcaagcgttaatcggaattactgggcgtaaagcgcgcgtaggtggtttgttaagttgaatgtgaaatccccgggctcaacctgggaactgcatccaaaactggcaagctagagtagggcagagggtggtggaatttcctgtgtagcggtgaaatgcgtagatataggaaggaacaccagtggcgaaggcgaccacctgggctcatactgacactgaggtgcgaaagcgtggggagcaaacaggattagataccctggtagtccacgccgtaaacgatgtcaactagccgttggaatccttgagattttagtggcgcagctaacgcattaagttgaccgcctggggagtacggccgcaaggttaaaactcaaatgaattgacgggggcccgcacaagcggtggagcatgtggtttaattcgaagcaacgcgaagaaccttaccaggccttgacatccaatgaatcctttagagatagaggagtgccttcgggagcattgagacaggtgctgcatggctgtcgtcagctcgtgtcgtgagatgttgggttaagtcccgtaacgagcgcaacccttgtccttagttaccagcacgttaaggtgggcactctaaggagactgccggtgacaaaccggaggaaggtggggatgacgtcaagtcatcatggcccttacggcctgggctacacacgtgctacaatggtcggtacagagggttgccaagccgcgaggtggagctaatctcacaaaaccgatcgtagtccggatcgcagtctgcaactcgactgcgtgaagtcggaatcgctagtaatcgcgaatcagaatgtcgcggtgaatacgttcccgggccttgtacacaccgcccgtcacaccatgggagtgggttgcaccagaagtagctagtctaaccttcgggaggacggttaccgcggtgtgattcatgactggggtgaagtcgaa

SEQ ID NO: 1606 - DNA, 1480 bp, Pseudoramibacter alactolyticus
taagtcaaaaagaacagtttgatcatggctcaggacgaacgctggcggtatgcttaacacatgcaagtcgaacgagaagttttttattgaccttcgggggatataagagacagacagtggcgaacgggtgagtaacgcgtgggcaacctacctatcggagcgggatagcctcgagaaatcgggagtaaaaccgcataacacagcagaatcgcatgactttgctgtcaaaactccggtgccgatagatgggcccgcgtctgattagctagttggtaaggtaagggcttaccaaggcaacgatcagtagccggtctgagagggcgaacggccacactggaactgagacacggtccagactcctacgggaggcagcagtggggaatattgcgcaatgggggcaaccctgacgcagcaataccgcgtgagtgaagaaggttttcggatcgtaaagctctgttattggggaagaagcagtgacggtacccaatgaggaagtcccggctaactacgtgccagcagccgcggtaatacgtaggggacgagcgttgtccggaatcactgggcgtaaagggcgcgtaggcggttttataagtcagatgtgaaaggtaccggctcaaccggtgacgtgcatttgaaactgtaagacttgagtactgaagaggcaagcggaattcctagtgtagcggtgaaatgcgtagatattaggaagaacaccggtggcgaaggcggcttgctgggcagatactgacgctgaggtgcgaaagcgtggggagcgaacaggattagataccctggtagtccacgccgtaaacgatgaatactaggtgttggcgaataagtcagtgccggagttaacacaataagtattccgcctggggagtacgaccgcaaggttgaaactcaaaggaattgacggggacccgcacaagcagcggagcatgtggtttaattcgaagcaacgcgaagaaccttaccaggccttgacatcctctgagcgcaatagagatattgctttcccttcggagacagagagacaggtggtgcatggttgtcgtcagctcgtgtcgtgagatgttgggttaagtcccgcaacgagcgcaacccctgtcattagttgccatcattgagttgggcactctaatgagactgccgtagacaatacggaggaaggtggggacgacgtcaaatcatcatgccccttatggcctgggctacacacgtgctacaatggtctgaacaaagggaagcgaaggagcgattcggagcgaatctcataaaacagatcccagttcggattgcaggctgcaactcgcctgcatgaagatggagttgctagtaatcgcggatcagaatgtcgcggtgaatgcgttcccgggtcttgtacacaccgcccgtcacaccacgagagtcggtaacacccgaagccagtgagacaaccggaaggagtcagctgtcgaaggtgggatcggtaattggggtg

SEQ ID NO: 1607 - DNA, 1610 bp, Psychrobacter arcticus
atgagccaagtttagtagcctctttaaagggttacatagcaagattaaactgaagagtttgatcatggctcagattgaacgctggcggcaggcttaacacatgcaagtcgagcggaaacgatggtagcttgctaccaggcgtcgagcggcggacgggtgagtaatacttaggaatctacctagtagtgggggatagcacggggaaactcgtattaataccgcatacgacctacgggagaaagggggcagtttactgctctcgctattagatgagcctaagtcggattagctagatggtggggtaaaggcctaccatggcgacgatctgtagctggtctgagaggatgatcagccacaccgggactgagacacggcccggactcctacgggaggcagcagtggggaatattggacaatgggggaaaccctgatccagccatgccgcgtgtgtgaagaaggccttttggttgtaaagcactttaagcagtgaagaagactccatggttaatacccatggacgatgacattagctgcagaataagcaccggctaactctgtgccagcagccgcggtaatacagagggtgcaagcgttaatcggaattactgggcgtaaagggagcgtaggtggctcgataagtcagatgtgaaatccccgggctcaacctgggaactgcatctgatactgttgagctagagtatgtgagaggaaggtagaattccaggtgtagcggtgaaatgcgtagagatctggaggaataccgatggcgaaggcagccttctggcataatactgacactgaggctcgaaagcgtgggtagcaaacaggattagataccctggtagtccacgccgtaaacgatgtctactagtcgttgggtcccttgaggacttagtgacgcagctaacgcaataagtagaccgcctggggagtacggccgcaaggttaaaactcaaatgaattgacgggggcccgcacaagcggtggagcatgtggtttaattcgatgcaacgcgaagaaccttacctggtcttgacatatctagaatcctgcagagatgcgggagtgccttcgggaattagaatacaggtgctgcatggctgtcgtcagctcgtgtcgtgagatgttgggttaagtcccgcaacgagcgcaacccttgtccttagttaccagcgggttaagccgggaactctaaggatactgccagtgacaaactggaggaaggcggggacgacgtcaagtcatcatggcccttacgaccagggctacacacgtgctacaatggtaggtacagagggcagctacacagcgatgtgatgcgaatctcaaaaagcctatcgtagtccagattggagtctgcaactcgactccatgaagtaggaatcgctagtaatcgcggatcagaatgccgcggtgaatacgttcccgggccttgtacacaccgcccgtcacaccatgggagttgattgcaccagaagtggatagcttaaccttcgggaaggcgttcaccacggtgtggttgatgactggggtgaagtcgtaacaaggtagccgtaggggaacctgcggctggatcacctccttatagatggcattcggtcagcaagaat

SEQ ID NO: 1608 - DNA, 1428 bp, Psychrobacter cibarius
aagcttgcttctcgctgacgagcggcggacgggtgagtaatacttaggaatctacctagtagtgggggatagcacggggaaactcgtattaataccgcatacgacctacgggagaaagggggcagtttactgctctcgctattagatgagcctaagtcggattagctagatggtggggtaaaggcctaccatggcgacgatctgtagctggtctgagaggatgatcagccacaccgggactgagacacggcccggactcctacgggaggcagcagtggggaatattggacaatgggggaaaccctgatccagccatgccgcgtgtgtgaagaaggccttttggttgtaaagcactttaagcagtgaagaagactccatggttaatacccatggacgatgacattagctgcagaataagcaccggctaactctgtgccagcagccgcggtaatacagagggtgcaagcgttaatcggaattactgggcgtaaagggagcgtaggtggctctataagtcagatgtgaaatccccgggcttaacctgggaactgcatctgaaactgtagagctagagtatgtgagaggaaggtagaattccaggtgtagcggtgaaatgcgtagagatctggaggaataccgatggcgaaggcagccttctggcataatactgacactgaggctcgaaagcgtgggtagcaaacaggattagataccctggtagtccacgccgtaaacgatgtctactagtcgttgggtcccttgaggacttagtgacgcagctaacgcaataagtagaccgcctggggagtacggccgcaaggttaaaactcaaatgaattgacgggggcccgcacaagcggtggagcatgtggtttaattcgatgcaacgcgaagaaccttacctggtcttgacatatctagaatcctgcagagatgcgggagtgccttcgggaattagaatacaggtgctgcatggctgtcgtcagctcgtgtcgtgagatgttgggttaagtcccgcaacgagcgcaacccttgtccttagttaccagcgggttaagccgggaactctaaggatactgccagtgacaaactggaggaaggcggggacgacgtcaagtcatcatggcccttacgaccagggctacacacgtgctacaatggtaggtacagagggcagctacacagcgatgtgatgcgaatctcaaaaagcctatcgtagtccagattggagtctgcaactcgactccatgaagtaggaatcgctagtaatcgcggatcagaatgccgcggtgaatacgttcccgggccttgtacacaccgcccgtcacaccatgggagttgattgcaccagaagtggatagcttaaccttcgggggagcgttcaccacggtgtggttgatgactggggtgaagtcgtaacaaggtagc

SEQ ID NO: 1609 - DNA, 1586 bp, Psychrobacter cryohalolentis
gatgagccaagtttagaagtctctttaaaggacttcatagcaagattaaactgaagagtttgatcatggctcagattgaacgctggcggcaggcttaacacatgcaagtcgagcggaaacgatgatagcttgctatcaggcgtcgagcggcggacgggtgagtaatacttaggaatctacctagtagtgggggatagcacggggaaactcgtattaataccgcatacgacctacgggagaaagggggcagtttactgctctcgctattagatgagcctaagtcggattagctagatggtggggtaaaggcctaccatggcgacgatctgtagctggtctgagaggatgatcagccacaccgggactgagacacggcccggactcctacgggaggcagcagtggggaatattggacaatgggggaaaccctgatccagccatgccgcgtgtgtgaagaaggccttttggttgtaaagcactttaagcagtgaagaagactcttcggttaatacccggagacgatgacattagctgcagaataagcaccggctaactctgtgccagcagccgcggtaatacagagggtgcaagcgttaatcggaattactgggcgtaaagggagcgtaggtggctcgataagtcagatgtgaaatccccgggctcaacctgggaactgcatctgatactgttgagctagagtatgtgagaggaaggtagaattccaggtgtagcggtgaaatgcgtagagatctggaggaataccgatggcgaaggcagccttctggcataatactgacactgaggctcgaaagcgtgggtagcaaacaggattagataccctggtagtccacgccgtaaacgatgtctactagtcgttgggtcccttgaggacttagtgacgcagctaacgcaataagtagaccgcctggggagtacggccgcaaggttaaaactcaaatgaattgacgggggcccgcacaagcggtggagcatgtggtttaattcgatgcaacgcgaagaaccttacctggtcttgacatatctagaatcctgcagagatgcgggagtgccttcgggaattagaatacaggtgctgcatggctgtcgtcagctcgtgtcgtgagatgttgggttaagtcccgcaacgagcgcaacccttgtccttagttaccagcgggttaagccgggaactctaaggatactgccagtgacaaactggaggaaggcggggacgacgtcaagtcatcatggcccttacgaccagggctacacacgtgctacaatggtaggtacagagggcagctacacagcgatgtgatgcgaatctcaaaaagcctatcgtagtccagattggagtctgcaactcgactccatgaagtaggaatcgctagtaatcgcggatcagaatgccgcggtgaatacgttcccgggccttgtacacaccgcccgtcacaccatgggagttgattgcaccagaagtggatagcttaaccttcgggggagcgttcaccacggtgtggttgatgactggggtgaagtcgtaacaaggtagccgtaggggaacctgcggctggatcacctcctta

SEQ ID NO: 1610 - DNA, 1472 bp, Psychrobacter faecalis
ggctcagattgaacgctggcggcaggcttaacacatgcaagtcgagcggtaacaggagaagcttgcttctcgctgacgagcggcggacgggtgagtaatacttaggaatctacctagtagtgggggatagctcggggaaactcgaattaataccgcatacgacctacgggagaaagggggcaacttgttgctctcgctattagatgagcctaagtcggattagctagatggtggggtaaaggcctaccatggcgacgatctgtagctggtctgagaggatgatcagccacaccgggactgagacacggcccggactcctacgggaggcagcagtggggaatattggacaatgggggcaaccctgatccagccatgccgcgtgtgtgaagaaggccttttggttgtaaagcactttaagcagtgaagaagactccatggttaatacccatggacgatgacattagctgcagaataagcaccggctaactctgtgccagcagccgcggtaatacagagggtgcaagcgttaatcggaattactgggcgtaaagcgagcgtaggtggcttgataagtcagatgtgaaagccccgggcttaacctgggaacggcatctgatactgttaggctagagtaggtgagaggaaggtagaattccaggtgtagcggtgaaatgcgtagagatctggaggaataccgatggcgaaggcagccttctggcatcatactgacactgaggttcgaaagcgtgggtagcaaacaggattagataccctggtagtccacgccgtaaacgatgtctactagtcgttgggtcccttgaggacttagtgacgcagctaacgcaataagtagaccgcctggggagtacggccgcaaggttaaaactcaaatgaattgacgggggcccgcacaagcggtggagcatgtggtttaattcgatgcaacgcgaagaaccttacctggtcttgacatatctagaatcctgcagagatgcgggagtgccttcgggaattagaatacaggtgctgcatggctgtcgtcagctcgtgtcgtgagatgttgggttaagtcccgcaacgagcgcaacccttgtccttagttaccagcggtttggccgggaactctaaggatactgccagtgacaaactggaggaaggcggggacgacgtcaagtcatcatggcccttacgaccagggctacacacgtgctacaatggtaggtacagagggcagctacacagcgatgtgatgcgaatctcaaaaagcctatcgtagtccagattggagtctgcaactcgactccatgaagtaggaatcgctagtaatcgcggatcagaatgccgcggtgaatacgttcccgggccttgtacacaccgcccgtcacaccatgggagttgattgcaccagaagtgggtagcctaaccttttaggatggcgctcaccacggtgtggttgatgactggggtgaagt

SEQ ID NO: 1611 - DNA, 1468 bp, Psychrobacter nivimaris
agattgaacgctggcggcaggcttaacacatgcaagtcgagcggaaacgatgatagcttgctatcaggcgtcgagcggcggacgggtgagtaatacttaggaatctacctagtagtgggggatagcacggggaaactcgtattaataccgcatacgacctacgggagaaagggggcagtttactgctctcgctattagatgagcctaagtcggattagctagatggtggggtaaaggcctaccatggcgacgatctgtagctggtctgagaggatgatcagccacaccgggactgagacacggcccggactcctacgggaggcagcagtggggaatattggacaatgggggaaaccctgatccagccatgccgcgtgtgtgaagaaggccttttggttgtaaagcactttaagcagtgaagaagactcttcggttaatacccggagacgatgacattagctgcagaataagcaccggctaactctgtgccagcagccgcggtaatacagagggtgcaagcgttaatcggaattactgggcgtaaagcgagcgtaggtggcttgataagtcagatgtgaaatccccgggcttaacctgggaactgcatctgaaactgttaggctagagtaggtgagagggaggtagaatttcaggtgtagcggtgaaatgcgtagagatctgaaggaataccgatggcgaaggcagcctcctggcatcatactgacactgaggctcgaaagcgtgggtagcaaacaggattagataccctggtagtccacgccgtaaacgatgtctactagtcgttgggtcccttgaggacttagtgacgcagctaacgcaataagtagaccgcctggggagtacggccgcaaggttaaaactcaaatgaattgacgggggcccgcacaagcggtggagcatgtggtttaattcgatgcaacgcgaagaaccttacctggtcttgacatatctagaatcctgcagagatgcgggagtgccttcgggaattagaatacaggtgctgcatggctgtcgtcagctcgtgtcgtgagatgttgggttaagtcccgcaacgagcgcaacccttgtccttagttaccagcgggttaagccgggaactctaaggatactgccagtgacaaactggaggaaggcggggacgacgtcaagtcatcatggcccttacgaccagggctacacacgtgctacaatggtaggtacagagggcagctacacagcgatgtgatgcgaatctcaaaaagcctatcgtagtccagattggagtctgcaactcgactccatgaagtaggaatcgctagtaatcgcggatcagaatgccgcggtgaatacgttcccgggccttgtacacaccgcccgtcacaccatgggagttgattgcaccagaagtggatagcctaaccttcgggaaggcgttcaccacggtgtggttgatgactggggtgaagtc

SEQ ID NO: 1612 - DNA, 1468 bp, Psychrobacter pulmonis
agattgaacgctggcggcaggcttaacacatgcaagtcgagcggtaacaggagaagcttgcttctcgctgacgagcggcggacgggtgagtaatacttaggaatctacctagtagtgggggatagctcggggaaactcgaattaataccgcatacgacctacgggagaaagggggcaacttgttgctctcgctattagatgagcctaagtcggattagctagatggtggggtaaaggcctaccatggcgacgatctgtagctggtctgagaggatgatcagccacaccgggactgagacacggcccggactcctacgggaggcagcagtggggaatattggacaatgggggcaaccctgatccagccatgccgcgtgtgtgaagaaggccttttggttgtaaagcactttaagcagtgaagaagactccatggttaatacccatggacgatgacattagctgcagaataagcaccggctaactctgtgccagcagccgcggtaatacagagggtgcaagcgttaatcggaattactgggcgtaaagcgagcgtaggtggcttgataagtcagatgtgaaagccccgggcttaacctgggaacggcatctgatactgttaggctagagtaggtgagaggaaggtagaattccaggtgtagcggtgaaatgcgtagagatctggaggaataccgatggcgaaggcagccttctggcatcatactgacactgaggttcgaaagcgtgggtagcaaacaggattagataccctggtagtccacgccgtaaacgatgtctactagtcgttgggtcccttgaggacttagtgacgcagctaacgcaataagtagaccgcctggggagtacggccgcaaggttaaaactcaaatgaattgacgggggcccgcacaagcggtggagcatgtggtttaattcgatgcaacgcgaagaaccttacctggtcttgacatatctagaatcctgcagagatgcgggagtgccttcgggaattagaatacaggtgctgcatggctgtcgtcagctcgtgtcgtgagatgttgggttaagtcccgcaacgagcgcaacccttgtccttagttaccagcggtttggccgggaactctaaggatactgccagtgacaaactggaggaaggcggggacgacgtcaagtcatcatggcccttacgaccagggctacacacgtgctacaatggtaggtacagagggcagctacacagcgatgtgatgcgaatctcaaaaagcctatcgtagtccagattggagtctgcaactcgactccatgaagtaggaatcgctagtaatcgcggatcagaatgccgcggtgaatacgttcccgggccttgtacacaccgcccgtcacaccatgggagttgattgcaccagaagtggttagcctaaccttttaggaaggcgatcaccacggtgtggttgatgactggggtgaagtc

SEQ ID NO: 1613 - DNA, 1457 bp, Psychrobacter sp.
  13983
attgaacgctggcggcaggcttaacacatgcaagtcgagcggtaacaggagaagcttgcttctygctgacgagcggcggacgggtgagtaatacttaggaatctgcccagtagtgggggatagcacggggaaactcgtattaataccgcatacaccctacggggaaaagggggcgcttgcgctctcgctattggatgagcctaagtcggattagctagttggtggggtaaaggcctaccaaggcgacgatctgtagctggtctgagaggatgatcagccacaccgggactgagacacggcccggactcctacgggaggcagcagtggggaatattggacaatgggggcaaccctgatccagccatgccgcgtgtgtgaagaaggccttttggttgtaaagcactttaagcagtgaagaagactctatggttaatacccatagacgatgacattagctgcagaataagcaccggctaactctgtgccagcagccgcggtaatacagagggtgcaagcgttaatcggaattactgggcgtaaagcgagcgtaggtggcttaataagtcagatgtgaaatccccgggcttaacctgggaactgcatctgatactgttgggctagagtaggtgagagggaggtagaatttcaggtgtagcggtgaaatgcgtagagatctgaaggaataccgatggcgaaggcagcctcctggcatcatactgacactgaggttcgaaagcgtgggtagcaaacaggattagataccctggtagtccacgccgtaaacgatgtctactagtcgttggggaacttgattccttagtgacgcagctaacgcaataagtagaccgcctggggagtacggccgcaaggttaaaactcaaatgaattgacgggggcccgcacaagcggtggagcatgtggtttaattcgatgcaacgcgaagaaccttacctggtcttgacatatctagaatcctgcagagatgcgggagtgccttcgggaattagaatacaggtgctgcatggctgtcgtcagctcgtgtcgtgagatgttgggttaagtcccgcaacgagcgcaacccttttccttagttaccagcggtttggccggggactctaaggatactgccagtgacaaactggaggaaggcggggacgacgtcaagtcatcatggcccttacgaccagggctacacacgtgctacaatggtaggtacagagggctgctacacagcgatgtgatgcgaatctcaaaaagcctatcgtagtccagattggagtctgcaactcgactccatgaagtcggaatcgctagtaatcgcggatcagaatgccgcggtgaatacgttcccgggccttgtacacaccgcccgtcacaccatgggagttgattgcaccagaagtgggtagcctaacttttagagggcgctcaccacggtgtggtcgatgactggggtg

SEQ ID NO: 1614 - DNA, 1327 bp, Pyramidobacter piscolens
gacgaacgctggcggcgtgcttaacacatgcaagttgagcgagcagcggacgggtgagtaaagcacaaggacttgtccgaaagagagggacacctgcgggaaaccggagctaatacctcataaaaaaggcgcttttggagagacttgtgtcctatcaggcagttggtgaggtaacggctcaccaaaccgaagacgggtagccggactgagaggtcgaccggccacattggaactgagagacggtccagactcctacgggaggcagcagtggggaatattgggcaatgggcgcaagcctgacccagcgacgccgcgtgagggaagacagccttcgggttgtaaacctctgttgcaggggaagatgacggtaccctgcgaggaagctccggctaactacgtgccagcagccgcggtaatacgtagggagcgagcgttgtccggaattactgggcgtaaagggcgcgtaggcggcgcttcaagtcgtctgtcaaaagccgaggctcaacctcggtgcgcagacgaaactggagagcttgagaagcagagaggcaaacagaattcctggtgtagcggtgaaatgcgtagatatcaggaagaataccagtggcgaaggcggtttgctggctgcctgacgctgaagcgcgaaagccaggggagcaaacgggattagataccccggtagtcctggcagtaaacgatgtatgctgggtgtgggacgttccgtgccgaagttaacgcgataagcataccgcctggggagtacggtcgcaagattgaaactcaaaggaattgacgggggcccgcacaagcggtggagcacgtggtttaattcgatgcaaaccgaagaaccttacctggacttgacatcaacaggtgctgcatggctgtcgtcagctcgtgtcgtgagatgttgggttaagtcccgcaacgagcgcaacccctattgccggttgctaccagctgagcactccggcgagactgccatcgacaagatggaggaaggtggggacgacgtcaagtcatcatggcccatatgtccagggcgacacacatgctacaatggatggcagagagaagcgagcccgaaaggagaagcagatcccaaccatccccagttcggatgcagtctgcaactcgactgcagaagttggaatcgctagtaatcgcggatcagccaagccgcggtgaatacgttcccgggccttgtacacaccgcccgtcacaccatccgagtcgggtgctctcaaagccggagcctaaggatccgcctaaagagtgtccggtgaggagggtgaagtcgtaacaaggtaaccgtacgggaacgtgc

SEQ ID NO: 1615 - DNA, 1540 bp, Ralstonia pickettii
ttgaactgaagagtttgatcctggctcagattgaacgctggcggcatgccttacacatgcaagtcgaacggcagcatgatctagcttgctagattgatggcgagtggcgaacgggtgagtaatacatcggaacgtgccctgtagtgggggataactagtcgaaagattagctaataccgcatacgacctgagggtgaaagtgggggaccgcaaggcctcatgctataggagcggccgatgtctgattagctagttggtggggtaaaggcccaccaaggcgacgatcagtagctggtctgagaggacgatcagccacactgggactgagacacggcccagactcctacgggaggcagcagtggggaattttggacaatgggcgaaagcctgatccagcaatgccgcgtgtgtgaagaaggccttcgggttgtaaagcacttttgtccggaaagaaatggctctggttaatacctggggtcgatgacggtaccggaagaataaggaccggctaactacgtgccagcagccgcggtaatacgtagggtccaagcgttaatcggaattactgggcgtaaagcgtgcgcaggcggttgtgcaagaccgatgtgaaatccccgagcttaacttgggaattgcattggtgactgcacggctagagtgtgtcagaggggggtagaattccacgtgtagcagtgaaatgcgtagagatgtggaggaataccgatggcgaaggcagccccctgggataacactgacgctcatgcacgaaagcgtggggagcaaacaggattagataccctggtagtccacgccctaaacgatgtcaactagttgttggggattcatttccttagtaacgtagctaacgcgtgaagttgaccgcctggggagtacggtcgcaagattaaaactcaaaggaattgacggggacccgcacaagcggtggatgatgtggattaattcgatgcaacgcgaaaaaccttacctacccttgacatgccactaacgaagcagagatgcattaggtgctcgaaagagaaagtggacacaggtgctgcatggctgtcgtcagctcgtgtcgtgagatgttgggttaagtcccgcaacgagcgcaacccttgtctctagttgctacgaaagggcactctagagagactgccggtgacaaaccggaggaaggtggggatgacgtcaagtcctcatggcccttatgggtagggcttcacacgtcatacaatggtgcatacagagggttgccaagccgcgaggtggagctaatcccagaaaatgcatcgtagtccggatcgtagtctgcaactcgactacgtgaagctggaatcgctagtaatcgcggatcagcatgccgcggtgaatacgttcccgggtcttgtacacaccgcccgtcacaccatgggagtgggctttaccagaagtagttagcctaaccgcaaggagggcgattaccacggtagggttcatgactggggtgaagtcgtaacaaggtagccgtatcggaaggtgcggctggatcacctccttt

SEQ ID NO: 1616 - DNA, 1540 bp, Ralstonia sp.
  5_7_47FAA
ttgaactgaagagtttgatcctggctcagattgaacgctggcggcatgccttacacatgcaagtcgaacggcagcatgatctagcttgctagattgatggcgagtggcgaacgggtgagtaatacatcggaacgtgccctgtagtgggggataactagtcgaaagattagctaataccgcatacgacctgagggtgaaagtgggggaccgcaaggcctcatgctataggagcggccgatgtctgattagctagttggtgaggtaaaggctcaccaaggcgacgatcagtagctggtctgagaggacgatcagccacactgggactgagacacggcccagactcctacgggaggcagcagtggggaattttggacaatgggcgaaagcctgatccagcaatgccgcgtgtgtgaagaaggccttcgggttgtaaagcacttttgtccggaaagaaatggctctggttaatacctggggtcgatgacggtaccggaagaataaggaccggctaactacgtgccagcagccgcggtaatacgtagggtccaagcgttaatcggaattactgggcgtaaagcgtgcgcaggcggttgtgcaagaccgatgtgaaatccccgagcttaacttgggaattgcattggtgactgcacggctagagtgtgtcagaggggggtagaattccacgtgtagcagtgaaatgcgtagagatgtggaggaataccgatggcgaaggcagccccctgggataacactgacgctcatgcacgaaagcgtggggagcaaacaggattagataccctggtagtccacgccctaaacgatgtcaactagttgttggggattcatttccttagtaacgtagctaacgcgtgaagttgaccgcctggggagtacggtcgcaagattaaaactcaaaggaattgacggggacccgcacaagcggtggatgatgtggattaattcgatgcaacgcgaaaaaccttacctacccttgacatgccactaacgaagcagagatgcattaggtgctcgaaagagaaagtggacacaggtgctgcatggctgtcgtcagctcgtgtcgtgagatgttgggttaagtcccgcaacgagcgcaacccttgtctctagttgctacgaaagggcactctagagagactgccggtgacaaaccggaggaaggtggggatgacgtcaagtcctcatggcccttatgggtagggcttcacacgtcatacaatggtgcatacagagggttgccaagccgcgaggtggagctaatcccagaaaatgcatcgtagtccggatcgtagtctgcaactcgactacgtgaagctggaatcgctagtaatcgcggatcagcatgccgcggtgaatacgttcccgggtcttgtacacaccgcccgtcacaccatgggagtgggctttaccagaagtagttagcctaaccgcaaggagggcgattaccacggtagggttcatgactggggtgaagtcgtaacaaggtagccgtatcggaaggtgcggctggatcacctccttt

SEQ ID NO: 1617 - DNA, 1515 bp, Raoultella ornithinolytica
cagattgaacgctggcggcacgcctaacacatgcaagtcgagcggtagcacagagagcttgctctcgggtgacgagcggcggacgggtgagtaatgtctgggaaactgcctgatggagggggataactactggaaacggtagctaataccgcataacgtcgcaagaccaaagtgggggaccttcgggcctcatgccatcagatgtgcccagatgggattagctagtaggtggggtaatggctcacctaggcgacgatccctagctggtctgagaggatgaccagccacactggaactgagacacggtccagactcctacgggaggcagcagtggggaatattgcacaatgggcgcaagcctgatgcagccatgccgcgtgtatgaagaaggccttcgggttgtaaagtactttcagcgaggaggaaggcgttaaggttaataaccttagtgattgacgttactcgcagaagaagcaccggctaactccgtgccagcagccgcggtaatacggagggtgcaagcgttaatcggaattactgggcgtaaagcgcacgcaggcggtctgttaagtcagatgtgaaatccccgggctcaacctgggaactgcatttgaaactggcaggcttgagtcttgtagaggggggtagaattccaggtgtagcggtgaaatgcgtavagatctggaggaataccggtggcgaaggcggccccctggacaaagactgacgctcaggtgcgaaagcgtggggagcaaacaggattagataccctggtagtccacgctgtaaacgatgtcgacttggaggttgttcccttgaggagtggcttccggagctaacgcgttaagtcgaccgcctggggagtacggccgcaaggttaaaactcaaatgaattgacgggggcccgcacaagcggtggagcatgtggtttaattcgatgcaacgcgaagaaccttacctactcttgacatccagagaacttagcagagatgctttggtgccttcgggaactctgagacaggtgctgcatggctgtcgtcagctcgtgttgtgaaatgttgggttaagtcccgcaacgagcgcaacccttatcctttgttgccagcgattcggtcgggaactcaaaggagactgccagtgataaactggaggaaggtggggatgacgtcaagtcatcatggcccttacgagtagggctacacacgtgctacaatggcatatacaaagagaagcgacctcgcgagagcaagcggacctcataaagtatgtcgtagtccggattggagtctgcaactcgactccatgaagtcggaatcgctagtaatcgtagatcagaatgctacggtgaatacgttcccgggccttgtacacaccgcccgtcacaccatgggagtgggttgcaaaagaagtaggtagcttaaccttcgggagggcgcttaccactttgtgattcatgactggggtgaagtcgtaacaaggtaaccgtaggggaacctgcggctggatcacctcctt

SEQ ID NO: 1618 - DNA, 1398 bp, Raoultella planticola
tcgagcggtagcacagagagcttgctctcgggtgacgagcggcggacgggtgagtaatgtctgggaaactgcctgatggagggggataactactggaaacggtagctaataccgcataacgtcgcaagaccaaagtgggggaccttcgggcctcatgccatcagatgtgcccagatgggattagctagtaggtggggtaatggctcacctaggcgacgatccctagctggtctgagaggatgaccagccacactggaactgagacacggtccagactcctacgggaggcagcagtggggaatattgcacaatgggcgcaagcctgatgcagccatgccgcgtgtatgaagaaggccttcgggttgtaaagtactttcagcgaggaggaaggcattaaggttaataaccttggtgattgacgttactcgcagaagaagcaccggctaactccgtgccagcagccgcggtaatacggagggtgcaagcgttaatcggaattactgggcgtaaagcgcacgcaggcggtttgttaagtcagatgtgaaatccccgggctcaacctgggaactgcatttgaaactggcaagcttgagtcttgtagaggggggtagaattccaggtgtagcggtgaaatgcgtagagatctggaggaataccggtggcgaaggcggccccctggacaaagactgacgctcaggtgcgaaagcgtggggagcaaacaggattagataccctggtagtccacgctgtaaacgatgtcgacttggaggttgttcccttgaggagtggcttccggagctaacgcgttaagtcgaccgcctggggagtacggccgcaaggttaaaactcaaatgaattgacgggggcccgcacaagcggtggagcatgtggtttaattcgatgcaacgcgaagaaccttacctactcttgacatccagagaacttagcagagatgctttggggccttcgggaactctgagacagaggctgcatggctgtcgtcagctcgtgtgatgaaattttgggattagtcccgcaacgagcgcaacccttatcctttgttgccagcggtccggccgggaactcaaaggagactgccagtgataaactggaggaaggtggggatgacgtcaagtcatcatggcccttacgagtagggctacacacgtgctacaatggcatatacaaagagaagcgacctcgcgagagcaagcggacctcataaagtatgtcgtagtccggattggagtctgcaactcgactccatgaagtcggaatcgctagtaatcgtagatcagaatgctacggtgaatacgttcccgggccttgtacacaccgcccgtcacaccatgggagtgggttgcaaaagaagtaggtagcttaaccttcgggagggcg

SEQ ID NO: 1619 - DNA, 1454 bp, Raoultella terrigena
tgaacgctggcggcaggcctaacacatgcaagtcgagcggtagcacagaagagcttgctcttcgggtgacgagcggcggacgggtgagtaatgtctgggaaactgcctgatggagggggataactactggaaacggtagctaataccgcataacgtcgcaagaccaaagtgggggaccttcgggcctcatgccatcagatgtgcccagatgggattagctagtaggtgaggtaatggctcacctaggcgacgatccctagctggtctgagaggatgaccagccacactggaactgagacacggtccagactcctacgggaggcagcagtggggaatattgcacaatgggcgcaagcctgatgcagccatgccgcgtgtatgaagaaggccttcgggttgtaaagtactttcagcgaggaggaaggcgttaaggttaataaccttagcgattgacgttactcgcagaagaagcaccggctaactccgtgccagcagccgcggtaatacggagggtgcaagcgttaatcggaattactgggcgtaaagcgcacgcaggcggtctgtcaagtcggatgtgaaatccccgggctcaacctgggaactgcatccgaaactggcaggctagagtcttgtagaggggggtagaattccaggtgtagcggtgaaatgcgtagagatctggaggaataccggtggcgaaggcggccccctggacaaagactgacgctcaggtgcgaaagcgtggggagcaaacaggattagataccctggtagtccacgctgtaaacgatgtcgacttggaggttgttcccttgaggagtggcttccggagctaacgcgttaagtcgaccgcctggggagtacggccgcaaggttaaaactcaaatgaattgacgggggcccgcacaagcggtggagcatgtggtttaattcgatgcaacgcgaagaaccttacctactcttgacatccagagaacttagcagagatgctttggtgccttcgggaactctgagacaggtgctgcatggctgtcgtcagctcgtgttgtgaaatgttgggttaagtcccgcaacgagcgcaacccttatcctttgttgccagcggttcggccgggaactcaaaggagactgccagtgataaactggaggaaggtggggatgacgtcaagtcatcatggcccttacgagtagggctacacacgtgctacaatggcatatacaaagagaagcgacctcgcgagagcaagcggacctcataaagtatgtcgtagtccggatcggagtctgcaactcgactccgtgaagtcggaatcgctagtaatcgtggatcagaatgccacggtgaatacgttcccgggccttgtacacaccgcccgtcacaccatgggagtgggttgcaaaagaagtaggtagcttaaccttcgggagggcgcttaccactttgtgattcatga

SEQ ID NO: 1620 - DNA, 1432 bp, Rhodobacter sp.
  oral taxon C30
agagtttgatcctggctcagaacgaacgctggcggcaggcctaacacatgcaagtcgaacgagatcttcggatctagtggcggacgggtgagtaacgcgtgggaacgtgccctttggttcggaatagcctcgggaaactgggagtaataccggatacgcccttcgggggaaagatttatcgccaaaggatcggcccgcgttggattaggtagttggtggggtaacggcctaccaagccgacgatccatagctggtttgagaggatgatcagccacactgggactgagacacggcccagactcctacgggaggcagcagtggggaatcttagacaatgggggcaaccctgatctagccatgccgcgtgatcgatgaaggccttagggttgtaaagatctttcagctgggaagataatgactgtaccagcagaagaagccccggctaactccgtgccagcagccgcggtaatacggagggggctagcgttgttcggaattactgggcgtaaagcgcacgtaggcggaccagaaagtcagaggtgaaatcccagggctcaaccttggaactgcctttgaaactcctggtcttgagttcgagagaggtgagtggaattccgagtgtagaggtgaaattcgtagatattcggaggaacaccagtggcgaaggcggctcactggctcgatactgacgctgaggtgcgaaagcgtggggagcaaacaggattagataccctggtagtccacgccgtaaacgatgaatgccagacgtcgggcagccatgctgttcggtgtcacacctaacggattaagcattccgcctggggagtacggccgcaaggttaaaactcaaaggaattgacgggggcccgcacaagcggtggagcatgtggtttaattcgaagcaacgcgcagaaccttaccaacccttgacatggcgatcgcggttccagagatggttccttcagttcggctggatcgcacacaggtgctgcatggctgtcgtcagctcgtgtcgtgagatgttcggttaagtccggcaacgagcgcaacccacactttcagttgccatcattcagttgggcactctgaaagaactgccggtgataagccggaggaaggtgtggatgacgtcaagtcctcatggcccttacgggttgggctacacacgtgctacaatggtggtgacaatgggttaatccccaaaagccatctcagttcggattggggtctgcaactcgaccccatgaagtcggaatcgctagtaatcgcgtaacagcatgacgcggtgaatacgttcccgggccttgtacacaccgcccgtcacaccatgggaattgggtctacccgacgacggtgcgccaacctcgcaagaggaagcagccggccacggtaggctcagtgactggggtgaagtcgtaacaaggtagccgta

SEQ ID NO: 1621 - DNA, 1466 bp, Rhodobacter sphaeroides
caacttgagagtttgatcctggctcagaatgaacgctggcggcaggcctaacacatgcaagtcgagcgaagtcttcggacttagcggcggacgggtgagtaacgcgtgggaacgtgccctttgcttcggaatagccccgggaaactgggagtaataccgaatgtgccctttgggggaaagatttatcggcaaaggatcggcccgcgttggattaggtagttggtggggtaatggcctaccaagccgacgatccatagctggtttgagaggatgatcagccacactgggactgagacacggcccagactcctacgggaggcagcagtggggaatcttagacaatgggcgcaagcctgatctagccatgccgcgtgatcgatgaaggccttagggttgtaaagatctttcaggtgggaagataatgacggtaccaccagaagaagccccggctaactccgtgccagcagccgcggtaatacggagggggctagcgttattcggaattactgggcgtaaagcgcacgtaggcggatcggaaagtcagaggtgaaatcccagggctcaaccctggaactgcctttgaaactcccgatcttgaggtcgagagaggtgagtggaattccgagtgtagaggtgaaattcgtagatattcggaggaacaccagtggcgaaggcggctcactggctcgatactgacgctgaggtgcgaaagcgtggggagcaaacaggattagataccctggtagtccacgccgtaaacgatgaatgccagtcgtcgggcagcatgctgttcggtgacacacctaacggattaagcattccgcctggggagtacggccgcaaggttaaaactcaaaggaattgacgggggcccgcacaagcggtggagcatgtggtttaattcgaagcaacgcgcagaaccttaccaacccttgacatggcgatcgcggttccagagatggttccttcagttcggctggatcgcacacaggtgctgcatggctgtcgtcagctcgtgtcgtgagatgttcggttaagtccggcaacgagcgcaacccacgtccttagttgccagcattcagttgggcactctagggaaactgccggtgataagccggaggaaggtgtggatgacgtcaagtcctcatggcccttacgggttgggctacacacgtgctacaatggcagtgacaatgggttaatcccaaaaagctgtctcagttcggattggggtctgcaactcgaccccatgaagtcggaatcgctagtaatcgcgtaacagcatgacgcggtgaatacgttcccgggccttgtacacaccgcccgtcacaccatgggaattggttctacccgaaggcggtgcgccaacctcgcaagaggaggcagccgaccacggtaggatcagtgactggggtgaagtcgtaacaaggtagccgtaggggaacctgcggctggatcacctcctt

SEQ ID NO: 1622 - DNA, 1477 bp, Rhodococcus corynebacterioides
  modified_base (970)..(970): a, c, t, g, unknown or other
cctggctcaggacgaacgctggcggcgtgcttaacacatgcaagtcgaacggtaaggcccttcggggtacacgagtggcgaacgggtgagtaacacgtgggtgatctgccctgcacttcgggataagcccgggaaactgggtctaataccggataggactgcgcggtgcatgccgtgtggtggaaagatttatcggtgcaggatgggcccgcggcctatcagcttgttggtggggtaatggcctaccaaggcgacgacgggtagccggcctgagagggcgaccggccacactgggactgagacacggcccagactcctacgggaggcagcagtggggaatattgcacaatgggcgcaagcctgatgcagcgacgccgcgtgagggatgacggccttcgggttgtaaacctctttcagcagggacgaagcgcaagtgacggtacctgcagaagaagcaccggccaactacgtgccagcagccgcggtaatacgtagggtgcaagcgttgtccggaattactgggcgtaaagagctcgtaggcggtttgtcgcgtcgtctgtgaaaaccagcagctcaactgttggcttgcaggcgatacgggcagacttgagtatttcaggggagactggaattcctggtgtagcggtgaaatgcgcagatatcaggaggaacaccggtggcgaaggcgggtctctgggaaataactgacgctgaggagcgaaagcgtgggtagcgaacaggattagataccctggtagtccacgccgtaaacggtgggcgctaggtgtgggtttccttccacgggatccgtgccgtagctaacgcattaagcgccccgcctggggagtacggccgcaaggctaaaactcaaaggaattgacgggggcccgcacaagcggcggagcatgtggattaattcgatgcaacgcgaagaaccttacctgggtttgacatacaccggaaagccgtngagatacggccccccttgtggtcggtgtacaggtggtgcatggctgtcgtcagctcgtgtcgtgagatgttgggttaagtcccgcaacgagcgcaacccttgtcctgtgttgccagcacgttatggcggggactcgcaggagactgccggggtcaactcggaggaaggtggggacgacgtcaagtcatcatgccccttatgtccagggcttcacacatgctacaatggccggtacagagggctgcgataccgtgaggtggagcgaatcccttaaagccggtctcagttcggatcggggtctgcaactcgaccccgtgaagtcggagtcgctagtaatcgcagatcagcaacgctgcggtgaatacgttcccgggccttgtacacaccgcccgtcacgtcatgaaagtcggtaacacccgaagccggtggcctaaccccttgtgggagggagccgtcgaaggtgggatcggcgattgggacgaagtcgtaacaaggtagccgtaccgg

SEQ ID NO: 1623 - DNA, 1523 bp, Rhodococcus equi
cttcaacggagagtttgatcctggctcaggacgaacgctggcggcgtgcttaacacatgcaagtcgaacggtaaggccccttcgggggtacacgagtggcgaacgggtgagtaacacgtgggtgatctgccctgcactctgggataagcctgggaaactgggtctaataccggatatgagctcctgtcgcatggcgggggttggaaaggtttactggtgcaggatgggcccgcggcctatcagcttgttggtggggtaatggcctaccaaggcgacgacgggtagccggcctgagagggcgaccggccacactgggactgagacacggcccagactcctacgggaggcagcagtggggaatattgcacaatgggcgaaagcctgatgcagcgacgccgcgtgagggatgacggccttcgggttgtaaacctctttcagcagggacgaagcgagagtgacggtacctgcagaagaagcaccggccaactacgtgccagcagccgcggtaatacgtagggtgcgagcgttgtccggaattactgggcgtaaagagctcgtaggcggtttgtcgcgtcgtccgtgaaaacttggggctcaaccccaagcttgcgggcgatacgggcagacttgagtactgcaggggagactggaattcctggtgtagcggtgaaatgcgcagatatcaggaggaacaccggtggcgaaggcgggtctctgggcagtaactgacgctgaggagcgaaagcgtgggtagcgaacaggattagataccctggtagtccacgccgtaaacggtgggcgctaggtgtgggtttccttccacgggatccgtgccgtagctaacgcattaagcgccccgcctggggagtacggccgcaaggctaaaactcaaaggaattgacgggggcccgcacaagcggcggagcatgtggattaattcgatgcaacgcgaagaaccttacctgggtttgacatataccggaaagccgtagagatacggccccccttgtggtcggtatacaggtggtgcatggctgtcgtcagctcgtgtcgtgagatgttgggttaagtcccgcaacgagcgcaacccttgtcctgtgttgccagcgcgtaatggcggggactcgcaggagactgccggggtcaactcggaggaaggtggggacgacgtcaagtcatcatgccccttatgtccagggcttcacacatgctacaatggccggtacagagggctgcgataccgtgaggtggagcgaatcccttaaagccggtctcagttcggatcggggtctgcaactcgaccccgtgaagtcggagtcgctagtaatcgcagatcagcaacgctgcggtgaatacgttcccgggccttgtacacaccgcccgtcacgtcatgaaagtcggtaacacccgaagccggtggcctaacccttgtggagggagccgtcgaaggtgggatcggcgattgggacgaagtcgtaacaaggtagccgtaccggaaggtgcggctggatcacctcctttct

SEQ ID NO: 1624 - DNA, 1527 bp, Rhodococcus erythropolis
acggagagtttgatcctggctcaggacgaacgctggcggcgtgcttaacacatgcaagtcgagcggtaaggcctttcggggtacacgagcggcgaacgggtgagtaacacgtgggtgatctgccctgcacttcgggataagcctgggaaactgggtctaataccggatatgacctcaggttgcatgacttgggtggtggaaagatttatcggtgcaggatgggcccgcggcctatcagcttgttggtggggtaatggcctaccaaggcgacgacgggtagccgacctgagagggtgaccggccacactgggactgagacacggcccagactcctacgggaggcagcagtggggaatattgcacaatgggcgaaagcctgatgcagcgacgccgcgtgagggatgacggccttcgggttgtaaacctctttcagcagggacgaagcgcaagtgacggtacctgcagaagaagcaccggctaactacgtgccagcagccgcggtaatacgtagggtgcaagcgttgtccggaattactgggcgtaaagagttcgtaggcggtttgtcgcgtcgtttgtgaaaaccagcagctcaactgctggcttgcaggcgatacgggcagacttgagtactgcaggggagactggaattcctggtgtagcggtgaaatgcgcagatatcaggaggaacaccggtggcgaaggcgggtctctgggcagtaactgacgctgaggaacgaaagcgtgggtagcgaacaggattagataccctggtagtccacgccgtaaacggtgggcgctaggtgtgggttccttccacggaatccgtgccgtagctaacgcattaagcgccccgcctggggagtacggccgcaaggctaaaactcaaaggaattgacgggggcccgcacaagcggcggagcatgtggattaattcgatgcaacgcgaagaaccttacctgggtttgacatataccggaaagctgcagagatgtggccccccttgtggtcggtatacaggtggtgcatggctgtcgtcagctcgtgtcgtgagatgttgggttaagtcccgcaacgagcgcaacccctatcttatgttgccagcacgttatggtggggactcgtaagagactgccggggtcaactcggaggaaggtggggacgacgtcaagtcatcatgccccttatgtccagggcttcacacatgctacaatggccagtacagagggctgcgagaccgtgaggtggagcgaatcccttaaagctggtctcagttcggatcggggtctgcaactcgaccccgtgaagtcggagtcgctagtaatcgcagatcagcaacgctgcggtgaatacgttcccgggccttgtacacaccgcccgtcacgtcatgaaagtcggtaacacccgaagccggtggcttaaccccttgtgggagggagccgtcgaaggtgggatcggcgattgggacgaagtcgtaacaaggtagccgtaccggaaggtgcggctggatcacctcctttctaaggagca

SEQ ID NO: 1625 - DNA, 1424 bp, Rhodococcus fascians
cctggctcaggacgaacgctggcggcgtgcttaacacatgcaagtcgagcggtaaggcctttcggggtacacgagcggcgaacgggtgagtaacacgtgggtgatctgccctgcactctgggataagcttgggaaactgggtctaataccggatatgaccacagcatgcatgtgttgtggtggaaagatttatcggtgcaggatgggcccgcggcctatcagcttgttggtggggtaatggcctaccaaggcgacgacgggtagccgacctgagagggtgaccggccacactgggactgagacacggcccagactcctacgggaggcagcagtggggaatattgcacaatgggcggaagcctgatgcagcgacgccgcgtgagggatgaaggccttcgggttgtaaacctctttcagcagggacgaagcgtgagtgacggtacctgcagaagaagcaccggctaactacgtgccagcagccgcggtaatacgtagggtgcgagcgttgtccggaattactgggcgtaaagagttcgtaggcggtttgtcgcgtcgtttgtgaaaacccggggctcaacttcgggcttgcaggcgatacgggcagacttgagtgtttcaggggagactggaattcctggtgtagcggtgaaatgcgcagatatcaggaggaacaccggtggcgaaggcgggtctctgggaaacaactgacgctgaggaacgaaagcgtgggtagcaaacaggattagataccctggtagtccacgccgtaaacggtgggcgctaggtgtgggttccttccacgggatctgtgccgtagctaacgcattaagcgccccgcctggggagtacggccgcaaggctaaaactcaaaggaattgacgggggcccgcacaagcggcggagcatgtggattaattcgatgcaacgcgaagaaccttacctgggtttgacatacaccggaaaaccgtagagatacggtcccccttgtggtcggtgtacaggtggtgcatggctgtcgtcagctcgtgtcgtgagatgttgggttaagtcccgcaacgagcgcaacccttgtcttatgttgccagcacgtaatggtggggactcgtaagagactgccggggtcaactcggaggaaggtggggacgacgtcaagtcatcatgccccttatgtccagggcttcacacatgctacaatggccagtacagagggctgcgagaccgtgaggtggagcgaatcccttaaagctggtctcagttcggatcggggtctgcaactcgaccccgtgaagtcggagtcgctagtaatcgcagatcagcaacgctgcggtgaatacgttcccgggccttgtacacaccgcccgtcacgtcatgaaagtcggtaacacccgaagccggtggcctaaccccttacggggagggagccg

SEQ ID NO: 1626 - DNA, 1489 bp, Rhodopseudomonas palustris
tccaacttgagagtttgatcctggctcagagcgaacgctggcggcaggcttaacacatgcaagtcgaacgggcatagcaatatgtcagtggcagacgggtgagtaacgcgtgggaacataccttttggttcggaacaactgagggaaacttcagctaataccggataagccctaacggggaaagatttatcgccgaaagattggcccgcgtctgattagctagttggtgaggtaatggctcaccaaggcgacgatcagtagctggtctgagaggatgatcagccacattgggactgagacacggcccaaactcctacgggaggcagcagtggggaatattggacaatgggcgcaagcctgatccagccatgccgcgtgagtgatgaaggccctagggttgtaaagctcttttgtgcgggaagataatgacggtaccgcaagaataagccccggctaacttcgtgccagcagccgcggtaatacgaagggggctagcgttgctcggaatcactgggcgtaaagggtgcgtaggcgggtttttaagtcagaggtgaaatcctggagctcaactccagaactgcctttgatactgaaagtcttgagtacgggagaggtgagtggaactgcgagtgtagaggtgaaattcgtagatattcgcaagaacaccagtggcgaaggcggctcactggcccgttactgacgctgaggcacgaaagcgtggggagcaaacaggattagataccctggtagtccacgccgtaaacgatgaatgccagccgttagtgggtttactcactagtggcgcagctaacgctttaagcattccgcctggggagtacggtcgcaagattaaaactcaaaggaattgacgggggcccgcacaagcggtggagcatgtggtttaattcgacgcaacgcgcagaaccttaccagcccttgacatgtctaggaccggtcgcagagatgtgaccttctcttcggagcctagagcacaggtgctgcatggctgtcgtcagctcgtgtcgtgagatgttgggttaagtcccgcaacgagcgcaacccccgtctttagttgctaccatttagttgagcactctaaagagactgccggtgataagccgcgaggaaggtggggatgacgtcaagtcctcatggcccttacgggctgggctacacacgtgctacaatggcggtgacaatgggatgctaaagggcaacctctcgcaaatctcaaaaagccgtctcagttcggattgggctctgcaactcgagcccatgaagttggaatcgctagtaatcgtggatcagcatgccacggtgaatacgttcccgggccttgtacacaccgcccgtcacaccatgggagttggttttacctgaaggtagtgcgctaacccgcaagggaggcagctaaccacggtagggtcagcgactggggtgaagtcgtaacaaggtagccgtaggggaacctgcggctggatcacctcct

SEQ ID NO: 1627 - DNA, 1508 bp, Rickettsia akari
gacagaatcaaacttgagagtttgatcctggctcagaacgaacgctatcggtatgcttaacacatgcaagtcggacggactgattggggttttctccagttagtgagtggcgaacgggtgagtaacacgtgggaatctgcccatcagtacggaataacttttagaaataaaagctaataccgtatattctctacggaggaaagatttatcgctgatggatgagcccgcgtcggattaggtagttggtgaggtaacggctcaccaagccgacgatctgtagttggtctgagaggatgatcagccacactgggactgagacacggcccagactcctacgggaggcagcagtggggaatattggacaatgggcgaaagcctgatccagcaataccgagtgagtgatgaaggccctagggttgtaaagctcttttagcaaggaagataatgacgttacttgcagaaaaagccccggctaactccgtgccagcagccgcggtaagacggagggggctagcgttgttcggaattactgggcgtaaagagtgcgtaggcggtttagtaagttggaagtgaaagcccggggcttaacctcggaattgctttcaaaactactaatctagagtgtagtaggggatgatggaattcctagtgtagaggtgaaattcttagatattaggaggaacaccggtggcgaaggcggtcatctgggctacgactgacgctgatgcacgaaagcgtggggagcaaacaggattagataccctggtagtccacgccgtaaacgatgagtgctagatatcggaagagtctctttcggtttcgcagctaacgcattaagcactccgcctggggagtacggtcgcaagattaaaactcaaaggaattgacgggggctcgcacaagcggtggagcatgcggtttaattcgatgttacgcgaaaaaccttaccaacctttgacatggtggttgcggatcgcagagatgctttccttcagttcggctggaccacacacaggtgttgcatggctgtcgtcagctcgtgtcgtgagatgttgggttaagtcccgcaacgagcgcaaccctcattcttatttgccagcgggtaatgccgggaactataagaaaactgccggtgataagccggaggaaggtggggacgacgtcaagtcatcatggcccttatgggttgggctacacgcgtgctacaatggtgtttacagagggaagcaagacggtaacgtggagcaaatccctaaaagacatctcagttcggattgttctctgcaactcgagagcatgaagttggaatcgctagtaatcgcggatcagcatgccgcggtgaatacgttctcgggccttgtacacactgcccgtcacgccatgggagttggttttacctgaaggtggtgagctaacgcaagaggcagccaaccacggtagaattagcgactggggtgaagtcgtaacaaggtagccgtaggggaacctgcggctggattacctcctta

SEQ ID NO: 1628 - DNA, 1501 bp, Rickettsia conorii
tcaaacttgagagtttgatcctggctcagaacgaacgctatcggtatgcttaacacatgcaagtcgaacggactaattggggcttgctccagttagttagtggcagacgggtgagtaacacgtgggaatctacccattagtacggaataacttttagaaataaaagctaataccgtatattctctgcggaggaaagatttatcgctgatggatgagcccgcgtcagattaggtagttggtgaggtaatggctcaccaagccgacgatctgtagctggtctgagaggatgatcagccacactgggactgagacacggcccagactcctacgggaggcagcagtggggaatattggacaatgggcgaaagcctgatccagcaataccgagtgagtgatgaaggccttagggttgtaaagctcttttagcaaggaagataatgacgttacttgcagaaaaagccccggctaactccgtgccagcagccgcggtaagacggagggggctagcgttgttcggaattactgggcgtaaagagtgcgtaggcggtttagtaagttggaagtgaaagcccggggcttaacctcggaattgctttcaaaactactaatctagagtgtagtaggggatgatggaattcctagtgtagaggtgaaattcttagatattaggaggaacaccggtggcgaaggcggtcatctgggctacaactgacgctgatgcacgaaagcgtggggagcaaacaggattagataccctggtagtccacgccgtaaacgatgagtgctagatatcggaagattctctttcggtttcgcagctaacgcattaagcactccgcctggggagtacggtcgcaagattaaaactcaaaggaattgacgggggctcgcacaagcggtggagcatgcggtttaattcgatgttacgcgaaaaaccttaccaacccttgacatggtggtcgcggatcgcagagatgcttttcttcagctcggctggaccacacacaggtgttgcatggctgtcgtcagctcgtgtcgtgagatgttgggttaagtcccgcaacgagcgcaaccctcattcttatttgccagcgggtaatgccgggaactataagaaaactgccggtgataagccggaggaaggtggggacgacgtcaagtcatcatggcccttacgggttgggctacacgcgtgctacaatggtgtttacagagggaagcaagacggcgacgtggagcaaatccctaaaagacatctcagttcggattgttctctgcaactcgagagcatgaagttggaatcgctagtaatcgcggatcagcatgccgcggtgaatacgttctcgggccttgtacacactgcccgtcacgccatgggagttagttttacctgaaggtggtgagctaacgcaagaggcagccaaccacggtaaaattagcgactggggtgaagtcgtaacaaggtagccgtaggggaacctgcggctggattacctcctta

SEQ ID NO: 1629 - DNA, 1501 bp, Rickettsia prowazekii
tcaaacttgagagtttgatcctggctcagaacgaacgctatcggtatgcttaacacatgcaagtcgaacggattaactagagctcgctttagttaattagtggcagacgggtgagtaacacgtgggaatctacccatcagtacggaataacttttagaaataaaagctaataccgtatattctctacggaggaaagatttatcgctgatggatgggcccgcgtcagattaggtagttggtgaggtaatggctcaccaagccgacgatctgtagctggtctgagaggatgatcagccacactgggactgagacacggcccagactcctacgggaggcagcagtggggaatattggacaatgggcgaaagcctgatccagcaataccgagtgagtgatgaaggccttagggttgtaaagctcttttagcaaggaagataatgacgttacttgcagaaaaagccccggctaactccgtgccagcagccgcggtaagacggagggggctagcgttgttcggaattactgggcgtaaagagtgcgtaggcggtttagtaagttggaagtgaaagcccggggcttaacctcggaattgctttcaaaactactaatctagagtgtagtaggggatgatggaattcctagtgtagaggtgaaattcttagatattaggaggaacaccggtggcgaaggcggtcatctgggctacaactgacgctgatgcacgaaagcgtggggagcaaacaggattagataccctggtagtccacgccgtaaacgatgagtgctagatatcggaggattctctttcggtttcgcagctaacgcattaagcactccgcctggggagtacggtcgcaagattaaaactcaaaggaattgacgggggctcgcacaagcggtggagcatgcggtttaattcgatgttacgcgaaaaaccttaccaacccttgacatggtggttacggattgcagagatgctttccttcagttcggctgggccacacacaggtgttgcatggctgtcgtcagctcgtgtcgtgagatgttgggttaagtcccgcaacgagcgcaacccttattcttatttgccagtgggtaatgccgggaactataagaaaactgccggtgataagccggaggaaggtggggacgacgtcaagtcatcatggcccttacgggttgggctacacgcgtgctacaatggtgtttacagagggaagcaatacggtgacgtggagcaaatccctaaaagacatctcagttcggattgttctctgcaactcgagagcatgaagttggaatcgctagtaatcgcggatcagcatgccgcggtgaatacgttctcgggccttgtacacactgcccgtcacgccatgggagttggttttacctgaaggtggtgagctaacgcaagaggcagccaaccacggtaaaattagcgactggggtgaagtcgtaacaaggtagccgtaggggaacctgcggctggattacctcctta

SEQ ID NO: 1630 - DNA, 1501 bp, Rickettsia rickettsii
tcaaacttgagagtttgatcctggctcagaacgaacgctatcggtatgcttaacacatgcaagtcgaacggactaattggggcttgctccaattagttagtggcagacgggtgagtaacacgtgggaatctacccatcagtacggaataacttttagaaataaaagctaataccgtatattctctgcggaggaaagatttatcgctgatggatgagcccgcgtcagattaggtagttggtgaggtaatggctcaccaagccgacgatctgtagctggtctgagaggatgatcagccacactgggactgagacacggcccagactcctacgggaggcagcagtggggaatattggacaatgggcgaaagcctgatccagcaataccgagtgagtgatgaaggccttagggttgtaaagctcttttagcaaggaagataatgacgttacttgcagaaaaagccccggctaactccgtgccagcagccgcggtaagacggagggggctagcgttgttcggaattactgggcgtaaagagtgcgtaggcggtttagtaagttggaagtgaaagcccggggcttaacctcggaattgctttcaaaactactaatctagagtgtagtaggggatgatggaattcctagtgtagaggtgaaattcttagatattaggaggaacaccggtggcgaaggcggtcatctgggctaccactgacgctgatgcacgaaagcgtggggagcaaacaggattagataccctggtagtccacgccgtaaacgatgagtgctagatatcggaagattctctttcggtttcgcagctaacgcattaagcactccgcctggggagtacggtcgcaagattaaaactcaaaggaattgacgggggctcgcacaagcggtggagcatgcggtttaattcgatgttacgcgaaaaaccttaccaacccttgacatggtggttgcggatcgcagagatgcttttcttcagctcggctggaccacacacaggtgttgcatggctgtcgtcagctcgtgtcgtgagatgttgggttaagtcccgcaacgagcgcaaccctcattcttatttgccagcgggtaatgccgggaactataagaaaactgccggtgataagccggaggaaggtggggacgacgtcaagtcatcatggcccttacgggttgggctacacgcgtgctacaatggtgtttacagagggaagcaagacggcgacgtggagcaaatccctaaaagacatctcagttcggattgttctctgcaactcgagagcatgaagttggaatcgctagtaatcgcggatcagcatgccgcggtgaatacgttctcgggccttgtacacactgcccgtcacgccatgggagttagttttacctgaaggtggtgagctaacgcaagaggcagccaaccacggtaaaattagcgactggggtgaagtcgtaacaaggtagccgtaggggaacctgcggctggattacctcctta

SEQ ID NO: 1631 - DNA, 1432 bp, Rickettsia slovaca
agaacgaacgctatcggtatgcttaacacatgcaagtcgaacggactaattggggcttgctccaattagttagtggcagacgggtgagtaacacgtgggaatctacccatcagtacggaataacttttagaaataaaagctaataccgtatattctctgcggaggaaagatttatcgctgatggatgagcccgcgtcagattaggtagttggtgaggtaatggctcaccaagccgacgatctgtagctggtctgagaggatgatcagccacactgggactgagacacggcccagactcctacgggaggcagcagtggggaatattggacaatgggcgaaagcctgatccagcaataccgagtgagtgatgaaggccttagggttgtaaagctcttttagcaaggaagataatgacgttacttgcagaaaaagccccggctaactccgtgccagcagccgcggtaagacggagggggctagcgttgttcggaattactgggcgtaaagagtgcgtaggcggtttagtaagttggaagtgaaagcccggggcttaacctcggaattgctttcaaaactactaatctagagtgtagtaggggatgatggaattcctagtgtagaggtgaaattcttagatattaggaggaacaccggtggcgaaggcggtcatctgggctacaactgacgctgatgcacgaaagcgtggggagcaaacaggattagataccctggtagtccacgccgtaaacgatgagtgctagatatcggaagattctctttcggtttcgtagctaacgcattaagcactccgcctggggagtacggtcgcaagattaaaactcaaaggaattgacgggggctcgcacaagcggtggagcatgcggtttaattcgatgttacgcgaaaaaccttaccaacccttgacatggtggtcgcggatcgcagagatgcttttcttcagctcggctggaccacacacaggtgttgcatggctgtcgtcagctcgtgtcgtgagatgttgggttaagtcccgcaacgagcgcaaccctcattcttatttgccagcgggtaatgccgggaactataagaaaactgccggtgataagccggaggaaggtggggacgacgtcaagtcatcatggcccttacgggttgggctacacgcgtgctacaatggtgtttacagagggaagcaagacggcgacgtggagcaaatccctaaaagacatctcagttcggattgttctctgcaactcgagagcatgaagttggaatcgctagtaatcgcggatcagcatgccgcggtgaatacgttctcgggccttgtacacactgcccgtcacgccatgggagttagttttacctgaaggtggtgagctaacgcaagaggcagccaaccacggtaaaattagcgactggggtgaagtcgtaa

SEQ ID NO: 1632 - DNA, 1501 bp, Rickettsia typhi
tcaaacttgagagtttgatcctggctcagaacgaacgctatcggtatgcttaacacatgcaagtcgaacggattaattagagcttgctctagttaattagtggcagacgggtgagtaacacgtgggaatctacccatcagtacggaataacttttagaaataaaagctaataccgtatattctctacggaggaaagatttatcgctgatggatgggcccgcgtcagattaggtagttggtgtggtaatggctcaccaagccgacgatctgtagctggtctgagaggatgatcagccacactgggactgagacacggcccagactcctacgggaggcagcagtggggaatattggacaatgggcgaaagcctgatccagcaataccgagtgagtgatgaaggccttagggttgtaaagctcttttagcaaggaagataatgacgttacttgcagaaaaagccccggctaactccgtgccagcagccgcggtaagacggagggggctagcgttgttcggaattactgggcgtaaagagtgcgtaggtggtttagtaagttggaagtgaaagcccggggcttaacctcggaattgctttcaaaactactaatctagagtgtagtaggggatgatggaattcctagtgtagaggtgaaattcttagatattaggaggaacaccggtggcgaaggcggtcatctgggctacaactgacgctgatgcacgaaagcgtggggagcaaacaggattagataccctggtagtccacgccgtaaacgatgagtgctagatatcggaggattctctttcggtttcgcagctaacgcattaagcactccgcctggggagtacggtcgcaagattaaaactcaaaggaattgacgggggctcgcacaagcggtggagcatgcggtttaattcgatgttacgcgaaaaaccttaccaacccttgacatggtggttatggattgcagagatgctttccttcagttcggctgggccacacacaggtgttgcatggctgtcgtcagctcgtgtcgtgagatgttgggttaagtcccgcaacgagcgcaacccttattcttatttgccagcgggtaatgccgggaactataagaaaactgccggtgataagccggaggaaggtggggacgacgtcaagtcatcatggcccttacgggttgggctacacgcgtgctacaatggtgtttacagagggaagcaagacggtgacgtggagcaaatccctaaaagacatctcagttcggattgttctctgcaactcgagagcatgaagttggaatcgctagtaatcgcggatcagcatgccgcggtgaatacgttctcgggccttgtacacactgcccgtcacgccatgggagttggttttacctgaaggtggtgagctaacgcaagaggcagccaaccacggtaaaattagcgactggggtgaagtcgtaacaaggtagccgtaggggaacctgcggctggattacctcctta

SEQ ID NO: 1633 - DNA, 1526 bp, Robinsoniella peoriensis
gagagtttgattctggctcaggatgaacgctggcggcgtgcttaacacatgcaagtcgagcgaagcattaaaacagatttcttcggaawgaagttttratgactgagcggcggacgggtgagtaacgcgtgggtgaccygcctcatacagggggataacagacagaaatgtctgctaataccgcataagcgcacagtgctgcatggcacagtgtgaaaaactccggtggtatgagatggacccgcgtctgattagctagttggtaaggtaacggcttaccaaggcgacgatcagtagccggcctgagagggtgaacggccacattgggactgagacacggcccaaactcctacgggaggcagcagtggggaatattgcacaatgggggaaaccctgatgcagcgacgccgcgtgaaggaagaagtatttcggtatgtaaacttctatcagcagggaagaaaatgacggtacctgactaagaagccccggctaactacgtgccagcagccgcggtaatacgtagggggcaagcgttatccggatttactgggtgtaaagggagcgtagacggcatggcaagtctggtgtgaaaggcaggggctcaacccctggactgcattggaaactgtcaggctggagtgcaggagaggtaagtggaattcctagtgtagcggtgaaatgcgtagatattaggaggaacaccagtggcgaaggcgacttactggactgtaactgacgttgaggctcgaaagcgtggggagcaaacaggattagataccctggtagtccacgccgtaaacgatgaatactaggtgtcagggagcaaagctctttggtgccgcagctaacgcaataagtattccacctggggagtacgttcgcaagaatgaaactcaaaggaattgacggggacccgcacaagcggtggagcatgtggtttaattcgaagcaacgcgaagaaccttaccaagtcttgacatcctcttgaccggacagtaacgtgtcctttccttcgggacaagagtgacaggtggtgcatggttgtcgtcagctcgtgtcgtgagatgttgggttaagtcccgcaacgagcgcaacccttatcttcagtagccagcaattcggttgggcactctggagagactgccagggataacctggaggaaggtggggatgacgtcaaatcatcatgccccttatgatttgggctacacacgtgctacaatggcgtaaacaaagggaagcagccctgtgaaggtgagcaaatcccaaaaataacgtctcagttcggattgtagtctgcaactcgactacatgaagctggaatcgctagtaatcgcgaatcagaatgtcgcggatsaatacgttcccgggtcttgtacacaccgcccgtcacaccatgggagtcggaaatgcccgaagtcagtgacccaaccgtaaggagggagctgccgaaggtggagccggtaactggggtgaagtcgtaacaaggtagccgtatcggaaggtgcggctggatcacctccttc

SEQ ID NO: 1634 - DNA, 1371 bp, Roseburia cecicola
ggatgaacgctggcggcgtgcttaacacatgcaagtcgaacgaagcactctatttgattttcttcggaaatgaagattttgtgactgagtggcggacgggtgagtaacgcgtgggtaacctgctcatacagggggataacagttggaaacgactgctaataccgcataagcgcacagtactgcatggtaccgtgtgaaaaactccggtggtatgagatggacccgcgtctgattagccagttggcggggtacggcccaccaaagcgacgatcagtagccgacctgagagggtgaccggccacattgggactgagacacggcccaaactcctacgggaggcagcagtggggaatattgcacaatgggggaaaccctgagcagcgacgccgcgtgagcgaagaagtatttcggtatgtaaagctctatcagcagggaagaaaaaatgacggtacctgactaagaagcaccggctaaatacgtgccagcagccgcggtaatacgtatgtgcaagcgttatccggatttactgggtgtaaagggagcgcaggcggtgcggcaagtctgatgtgaaagcccggggctcaaccccggtactgcattggaaactgtcgtactagagtgtcggaggggtagtggaattcctagtgtagcggtgaaatgcgtagatattaggaggaacaccagtggcgaaggcggcttactggacgattactgacgctgaggctcgaaagcgtggggagcaaacaggattagatacctggtagtccacgccgtaaacgatgaatactaggtgtcggggagcattgctcttcggtgccgcagcaaacgcaataagtattccacctggggagtacgttcgcaagaatgaaactcaaaggaattgacgggacccgcacaagcggtggagcatgtggtttaattcgaagcaacgcgaagaaccttaccaagtcttgacatccttctgacaatgtatgtaatgtatattctcttcggagcagaagtgacaggtggtcatggttgtcgtcagctcgtgtcgtgagatgttgggttaagtcccgcaacgagcgcaacccttattcttagtagccagcggttcgagactgccagggataacctggaggaaggtggggatgacgtcaatcatcatgccccttatgacctacaatggcgtaaacaaagggaagcaagaccgtgaggtggagcaaatcccaaaaataacgtctctgcaactcgactacacgaagctggaatcgctagtaatcgcgatcagaatgtcgcggtgaataacacaccgcccgtcacaccatgggagttggtaatgcccgaagtcagtgacccaaccgcaaggagaggatcgataactggggtgaa

SEQ ID NO: 1635 - DNA, 1361 bp, Roseburia faecalis
tatttgattttcttcggaaatgaagattttgtgactgagtggcggacgggtgagtaacgcgtgggtaacctgcctcatacagggggataacagttggaaacgactgctaataccgcataagcgcacaggatcgcatgatctggtgtgaaaaactccggtggtatgagatggacccgcgtctgattagccagttggcagggtaacggcctaccaaagcgacgatcagtagccgacctgagagggtgaccggccacattgggactgagacacggcccaaactcctacgggaggcagcagtggggaatattgcacaatgggggaaaccctgatgcagcgacgccgcgtgagcgaagaagtatttcggtatgtaaagctctatcagcagggaagaagaatgacggtacctgactaagaagcaccggctaaatacgtgccagcagccgcggtaatacgtatggtgcaagcgttatccggatttactgggtgtaaagggagcgcaggcggtgcggcaagtctgatgtgaaagcccggggctcaaccccggtactgcattggaaactgtcgtactagagtgtcgaggggtaagtggaattcctagtgtacggtgaaatgcgtagatattaggaggaacaccagtggcgaagcggcttactggacgataactgacgctgaggctcgaaagcgtggggagcaaacaggattagataccctggtagtccacgccgtaaacgatgaatactagtgtcggggagcattgctcttcggtgccgcacaaacgcaataagtattccacctggggagtacgttcgcaagaatgaaactcaaggaattgacggggacccgcacaagcggtggagcatgtgggttaattcgaagcaacgcgaagaaccttaccaagtcttgacatcccgatgacaaagtatgtaatgtactttctcttcggagcatcggtgacaggtggtgcatggttgtcgtcagctcgtgtcgtgagatgttgggttaagtcccgcaacgagcgcaacccctgttcttagtagccagcggttcggccgggcactctagggagactgccagggataacctggaggaaggcggggatgacgtcaaatcatcatgccccttatgacttgggctacacacgtgctacaatggcgtaaacaaagggaagcggagccgtgaggccgagcaaatctcaaaaataacgtctcagttcggactgtagtctgcaacccgactacacgaagctggaatcgctagtaatcgcagatcagaatgctgcggtgaatacgttcccgggtcttgtacacaccgcccgtcacaccatgggagttggaaatgcccgaagtcagtgacccaaccgc

SEQ ID NO: 1636 - DNA, 1297 bp, Roseburia faecis
gatgaacgctggcggcgtgcttaacacatgcaagtcgaacgagtggcggacgggtgagtaacgcgtgggtaacctgcctcatacagggggataacagttggaaacgactgctaataccgcataagaaaaagtggtatgagatggacccgcgtctgattagccagttggcagggtaacggcctaccaaagcgacgatcagtagccgacctgagagggtgaccggccacattgggactgagacacggcccaaactcctacgggaggcagcagtggggaatattgcacaatgggggaaaccctgatgcagcgacgccgcgtgagcgaagaagtatttcggtatgtaaagctctatcagcagggaagatgacggtacctgactaagaagcaccggctaaatacgtgccagcagccgcggtaatacgtatggtgcaagcgttatccggatttactgggtgtaaagggagcgcaggcggtgcggcaagtctgatgtgaaagcccggggctcaaccccggtactgcattggaaactgtcgtactagagtgtcggaggggtaagtggaattcctagtgtagcggtgaaatgcgtagatattaggaggaacaccagtggcgaaggcggcttactggacgaactgacgctgaggctcgaaagcgtggggagcaaacaggattagataccctggtagtccacgccgtaaacgatgaatactaggtgtcggggcttcggtgccgcagcaaacgcaataagtattccacctggggagtacgttcgcaagaatgaaactcaaaggaattgacggggacccgcacaagcggtggagcatgtggtttaattcgaagcaacgcgaagaaccttaccaagtcttgacatcgacaggtggtgcatggttgtcgtcagctcgtgtcgtgagatgttgggttaagtcccgcaacgagcgcaacccctgtccttagtagccagcggccgggcactctagggagactgccagggataacctggaggaaggcggggatgacgtcaaatcatcatgccccttatgacttgggctacacacgtgctacaatggcgtacaaagggaagcggagccgtgaggccgagcaaatctcaaaacgtctcagttcggatgtagtctgcaacccgactacagaagctggaatcgctagtaatcgcagatcagaatgctgcggtgaatacgttcccgggtcttgtacacaccgcccgtcacaccatgggagttggaaatgcccgaagtcagtacccagggagctgccgaaggcaggttcgataactggggtg

SEQ ID NO: 1637 - DNA, 1376 bp, Roseburia hominis
  modified_base (14)..(14): a, c, t, g, unknown or other
  modified_base (45)..(47): a, c, t, g, unknown or other
acgaagcactttanttgatttcttcggaatgaagtttttgtgacnnnagtggcggacgggtgagtaacgcgtgggtaacctgcctcatacagggggataacagttggaaacgactgctaataccgcataagcgcacaggattgcatgatccagtgtgaaaaactccggtggtatgagatggacccgcgtctgattagccagttggcggggtaacggcccaccaaagcgacgatcagtagccgacctgagagggtgaccggccacattgggactgagacacggcccaaactcctacgggaggcagcagtggggaatattgcacaatgggggaaaccctgatgcagcgacgccgcgtgagcgaagaagtatttcggtatgtaaagctctatcagcagggaagaagaatgacggtacctgactaagaagcaccggctaaatacgtgccagcagccgcggtaatacgtatggtgcaagcgttatccggatttactgggtgtaaagggagcgcaggcggtacggcaagtctgatgtgaaatcccggggctcaaccccggtactgcattggaaactgtcggactagagtgtcggaggggtaagtggaattcctagtgtagcggtgaaatgcgtagatattaggaggaacaccagtggcgaaggcggcttactggacgattactgacgctgaggctcgaaagcgtggggagcaaacaggattagataccctggtagtccacgccgtaaacgatgaatactaggtgtcggggagcattgctcttcggtgccgcagcaaacgcaataagtattccacctggggagtacgttcgcaagaatgaaactcaaaggaattgacggggacccgcacaagcggtggagcatgtggtttaattcgaagcaacgcgaagaaccttaccaagtcttgacatcccactgacagagtatgtaatgtactttctcttcggaacagtggtgacagatggtgcatgggggtcgtcagctcgtgtcgtgagatgttgggttaagtcccgcaacgagcgcaacccctattcttagtagccagcggtttggccgggcactctagggagactgccagggataacctggaggaaggtggggatgacgtcaaatcatcatgccccttatgacttgggctacacacgtgctacaatggcgtaaacaaagggaagcaatcccgcgagggggagcaaatctcaaaaataacgtctcagttcggactgtagtctgcaactcgactacacgaagctggaatcgctagtaatcgcgaatcagaatgtcgcggtgaatacgttcccgggtcttgtacacaccgcccgtcacaccatgggagttggtaatgcccgaagtcagtgacccaaccg

SEQ ID NO: 1638 - DNA, 1390 bp, Roseburia intestinalis
tcgaacgaagcactttatttgatttcttcggaatgaagattttgtgactgagtggcggacgggtgagtaacgcgtgggtaacctgcctcatacagggggataacagttggaaacgactgctaataccgcataagcgcacagggtcgcatgacctggtgtgaaaaactccggtggtatgagatggacccgcgtctgattagccagttggtggggtaacggcctaccaaagcgacgatcagtagccgacctgagagggtgaccggccacattgggactgagacacggcccaaactcctacgggaggcagcagtggggaatattgcacaatgggggaaaccctgatgcagcgacgccgcgtgagcgaagaagtatttcggtatgtaaagctctatcagcagggaagaagaaatgacggtacctgactaagaagcaccggcaaatactgccagcagccgcggtaatacgtatggtgcaagcgttatccggatttactgggtgtaaagggagcgcaggcggtacggcaagtctgatgtgaaagcccggggctcaaccccggtactgcattggaaactgtcggactagagtgtcggaggggtaagtggaattcctagtgtagcggtgaaatgcgtagatattaggaggaacaccagtggcgaaggcggcttactggacgattactgacgctgagctcgaaagcgtggggagcaaacaggattagataccctggtagtccacgccgtaaacgatgaatactaggtgtcggggagcattgctcttcggtgccgcagcaaacgcaataagtattccacctggggagtacgttcgcaagaatgaaactcaaaggaattgacggggacccgcacaagcggtggaccatgtggtttaattcgaagcaacgcgaagaaccttaccaagtcttgacatcccgatgacagaacatgtaatgtgttttctcttcgaagcatcggtgacagagggtcggaggggtaagtgagctcgtgtcgtgagatgttgggttaagtcccgcaacgagcgcaacccctattcttagtagccagcggttaagccgggcactctagggagactgccagggataacctggaggaaggtggggatgacgtcaaatcatcatgccccttatgacttgggctacacacgtgctacaatggcgtaaacaaagggaagcgagcctgcgagggggagcaaatctcaaaaataacgtctcagttcggactgcagtctgcaactcgactgcacgaagctggaatcgctagtaatcgcgaatcagaatgtcgcggtgaatacgttcccgggtcttgtacacaccgcccgtcacaccatgggagttggtaatgcccgaagtcagtgacccaaccgcaaggagggagct

SEQ ID NO: 1639 - DNA, 1374 bp, Roseburia inulinivorans
  modified_base (19)..(19): a, c, t, g, unknown or other
  modified_base (51)..(51): a, c, t, g, unknown or other
  modified_base (951)..(951): a, c, t, g, unknown or other
gaacgaagcacttttacangatttcttcggaatgaagttttagtgactgantggcggacgggtgagtaacgcgtgggtaacctgcctcacacagggggataacagttggaaacggctgctaataccgcataagcgcacagtaccgcatggtacagtgtgaaaaactccggtggtgtgagatggacccgcgtctgattagctagttggcagggcaacggcctaccaaggcgacgatcagtagccgacctgagagggtgaccggccacattgggactgagacacggcccaaactcctacgggaggcagcagtggggaatattgcacaatgggggaaaccctgatgcagcgacgccgcgtgagcgaagaagtatttcggtatgtaaagctctatcagcagggaaaagaaatgacggtacctgctaaacaccggctaaatacgtgccagcagccgcggtaatacgtatggtgcaagcgttatccggatttactgggtgtaaagggagcgcaggcggaaggctaagtctgatgtgaaagcccggggctcaaccccggtactgcattggaaactggtcatctagagtgtcggaggggtaagtggaattcctagtgtagcggtgaaatgcgtagatattaggaggaacaccagtggcgaaggcggcttactggacgataactgacgctgaggctcgaaagcgtggggagcaaacaggattagataccctggtagtccacgccgtaaacgatgaatactaggtgtcggaaagcacagcttttcggtgccgccgcaaacgcattaagtattccacctggggagtacgttcgcaagaatgaaactcaaaggaattgacggggacccgcacaagcggtggagcatgtggtttaattggtataaagggagagcagcctgacgactaattctgatcttaaagcccggggctaatctgtggtttncttcgggacagaagtgacaggtggtgcatggttgtcgtcagctcgtgtcgtgagatgttgggttaagtcccgcaacgagcgcaacccttatccccagtagccagcggttcggccgggcactctgaggagactgccagggataacctggaggaaggtggggatgacgtcaaatcatcatgccccttatgacttgggctacacacgtgctacaatggcgtaaacaaagggaagcgagaccgtgaggtggagcaaatcccaaaaataacgtctcagttcggactgtagtctgcaacccgactacacgaagctggaatcgctagtaatcgcagatcagaatgctgcggtgaatacgttcccgggtcttgtacacaccgcccgtcacaccatgggagttggaaatgcccgaagtcagtgacccaaccg

SEQ ID NO: 1640 - DNA, 1235 bp, Roseburia sp.
  11SE37
tggcggcgtgcttaacacatgcaagtcgaacgagtggcggacgggtgagtaacgcgtgggtaacctgcctcatacagggggataacagttggaaacgactgctaataccgcataagaaaaagtggtatgagatggacccgcgtctgattagccagttggcagggtaacggcctaccaaagcgacgatcagtagccaacctgagagggtgaccggccacattgggactgagacacggcccaaactcctacgggaggcagcagtggggaatattgcacaatgggggaaaccctgatgcagcgacgccgcgtgagcgaagaagtatttcggtatgtaaagctctatcagcagggaagatgacggtacctgactaagaagcaccggctaaatacgtgccagcagccgcggtaatacgtatggtgcaagcgttatccggatttactgggtgtaaagggagcgcaggcggtgcggcaagtctgatgtgaaagcccggggctcaaccccggtactgcattggaaactgtcgtactagagtgtcggaggggtaagtggaattcctagtgtagcggtgaaatgcgtagatattaggaggaacaccagtggcgaaggcggcttactggacgaactgacgctgaggctcgaaagcgtggggagcaaacaggattagataccctggtagtccacgccgtaaacgatgaatactaggtgtcggggcttcggtgccgcagcaaacgcaataagtattccacctggggagtacgttcgcaagaatgaaactcaaaggaattgacggggacccgcacaagcggtggagcatgtggtttaattcgaagcaacgcgaagaaccttaccaagtcttgacatcgacaggtggtgcatggttgtcgtcagctcgtgtcgtgagatgttgggttaagtcccgcaacgagcgcaacccctgttcttagtagccagcggccgggcactctagggagactgccagggataacctggaggaaggcggggatgacgtcaaatcatcatgccccttatgacttgggctacacacgtgctacaatggcgtacaaagggaagcaaagccgtgaggccgagcaaatctcaaaacgtctcagttcggatgtagtctgcaacccgactacagaagctggaatcgctagtaatcgcagatcagaatgctgcggtgaatacgttcccgggtcttgtacacaccgcccgtcacaccatgggagttggaaat

SEQ ID NO: 1641 - DNA, 1231 bp, Roseburia sp.
  11SE38
tggcggcgtgcttaacacatgcaagtcgaacgagtggcggacgggtgagtaacgcgtgggtaacctgcctcatacagggggataacagttggaaacgactgctaataccgcataagaaaaagtggtatgagatggacccgcgtctgattagccagttggcagggtaacggcctaccaaagcgacgatcagtagccaacctgagagggtgaccggccacattgggactgagacacggcccaaactcctacgggaggcagcagtggggaatattgcacaatgggggaaaccctgatgcagcgacgccgcgtgagcgaagaagtatttcggtatgtaaagctctatcagcagggaagatgacggtacctgactaagaagcaccggctaaatacgtgccagcagccgcggtaatacgtatggtgcaagcgttatccggatttactgggtgtaaagggagcgcaggcggtgcggcaagtctgatgtgaaagcccggggctcaaccccggtactgcattggaaactgtcgtactagagtgtcggaggggtaagtggaattcctagtgtagcggtgaaatgcgtagatattaggaggaacaccagtggcgaaggcggcttactggacgaactgacgctgaggctcgaaagcgtggggagcaaacaggattagataccctggtagtccacgccgtaaacgatgaatactaggtgtcggggcttcggtgccgcagcaaacgcaataagtattccacctggggagtacgttcgcaagaatgaaactcaaaggaattgacggggacccgcacaagcggtggagcatgtggtttaattcgaagcaacgcgaagaaccttaccaagtcttgacatcgacaggtggtgcatggttgtcgtcagctcgtgtcgtgagatgttgggttaagtcccgcaacgagcgcaacccctgttcttagtagccagcggccgggcactctagggagactgccagggataacctggaggaaggcggggatgacgtcaaatcatcatgccccttatgacttgggctacacacgtgctacaatggcgtacaaagggaagcaaagccgtgaggccgagcaaatctcaaaacgtctcagttcggatgtagtctgcaacccgactacagaagctggaatcgctagtaatcgcagatcagaatgctgcggtgaatacgttcccgggtcttgtacacaccgcccgtcacaccatgggagttgg

SEQ ID NO: 1642 - DNA, 1469 bp, Roseiflexus castenholzii
agagtttgatcctggctcaggacgaacgctggcggcgtgcctaatgcatgcaagtcgaacgcacgcgcttcggcgcgtgagtggcgcacggctgagtaacacgtgggaacccgccctccggtgggggataacgagacgaaagtcgcgctaatcccgcatacgtccgcaaggggaaagcgcttcggcgcgccggaggaggggcctgcggcccatcaggtggttggtggggtaacggcctaccaagccgatgacgggtagctggtctgggaggatgaccagccagactgggactgagacacggcccagactcctacgggaggcagcagcaaggaattttcggcaatgggcgcaagcctgaccgagcaacgccgcgtgcgggatgacggccttcgggttgtaaaccgcttttcggggggacgactacgacggtacccccggaagaagccccggctaactctgtgccagcagccgcggtaagacagagggggcgagcgttgtccggagttactgggcgtaaagcgcgcgcaggcggtggtctcagtgtcgtgtgaaagcccccggctcaaccgggggaggtcatggcaaactagacgactagagcggcggagaggcccctcgaattgccggtgtagcggtgaaatgcgtagagatcggcaggaagaccaagggggaagccagggggctggccgctggctgacgctgaggcgcgacagcgtggggagcaaaccggattagatacccgggtagtccacgccgtaaacgatgaccactcggcgtgtggcgactattgacgtcgcggcgcgcctaagcttacgcgtgaagtggtccgcctgggaactacgagcgcaagcttaaaactcaaaggaattgacgggggcccgcacaagcagcggagcgtgtggtttaattcgaggcaacccgaagaaccttacccaggctggacatgacggtgcaggcggcggaaacgtcgcggccttcgagggaccgtcacaggtgctgcatggctgtcgtcagctcgtgtcgtgagatgttgggttaagtcccgcaacgagcgcaacccctgcggttagttaccggtgtctaaccggactgcccttcggggaggaaggcggggatgacgtcaagtccgcatggccctgacgcctggggcgacacacacgctacaatggcgccgacaatgcgtggcgaccgcgcgagcggaggcaaatcgccaaacggcgtctcagtgcagatcgggggctgcaactcgcccccgtgaaggcggagttgctagtaaccgcgtatcagccatggcgcggtgaatacgtacccgggccttgtacacaccgcccgtcacgtcatgggagttgtcaatgcctgaagtccgtgcgctaaccgtcaggaggcagcggccgagggcaggggcagcgactgggacgaagtcgtaacaaggtagccgtaccggaaggtgcggctggatcacctccttt

SEQ ID NO: 1643 - DNA, 1312 bp, Roseomonas cervicalis
aagcagcgatgcgcctttggagtaacctgcgtccgattagctagttggtggggtaaaggcctaccaaggcgacgatcggtagctggtctgagaggacgaccagccacactgggactgagacacggcccagactcctacgggaggcagcagtggggaatattggacaatgggcgcaagcctgatccagcaatgccgcgtgggtgaagaaggtcttcggatcgtaaagccctttcggcggggacgatgatgacggtacccgcagaagaagccccggctaacttcgtgccagcagccgcggtaatacgaagggggctagcgttactcggaattactgggcgtaaagggcgcgtaggcggcgctccaagttaggcgtgaaagccctgggctcaacctggggactgcgcttaagactggagtgctagaggatggaagagggttgtggaattcccagtgtagaggtgaaattcgtagatattgggaagaacaccggtggcgaaggcggcaacctggtccatttctgacgctgaggcgcgatagcgtggggagcaaacaggattagataccctggtagtccacgccgtaaacgatgtgcgctgaatgttggggttcctagaacctcagtgttgtagctaacgcggtaagcgcaccgcctggggagtacggccgcaaggttgaaactcaaaggaattgacgggggcccgcacaagcggtggagcatgtggtttaattcgaagcaacgcgcagaaccttaccagcccttgacatggccacgaccggttcagagatgaacttttcccgcaagggacgtggtgcacaggtgctgcatggctgtcgtcagctcgtgtcgtgagatgttgggttaagtcccgcaacgagcgcaaccctcgcctttagttgccagcacgtttgggtgggcactctagaggaactgccggtgacaagccggaggaaggtggggatgacgtcaagtcctcatggcccttatgggctgggctacacacgtgctacaatggcggtgacaatgggaagccaggcagcgatgtcgagccgatcccaaaaagccgtctcagttcagatcgcagcctgcaactcggctgcgtgaaggtggaatcgctagtaatcgcggatcagcacgccgcggtgaatacgttcccgggccttgtacacaccgcccgtcacaccatgggagttggttctaccttaagcaggtgcggtaaccgcaaggagctagcctgccacggtagggtcagtgactggggtgaagtcgtaacaaggtagccgtaggggaacctgcggctggatcacctccttt

SEQ ID NO: 1644 - DNA, 1482 bp, Roseomonas mucosa
ttagtttgatcctggctcagagcgaacgctggcggcatgcttaacacatgcaagtcgcacgggcagcaatgtcagtggcggacgggtgagtaacgcgtaggaacgtgtcctgaggtgggggacaaccccgggaaactggggctaataccgcatatgggctgaggcccaaagccgagaggcgcctttggagcggcctgcgtccgattaggtagttggtggggtaaaggcctaccaagcctgcgatcggtagctggtctgagaggacgaccagccacactgggactgagacacggcccagactcctacgggaggcagcagtggggaatattggacaatgggcgaaagcctgatccagcaatgccgcgtgggtgaagaaggtcttcggatcgtaaagccctttcgacggggacgatgatgacggtacccgtagaagaagccccggctaacttcgtgccagcagccgcggtaatacgaagggggctagcgttgctcggaattactgggcgtaaagggcgcgtaggcggcggcccaagtcaggcgtgaaattcctgggctcaacctggggactgcgcttgatactgggttgcttgaggatggaagaggctcgtggaattcccagtgtagaggtgaaattcgtagatattgggaagaacaccggtggcgaaggcggcgagctggtccattactgacgctgaggcgcgacagcgtggggagcaaacaggattagataccctggtagtccacgccgtaaacgatgtgcgctggatgttggggcccatagggtctcagtgtcgtagccaacgcggtaagcgcaccgcctggggagtacggccgcaaggttgaaactcaaaggaattgacgggggcccgcacaagcggtggagcatgtggtttaattcgaagcaacgcgcagaaccttaccagcccttgacatggtcacgaccggtccagagatggactttcctagcaataggcgtgatgcacaggtgctgcatggctgtcgtcagctcgtgtcgtgagatgttgggttaagtcccgcaacgagcgcaaccctcgcctctagttgccagcatgttcgggtgggcactctagaggaactgccggtgacaagccggaggaaggtggggatgacgtcaagtcctcatggcccttatgggctgggctacacacgtgctacaatggcggtgacagagggaagccaggtcgcgaggccgagccgatcccgaaaagccgtctcagttcggattgcactctgcaactcgggtgcatgaaggtggaatcgctagtaatcgcggatcagcacgccgcggtgaatacgttcccgggccttgtacacaccgcccgtcacaccatgggagttggttctaccttaagtcgttgcgctaaccagcgatgggggcaggcgaccacggtagggtcagcgactggggtgaagtcgtaacaaggtagccgtaggggaacctgcggttggatcacctcctaa

SEQ ID NO: 1645 - DNA, 1295 bp, Roseomonas sp.
  NML94-0193
acgctggcggcatgcttaacacatgcaagtcgcacgagtggcggacgggtgagtaacgcgtaggaacgtgtccagaggtgggggacaaccccgggaaactggggctaataccgcatgggcaaaggcgccattggagcggcctgcgtccgattaggtagttggtggggtaaaggcctaccaagcctgcgatcggtagctggtctgagaggacgaccagccacactgggactgagacacggcccagactcctacgggaggcagcagtggggaatattggacaatgggcgaaagcctgatccagcaatgccgcgtgggtgaagaaggtcttcggatcgtaaagccctttcgacggggacgatgacggtacccgtagaagaagccccggctaacttcgtgccagcagccgcggtaatacgaagggggctagcgttgctcggaattactgggcgtaaagggcgcgtaggcggcggcccaagtcaggcgtgaaattcctgggctcaacctggggactgcgcttgatactgggttgcttgaggatggaagaggctcgtggaattcccagtgtagaggtgaaattcgtagatattgggaagaacaccggtggcgaaggcggcgagctggtccaactgacgctgaggcgcgacagcgtggggagcaaacaggattagataccctggtagtccacgccgtaaacgatgtgcgctggatgttggggtctcagtgtcgtagccaacgcggtaagcgcaccgcctggggagtacggccgcaaggttgaaactcaaaggaattgacgggggcccgcacaagcggtggagcatgtggtttaattcgaagcaacgcgcagaaccttaccagcccttgacatgcacaggtgctgcatggctgtcgtcagctcgtgtcgtgagatgttgggttaagtcccgcaacgagcgcaaccctcgcctctagttgccagcatgtgggcactctagaggaactgccggtgacaagccggaggaaggtggggatgacgtcaagtcctcatggcccttatgggctgggctacacacgtgctacaatggcggtcagagggaagccaggtcgcgaggccgagccgatcccggccgtctcagttcggatgcactctgcaactcgggtgcagaaggtggaatcgctagtaatcgcggatcagcacgccgcggtgaatacgttcccgggccttgtacacaccgcccgtcacaccatgggagttggttctaccttaagtcgttcgctaggcaggcgaccacggtagggtcagcgactggggtgaagtc

SEQ ID NO: 1646 - DNA, 1319 bp, Roseomonas sp.
  NML97-0121
agcgaacgctggcggcatgcttaacacatgcaagtcgcacgagtggcggacgggtgagtaacgcgtaggaacgtgtccagaggtgggggacaaccccgggaaactggggctaataccgcatatgcaaaggcgcctttggagcggcctgcgtccgattaggtagttggtggggtaaaggcctaccaagcctgcgatcggtagctggtctgagaggacgaccagccacactgggactgagacacggcccagactcctacgggaggcagcagtggggaatattggacaatgggcgaaagcctgatccagcaatgccgcgtgggtgaagaaggtcttcggatcgtaaagccctttcgacggggacgatgacggtacccgtagaagaagccccggctaacttcgtgccagcagccgcggtaatacgaagggggctagcgttgctcggaattactgggcgtaaagggcgcgtaggcggcggcccaagtcaggcgtgaaattcctgggctcaacctggggactgcgcttgatactgggttgcttgaggatggaagaggctcgtggaattcccagtgtagaggtgaaattcgtagatattgggaagaacaccggtggcgaaggcggcgagctggtccaactgacgctgaggcgcgacagcgtggggagcaaacaggattagataccctggtagtccacgccgtaaacgatgtgcgctggatgttggggtctcagtgtcgtagccaacgcggtaagcgcaccgcctggggagtacggccgcaaggttgaaactcaaaggaattgacgggggcccgcacaagcggtggagcatgtggtttaattcgaagcaacgcgcagaaccttaccagcccttgacatgcacaggtgctgcatggctgtcgtcagctcgtgtcgtgagatgttgggttaagtcccgcaacgagcgcaaccctcgcctctagttgccagcatgtgggcactctagaggaactgccggtgacaagccggaggaaggtggggatgacgtcaagtcctcatggcccttatgggctgggctacacacgtgctacaatggcggtcagagggaagccaggtcgcgaggccgagccgatcccggccgtctcagttcggatgcactctgcaactcgggtgcagaaggtggaatcgctagtaatcgcggatcagcacgccgcggtgaatacgttcccgggccttgtacacaccgcccgtcacaccatgggagttggttctaccttaagtcgttcgctaggcaggcgaccacggtagggtcagcgactggggtgaagtcgtaacaaggtagccgtagg

SEQ ID NO: 1647 - DNA, 1314 bp, Roseomonas sp.
  NML98-0009
acgctggcggcatgcttaacacatgcaagtcgcacgagtggcggacgggtgagtaacgcgtaggaacgtgtccagaggtgggggacaaccccgggaaactggggctaataccgcatatgcaaaggcgcctttggagcggcctgcgtccgattaggtagttggtggggtaaaggcctaccaagcctgcgatcggtagctggtctgagaggacgaccagccacactgggactgagacacggcccagactcctacgggaggcagcagtggggaatattggacaatgggcgaaagcctgatccagcaatgccgcgtgggtgaagaaggtcttcggatcgtaaagccctttcgacggggacgatgacggtacccgtagaagaagccccggctaacttcgtgccagcagccgcggtaatacgaagggggctagcgttgctcggaattactgggcgtaaagggcgcgtaggcggcggcccaagtcaggcgtgaaattcctgggctcaacctggggactgcgcttgatactgggttgcttgaggatggaagaggctcgtggaattcccagtgtagaggtgaaattcgtagatattgggaagaacaccggtggcgaaggcggcgagctggtccaactgacgctgaggcgcgacagcgtggggagcaaacaggattagataccctggtagtccacgccgtaaacgatgtgcgctggatgttggggtctcagtgtcgtagccaacgcggtaagcgcaccgcctggggagtacggccgcaaggttgaaactcaaaggaattgacgggggcccgcacaagcggtggagcatgtggtttaattcgaagcaacgcgcagaaccttaccagcccttgacatgcacaggtgctgcatggctgtcgtcagctcgtgtcgtgagatgttgggttaagtcccgcaacgagcgcaaccctcgcctctagttgccagcatgtgggcactctagaggaactgccggtgacaagccggaggaaggtggggatgacgtcaagtcctcatggcccttatgggctgggctacacacgtgctacaatggcggtcagagggaagccaggtcgcgaggccgagccgatcccggccgtctcagttcggatgcactctgcaactcgggtgcagaaggtggaatcgctagtaatcgcggatcagcacgccgcggtgaatacgttcccgggccttgtacacaccgcccgtcacaccatgggagttggttctaccttaagtcgttcgctaggcaggcgaccacggtagggtcagcgactggggtgaagtcgtaacaaggtagccgtagg

SEQ ID NO: 1648 - DNA, 1297 bp, Roseomonas sp.
  NML98-0157
agcgaacgctggcggcatgcttaacacatgcaagtcgcacgagtggcggacgggtgagtaacgcgtaggaacgtgtcctgaggtgggggacaaccccgggaaactggggctaataccgcatatgcaaaggcgcctttggagcggcctgcgtccgattaggtagttggtggggtaaaggcctaccaagcctgcgatcggtagctggtctgagaggacgaccagccacactgggactgagacacggcccagactcctacgggaggcagcagtggggaatattggacaatgggcgaaagcctgatccagcaatgccgcgtgggtgaagaaggtcttcggatcgtaaagccctttcgacggggacgatgacggtacccgtagaagaagccccggctaacttcgtgccagcagccgcggtaatacgaagggggctagcgttgctcggaattactgggcgtaaagggcgcgtaggcggcggcccaagtcaggcgtgaaattcctgggctcaacctggggactgcgcttgatactgggttgcttgaggatggaagaggctcgtggaattcccagtgtagaggtgaaattsgtagatattgggaagaacaccggtggygaaggcggcgagctggtccaactgacgctgaggcgcgacagcgtggggagcaaacaggattagataccctggtagtccacgccgtaaacgatgtgcgctggatgttggggtctcagtgtcgtagccaacgcggtaagcgcaccgcctggggagtacggccgcaaggttgaaactcaaaggaattgacgggggcccgcacaagcggtggagcatgtggtttaattcgaagcaacgcgcagaaccttaccagcccttgacatgcacaggtgctgcatggctgtcgtcagctcgtgtcgtgagatgttgggttaagtcccgcaacgagcgcaaccctcgcctctagttgccagcatgtgggcactctagaggaactgccggtgacaagccggaggaaggtggggatgacgtcaagtcctcatggcccttatgggctgggctacacacgtgctacdatggcggtcagagggaagccaggtcgcgaggccgagccgatcccggccgtctcagttcggatgcactctgcaactcgggtgcagaaggtggaatcgctagtaatcgcggatcagcacgccgcggtgaatacgttcccgggccttgtacacaccgcccgtcacaccatgggagttggttctaccttaagtcgttcgctaggcaggcgaccacggtagggtcagcgactggggtgaa

SEQ ID NO: 1649 - DNA, 1269 bp, Rothia aeria
  modified_base (838)..(838): a, c, t, g, unknown or other
  modified_base (1115)..(1115): a, c, t, g, unknown or other
  modified_base (1200)..(1200): a, c, t, g, unknown or other
ccgtggattagtggcgaacgggtgagtaatacgtgagtgacctacctttgactctgggataagcctgggaaactgggtctaataccggatacgaccaatctctgcatggggtgttggtggaaagcgttatggagtggttttagatgggctcacggcctatcagcttgttggtgaggtaatggcttaccaaggcgacgacgggtagccggcctgagagggtgaccggccacactgggactgagacacggcccagactcctacgggaggcagcagtggggaatattgcacaatgggcgcaagcctgatgcagcgacgccgcgtgagggatgacggccttcgggttgtaaacctctgttagcatcgaagaagcgaaagtgacggtaggtgcagagaaagcgccggctaactacgtgccagcagccgcggtaatacgtagggcgcgagcgttgtccggaattattgggcgtaaagagcttgtaggcggttggtcgcgtctgctgtgaaaggccggggcttaactccggttttgcagtgggtacgggctaactagagtgcagtaggggagactggaattcctggtgtagcggtggaatgcacagatatcaggaggaacaccgatggcgaaggcaggtctctgggctgtaactgacgctgagaagcgaaagcatggggagcgaacaggattagataccctggtagtccatgccgtaaacgttgggcactaggtgtgggggacattccacgttttccgcgccgtagctaacgcattaagtgccccgcctggggagtacggccgcaaggctaaaactcaaaggaattgacgggggcccgcactatnggcggagcatgcggattaattcgatgcaacgcgaagaaccttaccaaggcttgacatgcattagatcgcgtcagagatggcgtttcccttcggggctggtgtacaggtggtgcatggttgtcgtcagctcgtgtcgtgagatgttgggttaagtcccgcaacgagcgcaaccctcgttctatgttgccagcggttcggccggggactcataggagactgccggggttaactcggaggaaggtggggatgacgtcaaatcatcatgccccttatgttntgggcttcacgcatgctacaatggccggtacagagggttgcgatactgtgaggtggagctaatcccttaaagccggtctcagttnggattggggtatgcaactcgaccccatgaagtcggagtcgctagtaatcgcagatcagcaacgctgcgg

SEQ ID NO: 1650 - DNA, 1531 bp, Rothia dentocariosa
ttgtaacggagagtttgattctggctcaggacgaacgctggcggcgtgcttaacacatgcaagtcgaacgatgaagcctagcttgctaggtggattagtggcgaacgggtgagtaatacgtgagtgacctacctttgactctgggataagcctgggaaactgggtctaataccggatacgaccaatctccgcatggggtgttggtggaaagcgttatggagtggttttagatgggctcacggcctatcagcttgttggtgaggtaatggcttaccaaggcgacgacgggtagccggcctgagagggtgaccggccacactgggactgagacacggcccagactcctacgggaggcagcagtggggaatattgcacaatgggcgcaagcctgatgcagcgacgccgcgtgagggatgacggccttcgggttgtaaacctctgttagcatcgaagaagcgaaagtgacggtaggtgcagagaaagcgccggctaactacgtgccagcagccgcggtaatacgtagggcgcgagcgttgtccggaattattgggcgtaaagagcttgtaggcggttggtcgcgtctgctgtgaaaggctggggcttaaccctggttttgcagtgggtacgggctaactagagtgcagtaggggagactggaattcctggtgtagcggtggaatgcgcagatatcaggaggaacaccgatggcgaaggcaggtctctgggctgtaactgacgctgagaagcgaaagcatggggagcgaacaggattagataccctggtagtccatgccgtaaacgttgggcactaggtgtgggggacattccacgttttccgcgccgtagctaacgcattaagtgccccgcctggggagtacggccgcaaggctaaaactcaaagaaattgacgggggcccgcacaagcggcggagcatgcggattaattcgatgcaacgcgaagaaccttaccaaggcttgacatatactggactgcgtcagagatggcgtttcccttcggggctggtatacaggtggtgcatggttgtcgtcagctcgtgtcgtgagatgttgggttaagtcccgcaacgagcgcaaccctcgttctatgttgccagcacgtgatggtggggactcataggagactgccggggtcaactcggaggaaggtggggatgacgtcaaatcatcatgccccttatgtcttgggcttcacgcatgctacaatggccggtacagagggttgcgatactgtgaggtggagctaatccctaaaagccggtctcagttcggattggggtctgcaactcgaccccatgaagtcggagtcgctagtaatcgcagatcagcaacgctgcggtgaatacgttcccgggccttgtacacaccgcccgtcaagtcacgaaagttggtaacacccgaagccggtggcctaaccctggtggggggagccgtcgaaggtgggactggcgattgggactaagtcgtaacaaggtagccgtaccggaaggtgcggctggatcacctcctttct

SEQ ID NO: 1651 - DNA, 1535 bp, Rothia mucilaginosa
tttcaacggagagtttgattctggctcaggacgaacgctggcggcgtgcttaacacatgcaagtcgaacgatgaagcctagcttgctaggtggattagtggcgaacgggtgagtaatacgtgagtaacctacctttaactctgggataagcctgggaaactgggtctaataccggatacgaccaatctccgcatggggtgttggtggaaagcgttatgtagtggttatagatgggctcacggcctatcagcttgttggtgaggtaacggctcaccaaggcgacgacgggtagccggcctgagagggtgaccggccacactgggactgagacacggcccagactcctacgggaggcagcagtggggaatattgcacaatgggcgcaagcctgatgcagcgacgccgcgtgagggatgacggccttcgggttgtaaacctctgttagcagggaagaagagaaattgacggtacctgcagagaaagcgccggctaactacgtgccagcagccgcggtaatacgtagggcgcgagcgttgtccggaattattgggcgtaaagagcttgtaggcggtttgtcgcgtctgctgtgaaaggccggagcttaactccgtgtattgcagtgggtacgggcagactagagtgcagtaggggagactggaactcctggtgtagcggtggaatgcgcagatatcaggaagaacaccgatggcgaaggcaggtctctgggctgtaactgacgctgagaagcgaaagcatggggagcgaacaggattagataccctggtagtccatgccgtaaacgttgggcactaggtgtgggggacattccacgttttccgcgccgtagctaacgcattaagtgccccgcctggggagtacggccgcaaggctaaaactcaaagaaattgacgggggcccgcacaagcggcggagcatgcggattaattcgatgcaacgcgaagaaccttaccaaggcttgacatatactggaccgcatcagagatggtgtttcccttcggggctggtatacaggtggtgcatggttgtcgtcagctcgtgtcgtgagatgttgggttaagtcccgcaacgagcgcaaccctcgttctatgttgccagcacgtaatggtggggactcataggagactgccggggtcaactcggaggaaggtggggatgacgtcaaatcatcatgccccttatgtcttgggcttcacgcatgctacaatggccggtacagagggttgcgatactgtgaggtggagctaatccctaaaagccggtctcagttcggattggggtctgcaactcgaccccatgaagtcggagtcgctagtaatcgcagatcagcaacgctgcggtgaatacgttcccgggccttgtacacaccgcccgtcaagtcacgaaagttggtaacacccaaagccggtggcctaaccttttggagggagccgtctaaggtgggattggcgattgggactaagtcgtaacaaggtagccgtaccggaaggtgcggctggatcacctcctttctaagg

SEQ ID NO: 1652 - DNA, 1481 bp, Rothia nasimurium
gacgaacgctggcggcgtgcttaacacatgcaagtcgaacgatgaagcccagcttgctgggtggattagtggcgaacgggtgagtaatacgtgagtaacctgcctttaactctgggataagccttggaaacgaggtctaataccggatacgaccagttcccgcatgggatgctggtggaaagggatatgtactggttttagatgggctcacggcctatcagcttgttggtgaggtaacggctcaccaaggcgacgacgggtagccggcctgagagggtgaccggccacactgggactgagacacggcccagactcctacgggaggcagcagtggggaatattgcacaatgggcgcaagcctgatgcagcgacgccgcgtgagggatgacggccttcgggttgtaaacctctttcagcagggaagaagcgaaagtgacggtacctgcagaagaagcgccggctaactacgtgccagcagccgcggtaatacgtagggcgcgagcgttgtccggaattattgggcgtaaagagcttgtaggcggtttgtcgcgtctgctgtgaaagcccggggcttaaccccgggtttgcagtgggtacgggctaactagagtgcagtaggggagactggaattcctggtgtagcggtgaaatgcgcagatatcaggaggaacaccaatggcgaaggcaggtctctgggctgtaactgacgctgagaagcgaaagcatggggagcaaacaggattagataccctggtagtccatgccgtaaacgttgggcactaggtgtgggggacattccacgttttccgcgccgtagctaacgcattaagtgccccgcctggggagtacggccgcaaggctaaaactcaaagaaattgacgggggcccgcacaagcggcggagcatgcggattaattcgatgcaacgcgaagaaccttaccaaggcttgacatatactggaccgctctagagatagagtttcccttcggggctggtatacaggtggtgcatggttgtcgtcagctcgtgtcgtgagatgttgggttaagtcccgcaacgagcgcaaccctcgttctatgttgccagcacgtaatggtggggactcataggagactgccggggtcaactcggaggaaggtggggatgacgtcaaatcatcatgccccttatgtcttgggcttcacgcatgctacaatggccggtacaaagggttgcgatactgtgaggttgagctaatcccaaaaagccggtctcagttcggattggggtctgcaactcgaccccatgaagtcggagtcgctagtaatcgcagatcagcaacgctgcggtgaatacgttcccgggccttgtacacaccgcccgtcaagtcacgaaagttggtaacacccgaagccgatggcctaaccccttgtgggagggagtcgtcgaaggtgggattggcgattgggactaagtcgtaacaaggtagccgtaccggaagg

SEQ ID NO: 1653 - DNA, 1500 bp, Rothia sp.
  oral taxon 188
gagtttgatcctggctcaggacgaacgctggcggcgtgcttaacacatgcaagtcgaacgatgaagcggtgcttgcaccgtggattagtggcgaacgggtgagtaatacgtgagtgacctacctttgactctgggataagcctgggaaactgggtctaataccggatacgaccaatctctgcatggggtgttggtggaaagcgttatggagtggttttagatgggctcacggcctatcagcttgttggtgaggtaatggcttaccaaggcgacgacgggtagccggcctgagagggtgaccggccacactgggactgagacacggcccagactcctacgggaggcagcagtggggaatattgcacaatgggcgcaagcctgatgcagcgacgccgcgtgagggatgacggccttcgggttgtaaacctctgttagcatcgaagaagcgaaagtgacggtaggtgcagagaaagcgccggctaactacgtgccagcagccgcggtaatacgtagggcgcgagcgttgtccggaattattgggcgtaaagagcttgtaggcggttggtcgcgtctgctgtgaaaggccggggcttaactccggttttgcagtgggtacgggctaactagagtgcagtaggggagactggaattcctggtgtagcggtggaatgcacagatatcaggaggaacaccgatggcgaaggcaggtctctgggctgtaactgacgctgagaagcgaaagcatggggagcgaacaggattagataccctggtagtccatgccgtaaacgttgggcactaggtgtgggggacattccacgttttccgcgccgtagctaacgcattaagtgccccgcctggggagtacggccgcaaggctaaaactcaaaggaattgacgggggcccgcacaagcggcggagcatgcggattaattcgatgcaacgcgaagaaccttaccaaggcttgacatgcattagatcgcgtcagagatggcgtttcccttcggggctggtgtacaggtggtgcatggttgtcgtcagctcgtgtcgtgagatgttgggttaagtcccgcaacgagcgcaaccctcgttctatgttgccagcggttcggccggggactcataggagactgccggggttaactcggaggaaggtggggatgacgtcaaatcatcatgccccttatgtcttgggcttcacgcatgctacaatggccggtacagagggttgcgatactgtgaggtggagctaatcccttaaagccggtctcagttcggattggggtctgcaactcgaccccatgaagtcggagtcgctagtaatcgcagatcagcaacgctgcggtgaatacgttcccgggccttgtacacaccgcccgtcaagtcacgaaagttggtaacacccgaagccggtggcctaacccttgtggggggagccgtcgaaggtgggattggcgattgggactaagtcgtaacaaggtagccgtaccggaaggtgc

SEQ ID NO: 1654 - DNA, 1539 bp, Ruminobacter amylophilus
aaagtgaagagtttgatcatggctcagattgaacgctggcggcaggcttaatacatgcaagtcgaacggtaacagcaggaagcttgcttcctggctgacgagtggcggacgggtgagtaatacctggggagctgcctgaatgagggggacaacacctggaaacgggtgctaataccgcgtaagcctgagggggaaaggctgggcaaccagtcgcattcagatgcgcccaggtgggattagctagttggtggggtaacggcctaccaaggcgacgatctctagctggtctgagaggatgatcagccacactggaactgagacacggtccagactcctacgggaggcagcagtagggaatattgcacaatgggggaaaccctgatgcagccatgccgcgtgtgtgaagaaggcctttgggttgtaaagcactttcagtatggaggaagtgtagtatgttaacagcatgctgcattgacgttacatacagaagaagcaccggctaactccgtgccagcagccgcggtaatacggagggtgcgagcgttaatcggaataactgggcgtaaagagctcgtaggcggtttgtcaagtcagatgtgaaagccccgggcttaacctgggaaccgcatttgaaactgacagactagagtactgtagagggaggtagaattccaggtgtagcggtgaaatgcgtagatatctggaggaataccggtggcgaaggcggcctcctggacagagactgacgctgaggagcgaaagcgtggggagcaaacaggattagataccctggtagtccacgccgtaaacgatgtcaattagaagcatgttgccatgagtagtgtgtttctaagctaacgcgataaattgaccgcctggggagtacggccggcaaggttaaaactcaaatgaattgacgggggcccgcacaagcggtggagcatgtggtttaattcgatgcaacgcgaagaaccttacctggacttgacatattgagaagtatttagagatagatacgtgccgcaaggagctcaaatacaggtgctgcatggctgtcgtcagctcgtgtcgtgagatgttgggttaagtcccgcaacgagcgcaacccttgttctttgttgccagcacgtaaaggtgggaactcaaagaagactgccggtgacaaaccggaggaaggcagggatgacgtcaagtcatcatggcccttacgtccagggctacacacgtgctacaatgggttgtacagagggaagcgaagtcgcgaggtagagcggaacccagaaagcaactcgtagtccggattggagtctgcaactcgactccatgaagtcggaatcgctagtaatcgcgaatcagaatgtcgcggtgaatacgttcccgggccttgtacacaccgcccgtcacaccatgggagtgaattgcaccagaagtagttagcttaacccgcaagggagggcgattaccacggtgtggtttatgactggggtgaagtcgtaacaaggtaaccataggggaacctgtggttggatcacctcctta

SEQ ID NO: 1655 - DNA, 1014 bp, Ruminococcaceae bacterium D16
  modified_base (907)..(907): a, c, t, g, unknown or other
  modified_base (910)..(910): a, c, t, g, unknown or other
  modified_base (953)..(955): a, c, t, g, unknown or other
  modified_base (973)..(973): a, c, t, g, unknown or other
  modified_base (980)..(981): a, c, t, g, unknown or other
  modified_base (996)..(996): a, c, t, g, unknown or other
  modified_base (1002)..(1002): a, c, t, g, unknown or other
tgcctttgaagaggattcgtccaattgataaggttacttagtggcggacgggtgagtaacgcgtgaggaacctgccttggagtggggaataacacagtgaaaattgtgctaataccgcataatgcagttgggtcgcatgactctgactgccaaagatttatcgctctgagatggcctcgcgtctgattagctagttggtggggtaacggcccaccaaggcgacgatcagtagccggactgagaggttggccggccacattgggactgagacacggcccagactcctacgggaggcagcagtggggaatattgggcaatgggcgcaagcctgacccagcaacgccgcgtgaaggaagaaggctttcgggttgtaaacttcttttcttagggacgaagcaagtgacggtacctaaggaataagccacggctaactacgtgccagcagccgcggtaatacgtaggtggcaagcgttatccggatttactgggtgtaaagggcgtgtaggcgggattgcaagtcagatgtgaaaaccacgggctcaacctgtggcctgcatttgaaactgtagttcttgagtactggagaggcagacggaattcctagtgtagcggtgaaatgcgtagatattaggaggaacaccagtggcgaaggcggtctgctggacagcaactgacgctgaggcgcgaaagcgtggggagcaaacaggattagataccctggtagtccacgctgtaaacgatggatactaggtgtggggggtctgaccccctccgtgccgcagttaacacaataagtatcccacctggggagtacgatcgcaaggttgaaactcaaaggaattgacgggggcccgcacaagcggtggagtatgtggtttaattcgaagcaacgcgaagaaccttaccnggnttgacatcccgaggtccggtctagagatagacctttctcttcnnnacctcggtgacaggtggngcatggnngtcgtcagctcgtgncgtganatgttgggttaa

SEQ ID NO: 1656 - DNA, 1503 bp, Ruminococcus albus
agagtttgatcctggctcaggacgaacgctggcggcacgcttaacacatgcaagtcgaacgagcgaaagagtgcttgcactctctagctagtggcggacgggtgagtaacacgtgagcaatctgcctttcggagagggataccaattggaaacgattgttaatacctcataacataacgaagccgcatgactttgttatcaaatgaatttcgccgaaagatgagctcgcgtctgattaggtagttggtgaggtaacggcccaccaagccgacgatcagtagccggactgagaggttgaacggccacattgggactgagacacggcccagactcctacgggaggcagcagtggggaatattgcacaatgggcgaaagcctgatgcagcgatgccgcgtgagggaagaaggttttaggattgtaaacctctgtctttggggacgataatgacggtacccaaggaggaagctccggctaactacgtgccagcagccgcggtaatacgtagggagcgagcgttgtccggaattactgggtgtaaagggagcgtaggcgggattgcaagtcaggtgtgaaatttaggggcttaacccctgaactgcacttgaaactgtagttcttgagtgaagtagaggtaagcggaattcctagtgtagcggtgaaatgcgtagatattaggaggaacatcagtggcgaaggcggcttactgggctttaactgacgctgaggctcgaaagcgtggggagcaaacaggattagataccctggtagtccacgccgtaaacgatgattactaggtgtggggggactgaccccttccgtgccgcagttaacacaataagtaatccacctggggagtacggccgcaaggctgaaactcaaaggaattgacgggggcccgcacaagcagtggagtatgtggtttaattcgaagcaacgcgaagaaccttaccaggtcttgacatcgtacgcatagcatagagatatgtgaaatcccttcggggacgtatagacaggtggtgcatggttgtcgtcagctcgtgtcgtgagatgttgggttaagtcccgcaacgagcgcaacccttactgttagttgctacgcaagagcactctagcaggactgccgttgacaaaacggaggaaggtggggatgacgtcaaatcatcatgccccttatgacctgggctacacacgtactacaatggctgttaacagagggaagcaaaacagtgatgtggagcaaaaccctaaaagcagtcttagttcggattgtaggctgcaacccgcctacatgaagtcggaattgctagtaatcgcggatcagcatgccgcggtgaatacgttcccgggccttgtacacaccgcccgtcacgccatgggagtcggtaacacccgaagcctgtgttctaaccgcaaggaggaagcagtcgaaggtgggattgatgactggggtgaagtcgtaacaaggtagccgtatcggaaggtgcggctggatcacctcctt

SEQ ID NO: 1657 - DNA, 1391 bp, Ruminococcus bromii
  modified_base (21)..(21): a, c, t, g, unknown or other
tcgaacggaacttctttaaanggatttcttcggaatgaatttgattaagtttagtggcggacgggtgagtaacgcgtgagtaacctgcctctaagaggggaataacattctgaaaagaatgctaataccgcataatatatatttatcgcatggtagatatatcaaagatttatcgcttagagatggactcgcgtccgattagttagttggtgaggtaacggctcaccaagaccgcgatcggtagccggactgagaggttgaacggccacattgggactgagacacggcccagactcctacgggaggcagcagtgggggatattgcgcaatgggggaaaccctgacgcagcaacgccgcgtgaaggatgaaggtcttcggattgtaaacttcttttattaaggacgaagaaagtgacggtacttaatgaataagctccggctaactacgtgccagcagccgcggtaatacgtagggagcaagcgttgtccggatttactgggtgtaaagggtgcgtaggcggctttgcaagtcagatgtgaaatctatgggctcaacccatagcctgcatttgaaactgcagagcttgagtgaagtagaggcaggcggaattccccgtgtagcggtgaaatgcgtagagatggggaggaacaccagtggcgaaggcggcctgctgggctttaactgacgctgagcacgaaagcgtgggtagcaaacaggattagataccctggtagtccacgctgtaaacgatgattactaggtgtggggggtctgaccccttccgtgccggagttaacacaataagtaatccacctggggagtacggccgcaaggttgaaactcaaaggaattgacgggggcccgcacaagcagtgggtatgtggtttaattcgaagcaacgcgaagaaccttaccaggtcttgacatcctactaacgagatagagatatgttataggccgtttgggaaaagtagagacaggtggtgcatggttgtcgtcagctcgtgtcgtgagatgttgggttaagtcccgcaacgagcgcaacccttgctattagttgctacgcaagagcactctaataggactgccgttgacaaaacggaggaaggtggggacgacgtcaaatcatcatgccccttatgacctgggctacacacgtactacaatggacattaacagagggaagcaatacagtgatgtggagcaaacccctaaaaatgttctcagttcagattgcaggctgcaacccgcctgtatgaagatggaattgctagtaatcgcagatcagcatgctgcggtgaatacgttcccgggccttgtacacaccgcccgtcacaccatgggagccggtaatacccgaagtcagtagtctaaccgcaaggaggacgct

SEQ ID NO: 1658 - DNA, 1371 bp, Ruminococcus callidus
ttaacacatgcaagtcgaacggagaacattgagcttgcttaatgttcttagtggcggacgggtgagtaacacgtgagtaacctgcctctgagagtgggatagcttctggaaacggatggtaataccgcataacatcatggattcgcatgtttctgtgatcaaagatttatcgcttagagatggactcgcgtctgattagctagttggtaaggtaacggcttaccaaggcgacgatcagtagccggactgagaggttgatcggccacattgggactgagacacggcccagactcctacgggaggcagcagtggggaatattgcacaatgggggaaaccctgatgcagcgatgccgcgtggaggaagaaggttttcggattgtaaactcctgttgaagaggacgataatgacggtactcttttagaaagctccggctaactacgtgccagcagccgcggtaatacgtagggagcgagcgttgtccggaattactgggtgtaaagggagcgtaggcgggatggcaagtcagatgtgaaaactatgggctcaacccatagactgcatttgaaactgttgttcttgagtgaggtagaggtaagcggaattcctggtgtagcggtgaaatgcgtagagatcaggaggaacatcggtggcgaaggcggcttactgggcctttactgacgctgaggctcgaaagcgtggggagcaaacaggattagataccctggtagtccacgccgtaaacgatgattactaggtgtggggggactgaccccttccgtgccgcagttaacacaataagtaatccacctggggagtacggccgcaaggttgaaactcaaaggaattgacgggggcccgcacaagcagtggagtatgtggtttaattcgaagcaacgcgaagaaccttaccaggtcttgacatcgagtgacgtacctagagataggtattttcttcggaacacaaagacaggtggtgcatggttgtcgtcagctcgtgtcgtgagatgttgggttaagtcccgcaacgagcgcaacccttaccattagttgctacgcaagagcactctaatgggactgccgttgacaaaacggaggaaggtggggatgacgtcaaatcatcatgccccttatgacctgggctacacacgtactacaatggcaatataacagagggaagcaatacagcgatgtggagcaaatccccaaaaattgtcccagttcagattgcaggctgcaactcgcctgcatgaagtcggaattgctagtaatcgcagatcagcatgctgcggtgaatacgttcccgggccttgtacacaccgcccgtcacaccatgggagtcggtaacacccaaagccggtcgtctaacctt

SEQ ID NO: 1659 - DNA, 1494 bp, Ruminococcus champanellensis
agagtttgatcctggctcaggacgaacgctggcggcacgcctaacacatgcaagtcgaacggagataaagacttcggtttttatcttagtggcggacgggtgagtaacacgtgagcaacctgcctctgagagagggatagcttctggaaacggatggtaatacctcataacatagcggtaccgcatgatactgctatcaaagatttatcgctcagagatgggctcgcgtctgattagctagatggtgaggtaacggctcaccatggcgacgatcagtagccggactgagaggttgaacggccacattgggactgagacacggcccagactcctacgggaggcagcagtggggaatattgcacaatgggcgcaagcctgatgcagcgatgccgcgtggaggaagaaggttttcggattgtaaactcctgtcttaagggacgataatgacggtaccttaggaggaagctccggctaactacgtgccagcagccgcggtaatacgtagggagcgagcgttgtccggaattactgggtgtaaagggagcgtaggcgggattgcaagtcagatgtgaaaactatgggcttaacccatagactgcatttgaaactgtagttcttgagtgaagtagaggtaagcggaattcctagtgtagcggtgaaatgcgtagatattaggaggaacatcggtggcgaaggcggcttactgggcttttactgacgctgaggctcgaaagcgtggggagcaaacaggattagataccctggtagtccacgctgtaaacgatgattactaggtgtggggggactgaccccttccgtgccgcagttaacacaataagtaatccacctggggagtacggccgcaaggttgaaactcaaaggaattgacgggggcccgcacaagcagtggagtatgtggtttaattcgaagcaacgcgaaaaaccttaccaggtcttgacatcgagtgaatgatctagagatagatcagtccttcgggacacaaagacaggtggtgcatggttgtcgtcagctcgtgtcgtgagatgttgggttaagtcccgcaacgagcgcaacccttacctttagttgctacgcaagagcactctagagggactgccgttgacaaaacggaggaaggtggggatgacgtcaaatcatcatgccccttatgacctgggctacacacgtactacaatggcaatgaacagagggaagcaatacagtgatgtggagcaaatccccaaaaattgtcccagttcagattgtaggctgcaactcgcctacatgaagtcggaattgctagtaatcgcagatcagcatgctgcggtgaatacgttcccgggccttgtacacaccgcccgtcacaccatgggagtcggtaacacccgaagccagtagcctaaccgcaaggagggcgctgtcgaaggtgggattgatgactggggtgaagtcgtaacaaggtagccgtatcggaaggtgcggctggatcacct

SEQ ID NO: 1660 - DNA, 1388 bp, Ruminococcus flavefaciens
  modified_base (157)..(157): a, c, t, g, unknown or other
  modified_base (276)..(276): a, c, t, g, unknown or other
gctggcggcacgcttaacacatgcaagtcgaacggagataatttgagtttacttaggttatcttagtggcggacgggtgagtaacacgtgagcaacctaccttagagagagggatagcttctggaaacggatggtaatacctcataacataactganccgcatgatttagttatcaaagatttatcactctgagatgggctcgcgtctgattagatagttggtgaggtaacggctcaccaagtcgacgatcagtagccggactgagaggttgaacngccacattgggactgagacacggcccagactcctacgggaggcagcagtggggaatattgcacaatgggggaaaccctgatgcagcgatgccgcgtggaggaagaaggttttcggattgtaaactcctgtcttaaaggacgataatgacggtactttaggaggaagctccggctaactacgtgccagcagccgcggtaatacgtagggagcgagcgttgtccggaattactgggtgtaaagggagcgtaggcgggagcgcaagtcagatgtgaaatacatgggctcaacccatgggctgcatttgaaactgtgtttcttgagtgaagtagaggtaagcggaattcctggtgtagcggtgaaatgcgtagatatcaggaggaacaccggtggcgaaggcggcttactgggcttttactgacgctgaggctcgaaagcgtggggagcaaacaggattagataccctggtagtccacgctgtaaacgatgattactaggtgtggggggactgaccccttccgtgccgcagttaacacaataagtaatccacctggggagtacgsccscaaggttgaaactcaaaggaattgacgggggcccgcacaagcagtggagtatgtggtttaattcgaagcaacgcgaagaaccttaccaggtcttgacatcgtatgcatagtctagagatagatgaaattccttcggggacatatagacaggtggtgcatggttgtcgtcagctcgtgtcgtgagatgttgggttaagtcccgcaacgagcgcaacccttacctttagttgctacgcaagagcactctaaagggactgccgttgacamaacggaggaaggtggggatgacgtcaaatcatcatgccccttatgacctgggctacacacgtactacaatggcaattaacaaagagaagcaagacggtgacgtggagcgaatctcaccaaattgtcccagttcagattgcaggctgcaactcgcctgcatgaagtcggaattgctagtaatcgcggatcagcatgccgcggtgaatacgttcccgggccttgtacacaccgcccgtcacaccatgggagtcggtaacacccgaagtcggtagtctaacagc

SEQ ID NO: 1661 - DNA, 1392 bp, Ruminococcus gnavus
  modified_base (1378)..(1380): a, c, t, g, unknown or other
gtcgagcgaagcacttttgcggatttcttcggattgaagcaattgtgactgagcggcggacgggtgagtaacgcgtgggtaacctgcctcatacagggggataacagttggaaacggctgctaataccgcataagcgcacagtaccgcatggtaccgtgtgaaaaactccggtggtatgagatggacccgcgtctgattagctagttggtggggtaacggcctaccaaggcgacgatcagtagccgacctgagagggtgaccggccacattgggactgagacacggcccaaactcctacgggaggcagcagtggggaatattgcacaatgggggaaaccctgatgcagcgacgccgcgtgagcgatgaagtatttcggtatgtaaagctctatcagcagggaagaaaatgacggtacctgactaagaagccccggctaactacgtgccagcagccgcggtaatacgtagggggcaagcgttatccggatttactgggtgtaaagggagcgtagacggcatggcaagccagatgtgaaagcccggggctcaaccccgggactgcatttggaactgtcaggctagagtgtcggagaggaaagcggaattcctagtgtagcggtgaaatgcgtagatattaggaggaacaccagtggcgaaggcggctttctggacgatgactgacgttgaggctcgaaagcgtggggagcaaacaggattagataccctggtagtccacgccgtaaacgatgaatactaggtgtcgggtggcaaagccattcggtgccgcagcaaacgcaataagtattccacctggggagtacgttcgcaagaatgaaactcaaaggaattgacggggatccgcacaagcggtggagcatgtggtttaattcgaagcaacgcgaagaaccttacctggtcttgacatccctctgaccgctctttaatcggagctttccttcgggacagaggagacaggtggtgcatggttgtcgtcagctcgtgtcgtgagatgttgggttaagtcccgcaacgagcgcaacccctatctttagtagccagcatttaagatgggcactctagagagactgccagggataacctggaggaaggtggggatgacgtcaaatcatcatgccccttatgaccagggctacacacgtgctacaatggcgtaaacaaagggaagcgagcccgcgagggggagcaaatcccaaaaataacgtctcagttcggattgtagtctgcaactcgactacatgaagctggaatcgctagtaatcgcgaatcagaatgtcgcggtgaatacgttcccgggtcttgtacacaccgcccgtcacaccatgggagtcagtaacgcccgaagtcagtgacccaacnnnaaggagggagct

SEQ ID NO: 1662 - DNA, 1373 bp, Ruminococcus hansenii
tatcattgactcttcggaagatttgatatttgactgagcggcggacgggtgagtaacgcgtgggtaacctgcctcatacaggggaataacagttagaaatggctgctaatgccgcataagcgcacaggaccgcatggtctggtgtgaaaaactgaggtggtatgagatggacccgcgtctgattaggtagttggtggggtaacggcctaccaagccgacgatcagtagccggcctgagagggtgaacggccacattgggactgagacacggcccagactcctacgggaggcagcagtggggaatattgcacaatgggggaaaccctgatgcagcgacgccgcgtgaaggaagaagtatctcggtatgtaaacttctatcagcagggaagaaaagacggtacctgactaagaagccccggctaactacgtgccagcagccgcggtaatacgtagggggcaagcgttatccggatttactgggtgtaaagggagcgtagacggaagagcaagtctgatgtgaaaggctggggcttaaccccaggactgcattggaaactgtttttctagagtgccggagaggtaagcggaattcctagtgtagcggtgaaatgcgtagatattaggaggaacaccagtggcgaaggcggcttactggacggtaactgacgttgaggctcgaaagcgtggggagcaaacaggattagataccctggtagtccacgccgtaaacgatgaatactaggtgtcggggtgcaaagcagttcggtgccgcagcaaacgcaataagtattccacctggggagtacgttcgcaagaatgaaactcaaaggaattgacggggacccgcacaagcggtggagcatgtggtttaattcgaagcaacgcgaagaatcttaccaagtcttgacatctgcctgaccgtcccttaaccggagctttccttcgggacaggcaagacaggtggtgcatggttgtcgtcagctcgtgtcgtgagatgttgggttaagtcccgcaacgagcgcaacccctatccttagtagccagcagtccggctgggcactctagggagactgccggggataacccggaggaaggcggggacgacgtcaaatcatcatgccccttatgatttgggctacacacgtgctacaatggcgtaaacaaagggaagcgaagcggtgacgcttagcaaatctcaaaaataacgtcccagttcggactgcagtctgcaactcgactgcacgaagctggaatcgctagtaatcgcgaatcagaatgtcgcggtgaatacgttcccgggtcttgtacacaccgcccgtcacaccatgggagtcagtaacgcccgaagtcagtgacccaaccttatggaggga

SEQ ID NO: 1663 - DNA, 1386 bp, Ruminococcus lactaris
tcgagcgaagcacttaggaaagattcttcggatgatttcctatttgactgagcggcggacgggtgagtaacgcgtgggtaacctgcctcatacagggggataacagttagaaatgactgctaataccgcataagaccacagcaccgcatggtgcaggggtaaaaactccggtggtatgagatggacccgcgtctgattagttagttggtggggtaacggcctaccaaggcgacgatcagtagccgacctgagagggtgaccggccacattgggactgagacacggcccaaactcctacgggaggcagcagtggggaatattgcacaatgggggaaaccctgatgcagcgacgccgcgtgagcgaagaagtatttcggtatgtaaagctctatcagcagggaagaaaatgacggtacctgactaagaagccccggctaactacgtgccagcagccgcggtaatacgtagggggcaagcgttatccggatttactgggtgtaaagggagcgtagacggagcagcaagtctgatgtgaaaacccggggctcaaccccgggactgcattggaaactgttgatctggagtgccggagaggtaagcggaattcctagtgtagcggtgaaatgcgtagatattaggaggaacaccagtggcgaaggcggcttactggacggtaactgacgttgaggctcgaaagcgtggggagcaaacaggattagataccctggtagtccacgccgtaaacgatgactactaggtgtcgggtggcaaagccattcggtgccgcagccaacgcaataagtagtccacctggggagtacgttcgcaagaatgaaactcaaaggaattgacggggacccgcacaagcggtggagcatgtggtttaattcgaagcaacgcgaagaaccttacctgctcttgacatcccggtgacggcagagtaatgtctgcttttcttcggaacaccggtgacaggtggtgcatggttgtcgtcagctcgtgtcgtgagatgttgggttaagtcccgcaacgagcgcaacccctatcttcagtagccagcggtaaggccgggcactctggagagactgccagggataacctggaggaaggtggggatgacgtcaaatcatcatgccccttatgagcagggctacacacgtgctacaatggcgtaaacaaagggaagcgaacccgcgagggtgggcaaatcccaaaaataacgtctcagttcggattgtagtctgcaactcgactacatgaagctggaatcgctagtaatcgcgaatcagaatgtcgcggtgaatacgttcccgggtcttgtacacaccgcccgtcacaccatgggagtcagtaacgcccgaagtcagtgacccaaccgtaaggagg

SEQ ID NO: 1664 - DNA, 1373 bp, Ruminococcus obeum
  modified_base (8)..(8): a, c, t, g, unknown or other
  modified_base (762)..(762): a, c, t, g, unknown or other
  modified_base (899)..(899): a, c, t, g, unknown or other
acgggaantacttcattgagacttcggtggatttgatttagtattctagtggcggacgggtgagtaacgcgtgggtaacctgccttatacagggggataacagtcagaaatgactgctaataccgcataagcgcacaggaccgcatggtccggtgtgaaaaactccggtggtataagatggacccgcgttggattagcttgttggtggggtaacggcccaccaaggcgacgatccatagccggcctgagagggtgaacggccacattgggactgagacacggcccagactcctacgggaggcagcagtggggaatattgcacaatgggggaaaccctgatgcagcgacgccgcgtgaaggaagaagtatctcggtatgtaaacttctatcagcagggaagatagtgacggtacctgactaagaagccccggcaactacgtgccagcagccgcggtaatacgtagggggcaagcgttatccggtttactgggtgtaaagggagcgtagacggtgtggcaagtctgatgtgaaaggcatgggctcaacctgtggactgcattggaaactgtcatacttgagtgccggaggggtaagcggaattcctagtgtagcggtgaaatgcgtagatattaggaggaacaccagtggcgaaggcggcttactggacggtaactgacgttgaggctgaaagcgtggggagcaaacaggattagataccctggtagtccacgccgtaaacgatgaatataggtgtcgggatgntcggtgccgtcgcaaacgcagtaagtattccacctggggagtacgttcgcaagaatgaaactcaaaggaattgacggggacccgcacaagcggtggagcatgtggtttaattcgaagcaacgcgaagaaacatggcnagtcttgacatccctttgaccgacttttaaccgagtttttccttcgggacagaggagacaggtggtgcatggttgttgtcagctcgtgtcgtgagatgttgggttaagtcccgcaacgagcgcaacccctatcctcagtagccagcaagttgagttgggcactctgtggagactgccagggataacctggaggaaggcggggatgacgtcaaatcatcatgccccttatgatttgggctacacacgtgctacaatggcgtaaacaaagggaagcgagattgtgagatggagcaaatcccaaaaataacgtcccagttcggactgtagtctgcaacccgactacacgaagctggaatcgctagtaatcgcggatcagaatgccgcggtgaatacgttcccgggtcttgtacacaccgcccgtcacaccatgggagtcagtaacgcccgaagtcagtgacctaactgcaaagaagg

SEQ ID NO: 1665 - DNA, 1368 bp, Ruminococcus sp.
  18P13
tcgaacggagataaagacttcggtttttatcttagtggcggacggttgagtaacacgtgagcaacctgcctttgagagagggatagcttctggaaacggatggtaatacctcataacatagcggtaccgcatgatactgctatcaaagatttatcgctcagagatgggctcgcgtctgattagctagatggtgaggtaacggttcaccatggcgacgatcagtagccggactgagaggttgaacggccacattgggactgagacacggcccagactcctacgggaggcagcagtgcggaatattgcacaatgacgcaagcctgatgcagcgatgccgcgtggaggaagaaggttttcggattgtaaactcctgtcttaagggacgataatgacggtaccttaggaggaagctccggctaactacgtgccagcagccgcggtaatacgtagggagcgagcgttgtccggaattactgggtgtaaagggagcgtaggcgggattgcaagtcagatgtgaaaactatgggcttaacccatagactgcatttgaaactgtagttcttgagtgaagtagaggtaagcggaattcctagtgtagcggtgaaatgcgtagatattaggaggaacatcggtggcgaaggcggcttactgggcttttactgacgctgaggctcgaaagcgtggggagcaaacaggattagataccctggtagtccacgctgtaaacgatgattactaggtgtggggggactgaccccttccgtgccgcagttaacacaataagtaatccacctggggagtacggccgcaaggttgaaactcaaaggaattgacgggggcccgcacaagcagtggagtatgtggtttaattcgaagcaacgcgaaaaaccttaccaggtcttgacatcgagtgaatgatctagagatagatcagtccttcgggacacaaagacaggtggtgcatggttgtcgtcagctcgtgtcgtgagatgttgggttaagtcccgcaacgagcgcaacccttacctttagttgctacgcaagagcactctagagggactgccgttgacaaaacggaggaaggtggggatgacgtcaaatcatcatgccccttatgacctgggctacacacgtactacaatggcaatgaacagagggaagcaatacagtgatgtggagcaaatccccaaaaattgtcccagttcagattgtaggctgcaactcgcctacatgaagtcggaattgctagtaatctgcagctcagcatgctgcggtgaatacgttcccgggccttgtacacgccgcccgtcacaccatgggagtcggtaacacccgaagccagtagcctaaccgcaaggagggcgctgt

SEQ ID NO: 1666 - DNA, 1368 bp, Ruminococcus sp.
  5_1_39BFAA
  modified_base (8)..(8): a, c, t, g, unknown or other
  modified_base (10)..(11): a, c, t, g, unknown or other
  modified_base (15)..(15): a, c, t, g, unknown or other
  modified_base (20)..(20): a, c, t, g, unknown or other
  modified_base (762)..(762): a, c, t, g, unknown or other
acgggaantnnttcnttganacttcggtggatttagatttatttctagtggcggacgggtgagtaacgcgtgggtaacctgccttatacagggggataacagtcagaaatggctgctaataccgcataagcgcacagagctgcatggctcagtgtgaaaaactccggtggtataagatggacccgcgttggattagctggttggtggggtaacggcccaccaaggcgacgatccatagccggcctgagagggtgaacggccacattgggactgagacacggcccagactcctacgggaggcagcagtggggaatattgcacaatgggggaaaccctgatgcagcgacgccgcgtgaaggaagaagtatctcggtatgtaaacttctatcagcagggaagatagtgacggtacctgactaagaagccccggctaactacgtgccagcagccgcggtaatacgtagggggcaagcgttatccggatttactgggtgtaaagggagcgtagacggtgtggcaagtctgatgtgaaaggcatgggctcaacctgtggactgcattggaaactgtcatacttgagtgccggagggtaagcggaattcctagtgtagcggtgaaatgcgtagatattaggaggaacaccagtggcgaaggcggcttactggacggtaactgacgttgaggctcgaaagcgtggggagcaaacaggattagataccctggtagtccacgccgtaaacgatgaatactagtgtcggcaantcggtgccgtcgcaaacgcagtaagtattccacctggggagtacgttcgcaagaatgaaactcaaaggaattgacggggaccgcacaagcggtggacatgtggtttaattcgaagcaacgcgaagaaccttaccaagtcttgacatccgcctgaccgatccttaaccggatctttccttcgggacaggcgagacaggtggtgcatggttgtcgtcagctcgtgtcgtgagatgttgggttaagtcccgcaacgagcgcaacccctatcctcagtagccagcatttaaggtgggcactctggggagactgccagggataacctggaggaaggcggggatgacgtcaaatcatcatgccccttatgatttgggctacacacgtgctacaatggcgtaaacaaagggaagcgagattgtgagatggagcaaatcccaaaaataacgtcccagttcggactgtagtctgcaacccgactacacgaagctggaatcgctagtaatcgcggatcagaatgccgcggtgaatacgttcccgggtcttgtacacaccgcccgtcacaccatgggagtcagtaacgcccgaagtcagtgacctaactgcaaagaa

SEQ ID NO: 1667 - DNA, 1223 bp, Ruminococcus sp.
  9SE51
cacgcctaacacatgcaagtcgaacgagtggcggacgggtgagtaacacgtgagcaacctgcctctgagagagggatagcttctggaaacggatggtaatacctcataaccaaagtcgctcagagatggtctcgcgtctgattagctagatggtgaggtaacggctcaccatggcgacgatcagtagccggactgagaggttgaacggccacattgggactgagacacggccagactcctacgggaggcagcagtggggaatattgcacaatgggcgcaagcctgatgcagcgatgccgcgtggaggaagaaggttttcggattgtaaactcctgtcttaagggacgatgacggtaccttaggaggaagctccggctaactacgtgccagcagccgcggtaatacgtagggagcgagcgttgtccggaattactgggtgtaaagggagcgtaggcgggattgcaagtcagatgtgaaaactatgggcttaacccatagactgcatttgaaactgtagttcttgagtgaagtagaggtaagcggaattcctagtgtagcggtgaaatgcgtagatattaggaggaacatcggtggcgaaggcggcttactgggcttactgacgctgaggctcgaaagcgtggggagcaaacaggattagataccctggtagtccacgctgtaaagatgattactaggtgtgggggcttccgtgccgcagttaacacaataagtaatccacctggggagtacggccgcaaggttgaaactcaaaggaattgacgggggcccgcacaagcagtggagtatgtggtttaattcgaagcaacgcgaaaaaccttaccaggtcttgacatcgacaggtggtgcatggttgtcgtcagctcgtgtcgtgagatgttgggttaagtcccgcagcgagcgcaacccttacctttagttgctacagcactctagagggactgccgttgacaaaacggaggaaggtggggatgtcgtcaaatcatcatgccccttatgactgggctacacacgtactacaatggcaatcagagggaagcaatacagtgatgtggagcaaatccccattgtcccagttcagatgtaggctcaactcgcctacagaagtcggaattgctagtaatcgcagctcagcatgccgcggtgaatacgttaacgggccttgtacacggcgcccgtcacaccatgggagtcggtaacaaccg

SEQ ID NO: 1668 - DNA, 1339 bp, Ruminococcus sp.
  ID8
  modified_base (27)..(27): a, c, t, g, unknown or other
ggaggaagaggacagtgactgagcggnggacgggtgagtaacggcggtgggcaacctgcctcatacagggggataacagttagaaatgactgctaataccgcataagcgcacaggaccgcatggtgtagtgtgaaaaactccggtggtatgagatggacccgcgtctgattaggtagttggtggggtaaaggcctaccaagccgacgatcagtagccgacctgagagggtgaccggccacattgggactgagacacggcccaaactcctacgggaggcagcagtggggaatattgcacaatgggggaaaccctgatgcagcgacgccgcgtgaaggaagaagtatttcggtatgtaaacttctatcagcagggaagaagatgacggtacctgagtaagaagcaccggctaaatacgtgccacagccgcggtaatacgtatggtgcagcgttatccggatttactgggtgtaaagggagcgtagacggataggcaagtctggagtgaaaacccagggctcaaccctgggactgctttggaaactgcagatctggagtgccggagaggtaagcggaattcctagtgtagcggtgaaatgcgtagatattaggaggaacaccagtggcgaaggcggcttactggacggtgactgacgttgaggctcgaaagcgtggggagcaaacaggattagataccctggtagtccacgccgtaaacgatgactactagtgtcggtgtgcaaagcacatcggtgccgcagcaaacgcaataagtagtccacctggggagtacgttcgcaagaatgaaactcaaaggaattgaccgggacccgcacaagcggtggagcatgtggtttaattcgaagcaacgcgaagaaccttacctggtcttgacatccggatgacgggcgagtaatgtcgccgtcccttcggggcatccgagacaggtggtgcatggttgtcgtcagctcgtgtcgtgagatgttgggttaagtcccgcaacgagcgcaacccttatcttcagtagccagcatataaggtgggcactctggagagactgccagggagaacctggaggaaggtggggatgacgtcaaatcatcatgccccttatggccagggctacacacgtgctacaatggcgtaaacaaagggaagcgagagggtgacctggagcgaatcccaaaaataacgtctcagttcggattgtagtctgcaactcgactacatgaagctggaatcgctagtaatcgcggatcagcatgccgcggtgaatacgttcccgggtcttgtacacaccgcccgtcacaccatgggagtcagtaacgcccgaagccagtg

SEQ ID NO: 1669 - DNA, 898 bp, Ruminococcus sp.
  K-1
  modified_base (719)..(720): a, c, t, g, unknown or other
  modified_base (723)..(723): a, c, t, g, unknown or other
  modified_base (824)..(824): a, c, t, g, unknown or other
  modified_base (877)..(877): a, c, t, g, unknown or other
gtggcggacgggtgagtaacgcgtgggtaacctgccttatacagggggataacagtcagaaatggctgctaataccgcataagcgcacagagctgcatggctcagtgtgaaaaactccggtggtataagatggacccgcgttggattagcttgttggtggggtaacggcccaccaaggcgacgatccatagccggcctgagagggtgaacggccacattgggactgagacacggcccagactcctacgggaggcagcagtggggaatattgcacaatgggggaaaccctgatgcagcgacgccgcgtgaaggaagaagtatctcggtatgtaaacttctatcagcagggaagatagtgacggtacctgactaagaagccccggctaactacgtgccagcagccgcggtaatacgtagggggcaagcgttatccggatttactgggtgtaaagggagcgtagacggtgtggcaagtctgatgtgaaaggcatgggctcaacctgtggactgcattggaaactgtcatacttgagtgccggaggggtaagcggaattcctagtgtagcggtgaaatgcgtagatattaggaggaacaccagtggcgaaggcggcttactggacggtaactgacgttgaggctcgaaagcgtggggagcaaacaggattagataccctggtagtccacgccgtaaacgatgaatactaggtgtcggggagcnnagntcttcggtgccgtcgcaaacgcagtaagtattccacctggggagtacgttcgcaagaatgaaactcaaaggaattgacggggacccgcacaagcggtggancatgtggtttaattcgaagcaacgcgaagaaccttaccaagtcttgacatccncctgaccgatccttaaccgga

SEQ ID NO: 1670 - DNA, 1361 bp, Ruminococcus torques
ggatgaagaggattgtgactgagcggcggacgggtgagtaacgcgtgggtaacctgcctcatacagggggataacagttagaaatgactgctaataccgcataagaccacagcaccgcatggtgcgggggtaaaaactccggtggtatgagatggacccgcgtctgattagctagttggtaaggtaacggcttaccaaggcgacgatcagtagccgacctgagagggtgaccggccacattgggactgagacacggcccaaactcctacgggaggcagcagtggggaatattgcacaatgggggaaaccctgatgcagcgacgccgcgtgagcgaagaagtatttcggtatgtaaagctctatcagcagggaagaaaatgacggtacctgactaagaagcaccggctaaatacgtgccagcagccgcggtaatacgtatggtgcaagcgttatccggatttactgggtgtaaagggagcgtagacggatgggcaagttgatgtgaaaacccggggctcaaccccgggactgcattggaaactgttcatctagagtgctggagaggtaagtggaattcctagtgtagcggtgaaatgcgtagatattaggaggaacaccagtggcgaaggcggcttactggacagtaactgacgttgaggctcgaaagcgtggggagcaaacaggattagataccctggtagtccacgccgtaaacgatgactactaggtgtcgggtggcaaagccattcggtgccgcagcaaacgcaataagtagtccacctggggagtacgttcgcaagaatgaaactcaaaggaattgacggggacccgcacaagcggtggagcatgtggtttaattcgaagcaacgcgaagaaccttacctgctcttgacatcccgctgaccggacggtaatgcgtccttcccttcggggcagcggagacaggtggtgcatggttgtcgtcagctcgtgtcgtgagatgttgggttaagtcccgcaacgagcgcaacccctatctttagtagccagcggccaggccgggcactctagagagactgccggggataacccggaggaaggtggggatgacgtcaaatcatcatgccccttatgagcagggctacacacgtgctacaatggcgtaaacaaagggaagcgagaccgcgaggtggagcaaatcccaaaaataacgtctcagttcggattgtagtctgcaactcgactacatgaagctggaatcgctagtaatcgcgaatcagaatgtcgcggtgaatacgttcccgggtcttgtacacaccgcccgtcacaccatgggagtcagtaacgcccgaagtcagtgacccaaccgtaaggagggagct

SEQ ID NO: 1671 - DNA, 1375 bp, Saccharomonospora viridis
  modified_base (95)..(95): a, c, t, g, unknown or other
  modified_base (128)..(128): a, c, t, g, unknown or other
  modified_base (155)..(155): a, c, t, g, unknown or other
  modified_base (167)..(167): a, c, t, g, unknown or other
  modified_base (293)..(293): a, c, t, g, unknown or other
  modified_base (341)..(341): a, c, t, g, unknown or other
  modified_base (776)..(776): a, c, t, g, unknown or other
  modified_base (854)..(854): a, c, t, g, unknown or other
  modified_base (890)..(890): a, c, t, g, unknown or other
  modified_base (917)..(917): a, c, t, g, unknown or other
  modified_base (920)..(920): a, c, t, g, unknown or other
  modified_base (1001)..(1001): a, c, t, g, unknown or other
  modified_base (1030)..(1031): a, c, t, g, unknown or other
  modified_base (1172)..(1172): a, c, t, g, unknown or other
  modified_base (1179)..(1179): a, c, t, g, unknown or other
  modified_base (1181)..(1181): a, c, t, g, unknown or other
  modified_base (1289)..(1290): a, c, t, g, unknown or other
  modified_base (1292)..(1292): a, c, t, g, unknown or other
  modified_base (1294)..(1294): a, c, t, g, unknown or other
  modified_base (1298)..(1298): a, c, t, g, unknown or other
  modified_base (1333)..(1333): a, c, t, g, unknown or other
  modified_base (1354)..(1354): a, c, t, g, unknown or other
tgagtggcgaacgggtgagtaacacgtgggtaatctgccctgtactctgggataagcctgggaaactgggtctaataccggataggcaccagctnccgcatggtggtgtgtggaaagctgcggcggtncaggatgagccggcggcccatcagctngttggtggggtnatggcctaccaaggcgacgacgggtagccggcctgagagggtgaccggccacactgggactgagacacggcccagactcctaccggaggcagcagtggggaatattgcacaatggacggaagcctnatgcagcgacgccgcgtgggggatgacggccttcgggttgtaaacccntttcgcccgggacgaagcgagagtgacggtaccgggagaagaagcaccggctaactacgtgccagcagccgcggtaatacgtagggtgcaagcgtggtccggaatgattgggcgtaaagagctcgtaggcggtgtgtcgcgtctgccgtgaaaacctgcggctgaaccgtgggcgtgcggtggatacgggcacactggagttcggtaggggagactggaattcctggtgtagcggtgaaatgcgcagatatcaggaggaacgccagtggcgaaggcggggctctgggccgaaactgacgctgaggagcgaaagcgtggggagcgaacaggattagataccctggtagtccacgccgtaaacggtgggcgctaggtgtgggatgctgtgcacgtgtcccgtgccgtagctaacgcatgaagcgccccgcctggggngtacggccgcaaggctaaaactcaaaggaatggacgggggcccgcacaagcggcggagcatgtggattaattcgatgnaacgcgaagaacctgacctgggtgggacatgcactngaccggcgtagagatacgccggccctngtngctggtgcacaggtggtgcatggctgtcgtcagctcgtgtcgtgagatgttgggttaagtcccgcaacgagcgcaaccctngtcccatgttgccagcgggtaatgccggnnactcgtgggagactgccggggttaactcggaggaaggtggggatgacgtcaagtcatcatgccccttatgcccagggctgcacacatgctacaatggccagtacagagggtggcgagaccgtgaggtggagcgaatcccgnaaagctngnctgagttcggatcgtggtctgcaactcgactgcgtgaagtcggagtcgctagtaatcgcagatcagcaacgctgcggtgaatrcgttcccgggccttgtacacaccgnncntnacgncatgaaagtcggtaacacccgaagcccatggcctnaccccgtcaggggagggagtngtcgaaggtgggacccgcgat

SEQ ID NO: 1672 - DNA, 1545 bp, Salmonella enterica
ttaaattgaagagtttgatcatggctcagattgaacgctggcggcaggcctaacacatgcaagtcgaacggtaacaggaagcagcttgctgcttcgctgacgagtggcggacgggtgagtaatgtctgggaaactgcctgatggagggggataactactggaaacggtggctaataccgcataacgtcgcaagaccaaagagggggaccttcgggcctcttgccatcagatgtgcccagatgggattagctagttggtgaggtaacggctcaccaaggcgacgatccctagctggtctgagaggatgaccagccacactggaactgagacacggtccagactcctacgggaggcagcagtggggaatattgcacaatgggcgcaagcctgatgcagccatgccgcgtgtatgaagaaggccttcgggttgtaaagtactttcagcggggaggaaggtgttgtggttaataaccgcagcaattgacgttacccgcagaagaagcaccggctaactccgtgccagcagccgcggtaatacggagggtgcaagcgttaatcggaattactgggcgtaaagcgcacgcaggcggtctgtcaagtcggatgtgaaatccccgggctcaacctgggaactgcattcgaaactggcaggcttgagtcttgtagaggggggtagaattccaggtgtagcggtgaaatgcgtagagatctggaggaataccggtggcgaaggcggccccctggacaaagactgacgctcaggtgcgaaagcgtggggagcaaacaggattagataccctggtagtccacgccgtaaacgatgtctacttggaggttgtgcccttgaggcgtggcttccggagctaacgcgttaagtagaccgcctggggagtacggccgcaaggttaaaactcaaatgaattgacgggggcccgcacaagcggtggagcatgtggtttaattcgatgcaacgcgaagaaccttacctggtcttgacatccacggaagttttcagagatgagaatgtgccttcgggaaccgtgagacaggtgctgcatggctgtcgtcagctcgtgttgtgaaatgttgggttaagtcccgcaacgagcgcaacccttatcctttgttgccagcgattaggtcgggaactcaaaggagactgccagtgataaactggaggaaggtggggatgacgtcaagtcatcatggcccttacgaccagggctacacacgtgctacaatggcgcatacaaagagaagcgacctcgcgagagcaagcggacctcataaagtgcgtcgtagtccggattggagtctgcaactcgactccatgaagtcggaatcgctagtaatcgtggatcagaatgccacggtgaatacgttcccgggccttgtacacaccgcccgtcacaccatgggagtgggttgcaaaagaagtaggtagcttaaccttcgggagggcgcttaccactttgtgattcatgactggggtgaagtcgtaacaaggtaaccgtaggggaacctgcggttggatcacctccttac

SEQ ID NO: 1673 - DNA, 1545 bp, Salmonella enterica; identical to SEQ ID NO: 1672

SEQ ID NO: 1674 - DNA, 1545 bp, Salmonella enterica; identical to SEQ ID NO: 1672

SEQ ID NO: 1675 - DNA, 1545 bp, Salmonella enterica; identical to SEQ ID NO: 1672

SEQ ID NO: 1676 - DNA, 1545 bp, Salmonella enterica; identical to SEQ ID NO: 1672

SEQ ID NO: 1677 - DNA, 1545 bp, Salmonella enterica; identical to SEQ ID NO: 1672

SEQ ID NO: 1678 - DNA, 1545 bp, Salmonella enterica; identical to SEQ ID NO: 1672

SEQ ID NO: 1679 - DNA, 1545 bp, Salmonella enterica; identical to SEQ ID NO: 1672

SEQ ID NO: 1680 - DNA, 1545 bp, Salmonella enterica; identical to SEQ ID NO: 1672

SEQ ID NO: 1681 - DNA, 1416 bp, Salmonella typhimurium
catgcaagtcgaacggtaacaggaagcagcttgctgcttcgctgacgagtggcggacgggtgagtaatgtctgggaaactgcctgatggagggggataactactggaaacggtggctaataccgcataacgtcgcaagaccaaagagggggaccttcgggcctcttgccatcagatgtgcccagatgggattagcttgttggtgaggtaacggctcaccaaggcgacgatccctagctggtctgagaggatgaccagccacactggaactgagacacggtccagactcctacgggaggcagcagtggggaatattgcacaatgggcgcaagcctgatgcagccatgccgcgtgtatgaagaaggccttcgggttgtaaagtactttcagcggggaggaaggtgttgtggttaataaccgcagcaattgacgttacccgcagaagaagcaccggctaactccgtgccagcagccgcggtaatacggagggtgcaagcgttaatcggaattactgggcgtaaagcgcacgcaggcggtctgtcaagtcggatgtgaaatccccgggctcaacctgggaactgcattcgaaactggcaggcttgagtcttgtagaggggggtagaattccaggtgtagcggtgaaatgcgtagagatctggaggaataccggtggcgaaggcggccccctggacaaagactgacgctcaggtgcgaaagcgtggggagcaaacaggattagataccctggtagtccacgccgtaaacgatgtctacttggaggttgtgcccttgaggcgtggcttccggagctaacgcgttaagtagaccgcctggggagtacggccgcaaggttaaaactcaaatgaattgacgggggcccgcacaagcggtggagcatgtggtttaattcgatgcaacgcgaagaaccttacctggtcttgacatccacagaagtttccagagatggattggtgccttcgggaactgtgagacaggtgctgcatggctgtcgtcagctcgtgttgtgaaatgttgggttaagtcccgcaacgagcgcaacccttatcctttgttgccagcgattaggtcgggaactcaaaggagactgccagtgataaactggaggaaggtggggatgacgtcaagtcatcatggcccttacgaccagggctacacacgtgctacaatggcgcatacaaagagaagcgacctcgcgagagcaagcggacctcataaagtgcgtcgtagtccggattggagtctgcaactcgactccatgaagtcggaatcgctagtaatcgtggatcagaatgccacggtgaatacgttcccgggccttgtacacaccgcccgtcacaccatgggagtgggttgcaaaagaagtaggtagcttaaccttcgggagggcgcttaccac

SEQ ID NO: 1682 - DNA, 1545 bp, Salmonella enterica; identical to SEQ ID NO: 1672

SEQ ID NO: 1683 - DNA, 1498 bp, Salmonella bongori
ttgatcatggctcagattgaacgctggcggcaggcctaacacatgcaagtcgaacggtaacaggaagcagcttgctgcttcgctgacgagtggcggacgggtgagtaatgtctgggaaactgcctggtggagggggataactactggaaacggtggctaataccgcataacgtcgcaagaccaaagagggggaccttcgggcctcttgccatcagatgtgcccagatgggattagcttgttggtggggtaacggcccaccaaggcgacgatccctagctggtctgagaggatgaccagccacactggaactgagacacggtccagactcctacgggaggcagcagtggggaatattgcacaatgggcgcaagcctgatgcagccatgccgcgtgtatgaagaaggccttcgggttgtaaagtactttcagcggggaggaaggcghcaaggttaataaccttgttgattgacgttacccgcagaagaagcaccggctaactccgtgccagcagccgcggtaatacggagggtgcaagcgttaatcggaattactgggcgtaaagcgcacgcaggcggtctgtcaagtcggatgtgaaatccccgggctcaacctgggaactgcatccgaaactggcaggcttgagtctcgtagaggggggtagaattccaggtgtagcggtgaaatgcgtagagatctggaggaataccggtggcgaaggcggccccctggacgaagactgacgctcaggtgcgaaagcgtggggagcaaacaggattagataccctggtagtccacgccgtaaacgatgtcgacttggaggttgtgcccttgaggcgtggcttccggagctaacgcgttaagtcgaccgcctggggagtacggccgcaaggttaaaactcaaatgaattgacgggggcccgcacaagcggtggagcatgtggtttaattcgatgcaacgcgaagaaccttacctggtcttgacatccacagaaccttgtagagatacgagggtgccttcgggaactgtgagacaggtgctgcatggctgtcgtcagctcgtgttgtgaaatgttgggttaagtcccgcaacgagcgcaacccttatcctttgttgccagcgattaggtcgggaactcaaaggagactgccagtgataaactggaggaaggtggggatgacgtcaagtcatcatggcccttacgaccagggctacacacgtgctacaatggcgcatacaaagagaagcgacctcgcgagagcaagcggacctcataaagtgcgtcgtagtccggattggagtctgcaactcgactccatgaagtcggaatcgctagtaatcgtggatcagaatgccacggtgaatacgttcccgggccttgtacacaccgcccgtcacaccatgggagtgggttgcaaaagaagtaggtagcttaaccttcgggagggcgcttaccactttgtgattcatgactggggtgaagtcgtaacaaggtaacc

SEQ ID NO: 1684 - DNA, 1545 bp, Salmonella enterica; identical to SEQ ID NO: 1672

SEQ ID NO: 1685 - DNA, 1545 bp, Salmonella enterica; identical to SEQ ID NO: 1672

SEQ ID NO: 1686 - DNA, 1416 bp, Salmonella typhimurium; identical to SEQ ID NO: 1681

SEQ ID NO: 1687 - DNA, 1363 bp, Sarcina ventriculi
  modified_base (11)..(12): a, c, t, g, unknown or other
tcgagcgaganngttcttcggagcttttctagcggcggacgggtgagtaacacgtgggcaacctgcctcatagaggggaatagccttccgaaaggaagattaataccgcataatattgttgaaaggcatcttttaacaatcaaaggagcaatccgctatgagatgggcccgcggcgcattagctagttggtgaggtaacggctcaccaaggcgacgatgcgtagccgacctgagagggtgatcggccacattggaactgagacacggtccagactcctacgggaggcagcagtggggaatattgcacaatgggggaaaccctgatgcagcaacgccgcgtgagtgatgaaggtcttcggattgtaaagctctgtctttagggacgataatgacggtacctaaggaggaagccacggctaactacgtgccagcagccgcggtaatacgtaggtggcaagcgttatccggatttactgggcgtaaagggagcgtaggcggatatttaagtgggatgtgaaatacccgagcttaacttgggagctgcattccaaactggatatctagagtgcaggagaggagaatggaattcctagtgtagcggtgaaatgcgtagagattaggaagaacaccagtggcgaaggcgattctctggactgtaactgacgctgaggctcgaaagcgtggggagcaaacaggattagataccctggtagtccacgccgtaaacgatgaatactaggtgtaggggccccaagcctctgtgccgccgctaacgcattaagtattccgcctggggagtacggtcgcaagattaaaactcaaaggaattgacggggacccgcacaagcagcggagcatgtggtttaattcgaagcaacgcgaagaaccttacctagacttgacctgtcctgaattaccagtaatgtgggaaattccttcgggaacaggaacacaggtggtgcatggttgtcgtcagctcgtgtcgtgagatgttgggttaagtcccgcaacgagcgcaacccttattgttagttggtaccattaagttgaccactctagcgagactgcccgggttaaccgggaggaaggtggggatgacgtcaaatcatcatgccccttatgtctagggctacacacgtgctacaatggcaagtacaaagagaagcaatactgtgaagtggagcaaaactcaaaaacttgtctcagttcggattgtaggctgaaactcgcctacatgaagctggagttgctagtaatcgcgaatcagaatgtcgcggtgaatacgttcccgggtcttgtacacaccgcccgtcacaccatgagagttggcaatacccgaagtccgtaagctaaccgtaaggag

SEQ ID NO: 1688 - DNA, 1557 bp, Scardovia inopinata
  modified_base (967)..(967): a, c, t, g, unknown or other
agagtttgatcatggctcaggacgaacgctggcggcgtgcttaacacatgcaagtcgaacgggatcctgcttggtttttgctgggtgggtgagagtggcgaacgggtgagtaatgcgtgactaacctgccgtgtagttgggtatagctcctggaaacgggtggtaataccgaatggtccactgggctgcatggtctggtgggaaagttttgtgtgctatgcgatggggtcgcgtcctatcagcttgttggtggggtgatggcctaccaaggcttcgacgggtagccggcctaagagggcgaccggccacattgggactgagatacgcccagactcctacgggaggcagcagtggggaatattgcacaatggggggaaccctgatgcagcgacgccgcgtgcgggatggaggccttcgggttgtgaaccgcttttattggggagcaagctggccctgtgttgggttggtgagtgtacttggtgaataagcaccggccaactacgtgccagcagccgcggtaatacgtagggtgccagcgttgtccggatttattgggcgtaaagggctcgtaggcggttcgtcgcgtctggtgtgaaagcttactgcttaacggtgggtttgcgttggatacgggcgggcttgagtgcagtaggggagactggaattctcggtgtaacggtggaatgtgtagatatcgggaagaacacctatggcgaaggcaggtctctgggctgttactgacgctgaggagcgaaagcgtggggagcgaacaggattagataccctggtagtccacgctgtaaacggtggacgctggatgtggggcctatttccacgggttctgtgtcggagctaacgcgttaagcgtcccgcctggggagtacggccgcaaggttaaaactcaaagaaattgacgggggcccgcacaagcggcggagcatgcggattaattcgatgcaacgcgaanaaccttaccagggcttgacatgtgagcgttgatcttagagatagggtttcccttcggggcgctttcacaggtggtgcatggtcgtcgtcagctcgtgtcgtgagatgttgggttaagtccccgcaaacgagcgcaacccttgccttgtgttgccagccggttcttgcccggggaactcaacaaagggaaccgcccgggggttaaacttcgggaaggaaagggtgggggatgacgtccagaatcatcatgccccttaacgtcctggggcttcaacgcatgctacaatggctggtacagcggggatgcgatacggtgacgtggagcggatcctgtaaaaccggtctcagttcggatcggagcctgcaactcggctccgtgaaggtggagtcgctagtaatcgcggatcagcagtgccgcggtgaatgcgttcccgggccttgtacacaccgcccgtcaagtcatgaaagtgggcagcacccgaagccggtggcctaacccttgtggggagaaccgtctaaggtgaggttcgcgattgggactaagtcgtaacaaggtagccgtaccggaaggtgcggctggatcacctcctt

SEQ ID NO: 1689 - DNA, 1294 bp, Scardovia wiggsiae
gacgaacgctggcggcgtgcttaacacatgcaagtcgaacgagtggcgaacgggtgagtaatgcgtgactaacctgccgtatggttggggatagctcctggaaacgggtggtaatacccaatgctgaaaggtgccatatgatggggtcgcgtcctatcagcttgttggtggggtgatggcctaccaaggcgtcgacgggtagccggcctaagagggcgaccggccacattgggactgagatacggcccagactcctacgggaggcagcagtggggaatattgcacaatgggcgcaagcctgatgcagcgacgccgcgtgcgggatggaggccttcgggttgtaaaccgcttttataggggggcatgagtggactttatgaataagcaccggctaactacgtgccagcagccgcggtaatacgtagggtgcaagcgttgtccggatttattgggcgtaaagggctcgtaggcggtttgttgcgtctggtgtgaaagcttactgcttaacggtaggttgcgctggatacgggcaggcttgagtgcagtaggggagactggaattctcggtgtaacggtggaatgtgtagatatcgggaagaacacctatggcgaaggcaggtctctgggctgactgacgctgaggagcgaaagcgtggggagcgaacaggattagataccctggtagtccatgctgtaaacggtggacgctggatgtggggcgttctgtgtcggagctaacgcgttaagcgtcccgcctggggagtacggccgcaaggttaaaactcaaagaaattgacgggggcccgcacaagcggcggagcatgcggattaattcgatgcaacgcgaagaaccttaccagggcttgacatatacaggtggtgcatggtcgtcgtcagctcgtgtcgtgagatgttgggttaagtcccgcaacgagcgcaacccttgccttgtgttaccagcggccggggactcacaagggaccgccggggttaactcggaggaaggtggggatgacgtcagatcatcatgccccttacgtcctgggcttcacgcatgctacaatggctggcagcgggatgcgatactgtaaggtggagcggatcctgtccggtctcagttcggacggggcctgcaactcggcctcggaaggtggagtcgctagtaatcgcggatcagcagtgccgcggtgaatgcgttcccgggccttgtacacaccgcccgtcaagtcatgaaagtgggcagcacccgaagccggtgcctagggagccgtctaaggtgaggttcgcgattggg

SEQ ID NO: 1690 - DNA, 1504 bp, Segniliparus rotundus
agagtttgattctggctcaggacgaacgctggcggcgtgcctaacacatgcaagtcgaacggtaaggcccttcggggtacacgagtggcgaacgggtgagtaacacgtgggcaatctgccctgcactctgggataagcctgggaaactgggtctaataccggatatgagtctccaccgcatggcggagactggaaagtttttcggtgcaggatgagcccgcggcctatcagctagttggtggggtaatggcctaccaaggcgacgacgggtagccggcctgagagggtgatcggccacactgggactgagacacggcccagactcctacgggaggcagcagtggggaatattgcacaatgggcgaaagcctgatgcagcgacgccgcgtgcgggatgacggccttcgggttgtaaaccgctttcagcagggacgaagcgcaagtgacggtacctgcaaaagaagcaccggctaactacgtgccagcagccgcggtaatacgtagggtgcgagcgttgttcggaattactgggcgtaaagagctcgtaggcggactgtcgcgtcgcctgtgaaagcccgtggctcaaccacgggtctgcaggcgatacgggcagactagagtactgcaggggagactggaattcctggtgtagcggtggaatgcgcagatatcaggaggaacaccggtggcgaaggcgggtctctgggcagtaactgacgctgaggagcgaaagcgtggggagcgaacaggattagataccctggtagtccacgctgtaaacggtgggcgctaggtgtgggtttccttccatgaaatccgtgccgtagctaacgcattaagcgccccgcctggggagtacggccgcaaggctaaaactcaaagaaattgacgggggcccgcacaagcggcggagcatgtggattaattcgatgcaacgcgaagaaccttacctgggtttgacatggactggaaagccgtagagatacggccccccttgtggtcggttcacaggtggtgcatggctgtcgtcagctcgtgtcgtgagatgttgggttaagtcccgcaacgagcgcaacccttgtcctgtgttgccagcgcgtaatggcggggactctcaggaaactgccggggtcaactcggaggaaggtggggacgacgtcaagtcatcatgccccttatgtccagggcttcacacatgctacaatggcgcgtacagagggcagcgatatcgcaaggtggagcgaatcccttaaagcgcgtctcagttcggattggggtctgcaactcgaccccatgaagtcggagtcgctagtaatcgcagatcagcaacgctgcggtgaatacgttcccgggccttgtacacaccgcccgtcaagtcacgaaagtcggtaacacccgaagccggtggcccaaccttttaggagggagccgtcgaaggtgggattggcgattgggactaagtcgaaacaaggtagccgtaccggaaggtgcggctggatcacct

SEQ ID NO: 1691 - DNA, 1520 bp, Segniliparus rugosus
ctttcacggagagtttgattctggctcaggacgaacgctggcggcgtgcctaacacatgcaagtcgaacgatgaagcccttcggggtggattagtggcgaacgggtgagtaacacgtgggcaatctgccctgcactctgggataagcctgggaaactgggtctaataccggatatgagcttccaccgcatggtggaggttggaaagtttttcggtgcaggatgagcccgcggcctatcagctagttggtggggtaacggcctaccaaggcgacgacgggtagccggcctgagagggtgatcggccacactgggactgagacacggcccagactcctacgggaggcagcagtggggaatattgcacaatgggcgaaagcctgatgcagcgacgccgcgtgagggatgacggccttcgggttgtaaacctctttcagcagggacgaagcgcaagtgacggtacctgcaaaagaagcaccggctaactacgtgccagcagccgcggtaatacgtagggtgcgagcgttgttcggatttactgggcgtaaagagctcgtaggcggactgtcgcgtcgcctgtgaaagcccgtggctcaaccacgggtctgcaggcgatacgggcagactagagtactgcaggggagactggaattcctggtgtagcggtggaatgcgcagatatcaggaggaacaccggtggcgaaggcgggtctctgggcagtaactgacgctgaggagcgaaagcgtggggagcgaacaggattagataccctggtagtccacgctgtaaacggtgggcgctaggtgtgggtttccttccatgaaatccgtgccgtagctaacgcattaagcgccccgcctggggagtacggccgcaaggctaaaactcaaagaaattgacgggggcccgcacaagcggcggagcatgtggattaattcgatgcaacgcgaagaaccttacctgggtttgacatggactggaaagccgtagagatacggccccccttgtggtcggttcacaggtggtgcatggctgtcgtcagctcgtgtcgtgagatgttgggttaagtcccgcaacgagcgcaacccttgtcctgtgttgccagcgcgtaatggcggggactctcaggaaactgccggggtcaactcggaggaaggtggggacgacgtcaagtcatcatgccccttatgtccagggcttcacacatgctacaatggcgcgtacagagggcagcgatatcgcaaggtggagcgaatcccttaaagcgcgtctcagttcggattggggtctgcaactcgaccccatgaagtcggagtcgctagtaatcgcagatcagcaacgctgcggtgaatacgttcccgggccttgtacacaccgcccgtcaagtcacgaaagtcggtaacacccgaagccggtggcccaaccttttaggagggagccgtcgaaggtgggattggcgattgggactaagtcgaaacaaggtagccgtaccggaaggtgcggctggatcacctcctttct

SEQ ID NO: 1692 - DNA, 1520 bp, Selenomonas artemidis
gagtttgatcctggctcaggacgaacgctggcggcgtgcttaacacatgcaagtcgaacggagcgaatgaaagcttgcttttatgagcttagtggcaaacgggtgagtaacacgtagacaacctgccgatcagatggggacaacattccgaaaggaatgctaataccgaatggcgtgtaggggaggcatcttccctacatgaaagatggcctctatatataagctatcactgatcgatgggtctgcgtctgattagctagtaggtaaggtaacggcttacctaggcgacgatcagtagccggtctgagaggatgaacggccacattgggactgagacacggcccagactcctacgggaggcagcagtggggaatcttccgcaatgggcgcaagcctgacggagcaacgccgcgtgagtgaagaaggtcttcggatcgtaaagctctgttgaaggggacgaacgtacataagttgaataagcttatgtaatgacggtaccttttgaggaagccacggctaactacgtgccagcagccgcggtaatacgtaggtggcgagcgttgtccggaatcattgggcgtaaagggagcgcaggcggccatgtaagtcttgcttaaaagttcggggctcaaccccgtgatgggcaagaaactatatggcttgagtgcaggagaggaaagcggaattcccagtgtagcggtgaaatgcgtagatattgggaggaacaccagtggcgaaggcggctttctggactgcaactgacgctgaggctcgaaagccaggggagcgaacgggattagataccccggtagtcctggccgtaaacgatggatactaggtgtgggaggtatcgacccctaccgtgccggagttaacgcaataagtatcccgcctggggagtacggtcgcaagactgaaactcaaaggaattgacggggacccgcacaagcggtggagtatgtggtttaattcgaagcaacgcgaagaaccttaccaggtcttgacattgattgaaaggcgtagagatacgtccctctcttcggagacaagaaaacaggtggtgcatggctgtcgtcagctcgtgtcgtgagatgttgggttaagtcccgcaacgagcgcaacccctgtcctttgttgccagcatgtagtggtgggcactcaaaggagactgccgcggagaacgcggaggaaggcggggatgacgtcaagtcatcatgccccttatgacctgggctacacacgtactacaatgggacggacagagagcagcgagagagcgatcttaagcgaacctcaaaaaccgtttctcagttcggattgcaggctgcaactcgcctgcatgaagtcggaatcgctagtaatcgcaggtcagcatactgcggtgaatacgttcccgggtcttgtacacaccgcccgtcacaccacggaagtcgttcacacccgaagccggcgcagccgtctaaggtggggaaggtgactggggtgaagtcgtaacaaggtagccgtatcggaaggtgcgg

SEQ ID NO: 1693 - DNA, 1520 bp, Selenomonas dianae
gagtttgatcctggctcaggacgaacgctggcggcgtgcttaacacatgcaagtcgaacggagcgaatgaaagcttgcttttatgagcttagtggcaaacgggtgagtaacacgtagacaacctgccgacaggatggggacaacattccgaaaggaatgctaataccgaatgaagcggatgggaggcatctcctatccgtgaaagatggcctctatttataagctatcacctgtcgatgggtctgcgtctgattagctggttggtgaggtaacggctcaccaaggcgacgatcagtagccggtctgagaggatgaacggccacattgggactgagacacggcccagactcctacgggaggcagcagtggggaatcttccgcaatgggcgcaagcctgacggagcaacgccgcgtgagtgaagaaggtcttcggatcgtaaagctctgttgacggggacgaacgtgcgagaggtgaataaactcttgcaatgacggtacctgtcgaggaagccacggctaactacgtgccagcagccgcggtaatacgtaggtggcgagcgttgtccggaatcattgggcgtaaagggagcgcaggcgggcatataagtctttcttaaaagttcggggctcaaccccgtgatgggaaagaaactatgtgtcttgagtacaggagaggaaagcggaattcccagtgtagcggtgaaatgcgtagatattgggaggaacaccagtggcgaaggcggctttctggactgcaactgacgctgaggctcgaaagccaggggagcgaacgggattagataccccggtagtcctggccgtaaacgatggatactaggtgtgggaggtatcgacccctaccgtgccggagttaacgcaataagtatcccgcctggggagtacggtcgcaagactgaaactcaaaggaattgacggggacccgcacaagcggtggagtatgtggtttaattcgaagcaacgcgaagaaccttaccaggccttgacattgactgaaagcgctagagatagctccctctcttcggagacaggaaaacaggtggtgcatggctgtcgtcagctcgtgtcgtgagatgttgggttaagtcccgcaacgagcgcaacccctgttctttgttgccatcacgttatggtgggcactcaaaggagactgccgcggagaacgcggaggaaggcggggatgacgtcaagtcatcatgccccttatggtctgggctacacatgtactacaatggaacggacagagagcagcgaacccgcgagggcaagcgaacctcaaaaaccgtttcccagttcggattgcaggctgcaactcgcctgcatgaagtcggaatcgctagtaatcgcaggtcagcatactgcggtgaatacgttcccgggtcttgtacacaccgcccgtcacaccacggaagtcgttcacacccgaagccggcgcagccgtctaaggtggggaaggtgactggggtgaagtcgtaacaaggtagccgtatcggaaggtgcgg

SEQ ID NO: 1694 - DNA, 1484 bp, Selenomonas flueggei
  modified_base (77)..(77): a, c, t, g, unknown or other
  modified_base (82)..(82): a, c, t, g, unknown or other
  modified_base (89)..(90): a, c, t, g, unknown or other
  modified_base (216)..(216): a, c, t, g, unknown or other
  modified_base (218)..(218): a, c, t, g, unknown or other
  modified_base (574)..(574): a, c, t, g, unknown or other
  modified_base (593)..(593): a, c, t, g, unknown or other
  modified_base (602)..(602): a, c, t, g, unknown or other
  modified_base (657)..(657): a, c, t, g, unknown or other
  modified_base (731)..(731): a, c, t, g, unknown or other
  modified_base (781)..(781): a, c, t, g, unknown or other
  modified_base (821)..(821): a, c, t, g, unknown or other
  modified_base (946)..(946): a, c, t, g, unknown or other
  modified_base (948)..(948): a, c, t, g, unknown or other
  modified_base (1019)..(1019): a, c, t, g, unknown or other
  modified_base (1148)..(1148): a, c, t, g, unknown or other
  modified_base (1158)..(1158): a, c, t, g, unknown or other
  modified_base (1305)..(1305): a, c, t, g, unknown or other
gagagtttgatcctggctcaggacgaacgctggcggcgtgcttaacacatgcaagtcgaacggagcgaatgaaagcntgcanttatganncttagtggcaaacgggtgagtaacacgtagacaacctgccgacaggatggggacaacattccgaaaggaatgctaataccgaatgaagcggaggagaggcatctctcttccgtgaaagatggccantntttatgctatcacctgttgatgggtctgcgtctgattagctggtaggtgaggtaacggctcacctaggcgacgatcagtagccggtctgagaggatgaacggccacattgggactgagacacggcctagactcctacgggaggcagcagtggggaatcttccgcaatgggcgcaagcctgacggagcaacgccgcgtgagtgaagaaggtcttcggatcgtaaagctctgttgttcgggacgaacgtgcgtgatgcgaacagtgtcatgcaatgacggtacctgtcgaggaagccacggctaactacgtgccagcagccgcggtaatacgtaggtggctagcgttgtccggaatcnttgggcgtaaagggagcgnaggcgggcnagtaagtctttcttaaaagtgcggggctcaaccccgtgatgggaaagaaactacntgtcttgagtacgggagaggaaagcggaattcccagtgtagcggtgaaatgcgtagatattgggaggaacgccngtggcgaaggcggctttctggactgcgactgacgctgaggctcgaaagcnaggggagcgaacgggattagataccccggtagtcctggcngtaaacgatggatactaggtgtgggaggtatcgacccctaccgtgccggagttaacgcaataagtatcccgcctggggagtacggccgcaaggctgaaactcaaaggaattgacggggacccgcncnagcggtggagtatgtggtttaattcgaagcaacgcgaacaaccttaccaggccttgacattgactgaaagngctagagatagctccctctcttcggagacaggaaaacaggtggtgcatggctgtcgtcagctcgtgtcgtgagatgttgggttaagtcccgcaacgagcgcaacccctgtcctttgttgccatcacgtnaaggtgggcnctcaaaggagactgccgcggagaacgcggaggaaggcggggatgacgtcaagtcatcatgccccttatgctctgggctacacacgtactacaatggaacggacagagagcagcgaacccgcgagggcaagcgaacctcaaaaaccgnttcccagttcggattgcaggctgcaacccgcctgcatgaagtcggaatcgctagtaatcgcaggtcagcatactgcggtgaatacgttcccgggtcttgtacacaccgcccgtcacaccacggaagtcattcacacccgaagccggctargccgtctaaggtggggaaggtgactgggg

SEQ ID NO: 1695 - DNA, 1296 bp, Selenomonas sp.
  C1
gacgaacgctggcggcgtgcttaacacatgcaagtcgaacgagtggcaaacgggtgagtaacgcgtagacaacctgccgcaaagatggggacaacagcccgaaagggctgctaataccgaatgttcaaagtcgctttgcgatgggtctgcgcctgattagctggttggcggggcaacggcccgccaaggcgacgatcagtagccggtctgagaggatggacggccacattgggactgagacacggcccagactcctacgggaggcagcagtggggaatcttccgcaatgggcgaaagcctgacggagcaacgccgcgtgggtgaagaaggtcttcggatcgtaaagccctgttgcccgggacgatgacggtaccgggcgaggaagccacggccaactacgtgccagcagccgcggtaatacgtaggtggcgagcgttgtccggaatcattgggcgtaaagggagcgcaggcgggcatgcaagtccatcttaaaagcgcggggcccaaccccgtgaggggatggaaactgcgtgccttgagtgcaggagaggaaagcggaattcccagtgtagcggtgaaatgcgtagatattgggaggaacaccagtggcgaaggcggctttctggactgactgacgctgaggctcgaaagccaggggagcgaacgggattagataccccggtagtcctggccgtaaacgatgaatgctaggtgtgggggctcccgtgccggagtcaacgcaataagcattccgcctggggagtacggccgcaaggctgaaactcaaaggaattgacgggggcccgcacaagcggtggagtatgtggttcaattcgacgcaacgcgaagaaccttaccagggcttgacattaacaggtggtgcatggctgtcgtcagctcgtgtcgtgagatgttgggtcaagtcccgcaacgagcgcaacccctgtccctcgttgccagcgcgcggggactcaagggagactgccgcggacaacgcggaggaaggcggggacgacgtcaagtcatcatgccccttatgccctgggctacacacgtactacaatgggatgcagagggcagcgagcccgcgagggcgagcgaaccccggcatcccccagttcggatgcaggctgaaacccgcctgcagaagttggaatcgctagtaatcgcaggtcagcatactgcggtgaatacgttcccgggccttgtacacaccgcccgtcacaccacggaagtcattcacacccgaagccggcacgcagcaagccgcccaaggtgggggcgatgactggggtg

SEQ ID NO: 1696 - DNA, 1319 bp, Selenomonas sp.
  C2
gacgaacgctggcggcgtgcttaacacatgcaagtcgaacgagtggcaaacgggtgagtaacgcgtaggcaacctgccctcaggatggggacaacggctcgaaagagccgctaataccgaatgactaaagtcgcctaaggatgggcctgcgtctgattagccagttggtgaggtaacggctcaccaaagcgacgatcagtagccggtctgagaggatgaacggccacaatgggactgagacacggcccatactcctacgggaggcagcagtggggaatcttccgcaatgggcgaaagcctgacggagcaacgccgcgtgagtgaagaaggtcttcggatcgtaaagctctgttgtcggggacgaagacggtacctgacgaggaagccacggctaactacgtgccagcagccgcggtaatacgtaggcggcaagcgttgtccggaattattgggcgtaaagggagcgcaggtgggacggtaagtccgtcttaaaaggcaggggctcagcccctgtaagggatggaaactatcgatcttgagtgccggagaggaaagcggaattcccagtgtagcggtgaaatgcgtagatattgggaagaacaccagtggcgaaggcggctttctggacggactgacactgaggctcgaaagccaggggagcgaacgggattagataccccggtagtcctggccgtaaacgatggatactaggtgtaggagctcctgtgccggagttaacgcaataagtatcccgcctggggggtacggtcgcaagactgaaactcaaaggaattgacgggggcccgcacaagcggtggagtatgtggtttaattcgacgcaacgcgaagaaccttaccagggcttgacattaacaggtggtgtatggctgtcgtcagctcgtgtcgtgagatgttgggttaagtcccgcaacgagcgcaacccctatattctgttgccaacagctgggaactcaggatagactgccgcggagaacgcggaggaaggcggggatgacgtcaagtcatcatgccccatatgacctgggctacacacgtactacaatgggatgcagagggcagcgaaagagcgatctggagcgaaccccagcatctcccagttcggatgcaggctgaaacccgcctgcagaagatggaatcgctagtaatcgcaggtcagcatactgcggtgaatacgttcccgggccttgtacacaccgcccgtcacaccacggaagtcattcacacccgaagccggaccgtcgaaggtgggggcgatgactggggtgaagtcgtaacaaggtagccgtatcggaaggtgc

SEQ ID NO: 1697 - DNA, 1329 bp, Selenomonas sp.
  P5
gacgaacgctggcggcgtgcttaacacatgcaagtcgaacgagtggcaaacgggtgagtaacacgtaggcaacctgccgacaggatggggacaacattccgaaaggaatgctaataccgaatgaagaaagtcacctgtcgatgggcctgcgtctgattagccagttggcggggtaacggcccaccaaagcgacgatcagtagccggtctgagaggatgaacggccacattgggactgagacacggcccagactcctacgggaggcagcagtggggaatcttccacaatgggcgaaagcctgatggagcaacgccgcgtgagtgaagaaggtcttcggatcgtaaagctctgttgtacgggacgatgacggtaccgtacgaggaagccacggctaactacgtgccagcagccgcggtaatacgtaggtggcgagcgttgtccggaattattgggcgtaaagggagcgcaggcggacatataagtccatcttaaaagtgcggggctcaaccccgtgaggggatggaaactgtatgccttgagtgcaggagaggaaagcggaattcccagtgtagcggtgaaatgcgtagatattgggaggaacaccagtggcgaaggcggctttctggactgactgacgctgaggctcgaaagccaggggagcgaacgggattagataccccggtagtcctggccgtaaacgatgaatgctaggtgtaggagctcctgtgccggagttaacgcaataagcattccgcctggggagtacggtcgcaagactgaaactcaaaggaattgacgggggcccgcacaagcggtggagtatgtggtttaattcgacgcaacgcgaagaaccttaccagggcttgacattaacaggtggtgcatggctgtcgtcagctcgtgtcgtgagatgttgggttaagtcccgcaacgagcgcaacccctgtcccttgttgccagcacgtgggaactcaagggagactgccgtggagaacgcggaggaaggcggggatgacgtcaagtcatcatgccccttatgtcctgggctacacacgtactacaatgggatgcagagggaagcgagggcgcgagccggagcggatcccagcatcccccagttcggatgcaggctgcaacccgcctgcagaagtcggaatcgctagtaatcgcaggtcagcatactgcggtgaatacgttcccgggccttgtacacaccgcccgtcacaccacggaagtcattcacgcccgaagccggcggccaggcagccgtctaaggcgggggcgatgactggggtgaagtcgtaacaaggtagccgtatcggaaggtgc

SEQ ID NO: 1698 - DNA, 1287 bp, Selenomonas sp.
  P6 oral clone MB3_C41
gacgaacgctggcggcgtgcttaacacatgcaagtcaaacgagtggcaaacgggtgagtaacgcgtaggcaacctgcccttaggatggggacaacggcccgaaaggaccgctaataccgaatgactaaagtcgccgaaggaagggcctgcgtctgattagccagttggtgaggtaacggctcaccaaagcaacgatcagtagccggtctgagaggatgaacggccacaatgggactgagacacggcccatactcctacgggaggcagcagtggggaatcttccgcaatgggcgcaagcctgacggagcaacgccgcgtgagtgaagaaggtcttcggatcgtaaaactctgttgacggggacgatgacggtacctgtcgaggaagccacggctaactacgtgccagcagccgcggtaatacgtaggtggcgagcgttgtccggaatcattgggcgtaaagggagcgcaggcgggcatgtaagtctttcttaaaagttcggggctcaaccccgtgatgggaaagaaactacatgtcttgagtacaggagaggaaagcggaattcccagtgtagcggtgaaatgcgtagatattgggaggaacaccagtggcgaaggcggctttctggactgactgacgctgaggctcgaaagccaggggagcgaacgggattagataccccggtagtcctggccgtaaacgatggatactaggtgtgggagctaccgtgtcggagttaacgcaataagtatcccgcctggggagtacggtcgcaagactgaaactcaaaggaattgacggggacccgcacaagcggtggagtatgtggtttaattcggagcaacgcgaagaaccttaccaggccttgacattaacaggtggtgcatggctgtcgtcagctcgtgtcatgagatgttgggttaagtcccgcaacgagcgcaacccctgttctttgttgccatcacgtgggcactcaaaggagactgccgcggagaacgcggaggaaggcggggatgacgtcaagtcatcatgccccttatggtctgggctacacacgtactacaatggaacgcagagagcagcgaacccgcgagggcaagcgaacctcaacgtttcccagttcggatgcaggctgcaactcgcctgcagaagtcggaatcgctagtaatcgcaggtcagcatactgcggtgaatacgttcccgggtcttgtacacaccgcccgtcacaccacggaagtcgttcacacccgaagccggcgccgtctaaggtggggaaggtgactggggtg

SEQ ID NO: 1699 - DNA, 1460 bp, Selenomonas sp.
  P7 oral clone MB5_C08
gacgaacgctggcggcgtgcttaacacatgcaagtcgaacgggaacctttatttcggtaaaggtgagagtggcaaacgggtgagtaacacgtaggcaacctgccgacaggatggggacaacattccgaaaggaatgctaataccgaatggagtccggggatggcatcatccctggataaaagatggcctctgaatatgctatcgcctgtcgatgggcctgcgtctgattagccagttggcggggtaacggcccaccaaagcgacgatcagtagccggtctgagaggatgaacggccacattgggactgagacacggcccagactcctacgggaggcagcagtggggaatcttccacaatgggcgaaagcctgacggagcaacgccgcgtgagtgaagaaggtcttcggatcgtaaagctctgttgacggggacgaacgtgcaaagggtgaataatcctttgcaatgacggtacctgtcgaggaagccacggctaactacgtgccagcagccgcggtaatacgtaggtggcgagcgttgtccggaatcattgggcgtaaagggagcgcaggcgggcatgtaagtctttcttaaaagttcggggctcaaccccgtgatgggaaagaaactatgtgtcttgagtacaggagaggaaagcggaattcccagtgtagcggtgaaatgcgtagatattgggaggaacaccagtggcgaaggcggctttctggactgcaactgacgctgaggctcgaaagccaggggagcgaacgggattagataccccggtagtcctggccgtaaacgatggatactaggtgtgggaggtatcgacccctaccgtgccggagttaacgcaataagtatcccgcctgggaagtacgatcgcaagattaaaactcaaaggaattgacgggggcccgcacaagcggtggagtatgtggtttaattcgacgcaacgcgaagaaccttaccagggcttgacattgagtgacagacttagagacaagtcattctcttcggagacacgaaaacaggtggtgcatggctgtcgtcagctcgtgtcgtgagatgttgggttaagtcccgcaacgagcgcaacccctgttctttgttgccatcacgtaaaggtgggcactcaaaggagactgccgcggagaacgcggaggaaggcggggatgacgtcaagtcatcatgccccttatggtctgggctacacacgtactacaatggaacggacagagagcagcgaacccgcgagggcaagcgaacctcaaaaaccgtttcccagttcggattgcaggctgcaactcgcctgcatgaagtcggaatcgctagtaatcgcaggtcagcatactgcggtgaatacgttcccgggtcttgtacacaccgcccgtcacaccacggaagtcgttcacacccgaagccggcggagccgtctaaggtggggaaggtgactggggtg

SEQ ID NO: 1700 - DNA, 1296 bp, Selenomonas sp.
  P8 oral clone MB5_P06
gacgaacgctggcggcgtgcttaacacatgcaagtcgaacgagtggcaaacgggtgagtaacgcgtagacaacctgccgcaaagatggggacaacagttcgaaaggactgctaataccgaatgttcaaagtcgctttgcgatgggtctgcgtctgattagctagttggcagggcaacggcctaccaaggcgacgatcagtagccggtctgagaggatgaacggccacattgggactgagacacggcccagactcctacgggaggcagcagtggggaatcttccgcaatgggcgaaagcctgacggagcaacgccgcgtgagtgaagaaggtcttcggatcgtaaagctctgttgccggggacgatgacggtacccggcgaggaagccacggctaactacgtgccagcagccgcggtaatacgtaggtggcgagcgttgtccggaattattgggcgtaaagggagcgcaggcgggcgagtaagtctttcttaaaagtgcggggctcaaccccgtgaggggagagaaactactcatcttgagtgcaggagaggaaagcggaattcctagtgtagcggtgaaatgcgtagatattaggaagaacaccagtggcgaaggcggctttctggactgactgacgctgaggctcgaaagccaggggagcgaacgggattagataccccggtagtcctggccgtaaacgatgaatgctaggtgtaggggctcctgtgccggagttaacgcaataagcattccgcctggggagtacggtcgcaagactgaaactcaaaggaattgacgggggcccgcacaagcggtggagtatgtggtttaattcgacgcaacgcgaagaaccttaccagggcttgacattaacaggtggtgcatggctgtcgtcagctcgtgtcgtgagatgttgggttaagtcccgcaacgagcgcaacccctattctctgttgccagcacgtgggaactcagaggagactgccgcggacaacgcggaggaaggcggggatgacgtcaagtcatcatgccccttatgtcctgggctacacacgtactacaatgggatgcggagagcagcgaagccgcgaggccaagcgaaccccaacatttcccagttcggatgcaggctgcaactcgcctgcagaagatggaatcgctagtaatcgcaggtcagcatactgcggtgaatacgttcccgggccttgtacacaccgcccgtcacaccacggaagtcgttcacacccgaagccggtgggcagctagctgtctaaggcgggggcgatgactggggtg

SEQ ID NO: 1701 - DNA, 1519 bp, Selenomonas infelix
ggagagtttgatcctggctcaggacgaacgctggcggcgtgcttaacacatgcaagtcgaacggagcgaatgaaagcttgcttttatgagcttagtggcaaacgggtgagtaacacgtagacaacctgccgacaggatggggacaacattccgaaaggaatgctaataccgaatgaagcggaggagaggcatctctcctccgtgaaagatggcctctgtatatgctatcacctgtcgatgggtctgcgtctgattagctagttggtgaggtaacggctcaccaaggcgacgatcagtagccggtctgagaggatgaacggccacattgggactgagacacggcccagactcctacgggaggcagcagtggggaatcttccgcaatgggcgcaagcctgacggagcaacgccgcgtgagtgaagaaggtcttcggatcgtaaagctctgttgatggggacgaacgtgcgaagggtgaataatcctttgcaatgacggtacctatcgaggaagccacggctaactacgtgccagcagccgcggtaatacgtaggtggcgagcgttgtccggaatcattgggcgtaaagggagcgcaggcgggcatgtaagtctttcttaaaagttcggggctcaaccccgtgatgggaaagaaactacatgtcttgagtacaggagaggaaagcggaattcccagtgtagcggtgaaatgcgtagatattgggaggaacaccagtggcgaaggcggctttctggactgcaactgacgctgaggctcgaaagccaggggagcgaacgggattagataccccggtagtcctggccgtaaacgatggatactaggtgtgggaggtatcgacccctaccgtgccggagttaacgcaataagtatcccgcctggggagtacggtcgcaagactgaaactcaaaggaattgacggggacccgcacaagcggtggagtatgtggtttaattcgaagcaacgcgaagaaccttaccaggccttgacattgactgtaagagctagagatagctccctctcttcggagacaggaaaacaggtggtgcatggctgtcgtcagctcgtgtcgtgagatgttgggttaagtcccgcaacgagcgcaacccctgttctttgttgccatcacgtaaaggtgggcactcaaaggagactgccgcggagaacgcggaggaaggcggggatgacgtcaagtcatcatgccccttatggtctgggctacacacgtactacaatggaacggacagagagcagcgaacccgcgagggcaagcgaacctcaaaaaccgtttcccagttcggattgcaggctgcaactcgcctgcatgaagtcggaatcgctagtaatcgcaggtcagcatactgcggtgaatacgttcccgggtcttgtacacaccgcccgtcacaccacggaagtcgttcacacccgaagccggcgcagccgtctaaggtggggaaggtgactggggtgaagtcgtaacaaggtagccgtatcggaaggtgc

SEQ ID NO: 1702 - DNA, 1520 bp, Selenomonas noxia
gagtttgatcctggctcaggacgaacgctggcggcgtgcttaacacatgcaagtcgaacggagcgaatgaaagcttgcttttataagcttagtggcaaacgggtgagtaacacgtaggcaacctgccgacaggatggggacaacattccgaaaggaatgctaataccgaatgaagtcagagaagggcatccttttctgatgaaagatggcctctatatataagctatcacctgtcgatgggcctgcgtctgattagctggtaggtgaggtaacggctcacctaggcgacgatcagtagccggtctgagaggatgaacggccacattgggactgagacacggcccagactcctacgggaggcagcagtggggaatcttccgcaatgggcgcaagcctgacggagcaacgccgcgtgagtgaagaaggtcttcggatcgtaaagctctgttgatggggacgaacgtgcctaatgcgaatagttttaggtaatgacggtacccatcgaggaagccacggctaactacgtgccagcagccgcggtaatacgtaggtggctagcgttgtccggaatcattgggcgtaaagggagcgcaggcgggcatgtaagtctttcttaaaagtgcggggctcaaccccgtgatgggaaagaaactatgtgtcttgagtacaggagaggaaagcggaattcccagtgtagcggtgaaatgcgtagatattgggaggaacaccagtggcgaaggcggctttctggactgcaactgacgctgaggctcgaaagccaggggagcgaacgggattagataccccggtagtcctggccgtaaacgatggatactaggtgtgggaggtatcgacccctaccgtgccggagttaacgcaataagtatcccgcctggggagtacggccgcaaggctgaaactcaaaggaattgacggggacccgcacaagcggtggagtatgtggtttaattcgaagcaacgcgaagaaccttaccaggccttgacattgactgaaagagctagagatagctccctctcttcggagacaggaaaacaggtggtgcatggctgtcgtcagctcgtgtcgtgagatgttgggttaagtcccgcaacgagcgcaacccctgttctttgttgccagcatgtaaggatgggcactcaaaggagactgccgcggagaacgcggaggaaggcggggatgacgtcaagtcatcatgccccttatggtctgggctacacacgtactacaatgggacggacagagggcagcgagagagtgatcttaagcgaatctcaaaaaccgtttctcagttcggattgcaggctgcaactcgcctgcatgaagtcggaatcgctagtaatcgcaggtcagcatactgcggtgaatacgttcccgggtcttgtacacaccgcccgtcacaccacggaagtcattcacacccgaagccggctaggccgtctaaggtggggaaggtgactggggtgaagtcgtaacaaggtagccgtatcggaaggtgcgg

SEQ ID NO: 1703 - DNA, 1565 bp, Selenomonas ruminantium
attttatggagagtttgatcctggctcaggacgaacgctggcggcgtgcttaacacatgcaagtcgaacgagacgattgaaagcttgcttttgagagtcgagtggcaaacgggtgagtaacgcgtagacaacctgccgcaaagatggggacaacagtccgaaaggactgctaataccgaatgttgtcagattcccgcatgggagactgattaaagatggcctctacttgtaagctatcgctttgcgatgggtctgcgtctgattagctagttggtggggtaacggcctaccaaggcgacgatcagtagccggtctgagaggatgaacggccacattggaactgagacacggtccagactcctacgggaggcagcagtggggaatcttccgcaatgggcgaaagcctgacggagcaacgccgcgtgagtgaagaagggtttcggctcgtaaagctctgttgacggggacgaatgtgcgaaatgcgaatagtttttcgcaatgacggtacccgtcgaggaagccacggctaactacgtgccagcagccgcggtaatacgtaggtggcgagcgttgtccggaattattgggcgtaaagggagcgcaggcgggaaggcaagtcagtcttaaaagtgcggggctcaaccccgtgatgggattgaaactgtctttcttgagtgcaggagaggaaagcggaattcctagtgtagcggtgaaatgcgtagatattaggaggaacaccagtggcgaaggcggctttctggactgtaactgacgctgaggctcgaaagcgtggggagcgaacaggattagataccctggtagtccacgccgtaaacgatgaatgctaggtgtaggaggtatcgaccccttctgtgccggagttaacgcaataagcattccgcctggggagtacggtcgcaagactgaaactcaaaggaattgacgggggcccgcacaagcggtggagtatgtggtttaattcgacgcaacgcgaagaaccttaccagggcttgacattgagtgaaagatctagagatagatccctctcttcggagacacgaaaacaggtggtgcatggctgtcgtcagctcgtgtcgtgagatgttgggttaagtcccgcaacgagcgcaacccctatcatttgttgccagcacgttatggtgggaactcaaatgagactgccgcggacaacgcggaggaaggcggggatgacgtcaagtcatcatgccccttatgtcctgggctacacacgtactacaatgggatggacagagagcagcgaacccgcgagggcaagcgaaccccataaaccatctcccagttcggattgcaggctgcaacccgcctgcatgaagtcggaatcgctagtaatcgctggtcagcatacagcggtgaatacgttcccgggccttgtacacaccgcccgtcacaccacggaagtcattcacacccgaagccggtgggcaaaccgcaaggatgcagccgtctaaggtgggggcgatgactggggtgaagtcgtaacaaggtagccgtatcggaaggtgcggctggatcacctcctttct

SEQ ID NO: 1704 - DNA, 1270 bp, Selenomonas sp.
  FOBRC9
  modified_base (1084)..(1084): a, c, t, g, unknown or other
  modified_base (1175)..(1175): a, c, t, g, unknown or other
ccctatatgaaagatggcctctatatataagctatcactgatcgatgggtctgcgtctgattagctagtaggtaaggtaacggcttacctaggcgacgatcagtagccggtctgagaggatgaacggccacattgggactgagacacggcccagactcctacgggaggcagcagtggggaatcttccgcaatgggcgcaagcctgacggagcaacgccgcgtgagtgaagaaggtcttcggatcgtaaagctctgttgaaggggacgaacgatcgaggggcgaacaggctctcggtatgacggtaccttttgaggaagccacggctaactacgtgccagcagccgcggtaatacgtaggtggcgagcgttgtccggaatcattgggcgtaaagggagcgcaggcggccatgtaagtcttgcttaaaagttcggggctcaaccccgtgatgggcaagaaactatatggcttgagtgcaggagaggaaagcggaattcccagtgtagcggtgaaatgcgtagatattgggaggaacaccagtggcgaaggcggctttctggactgcaactgacgctgaggctcgaaagccaggggagcgaacgggattagataccccggtagtcctggccgtaaacgatggatactaggtgtgggaggtatcgacccctaccgtgccggagttaacgcaataagtatcccgcctggggagtacggtcgcaagactgaaactcaaaggaattgacggggacccgcacaagcggtggagtatgtggtttaattcgaagcaacgcgaagaaccttaccaggtcttgacattgattgacagggatagagatatcctattctctttggagacaagaaaacaggtggtgcatggctgtcgtcagctcgtgtcgtgagatgttgggttaagtcccgcaacgagcgcaacccctgtcctttgttgccagcatgtagtggtgggcactcaaaggagactgccgcggagaacgcggaggaaggcggggatgacgtcaagtcatcatgccccttatgacctgggctacacacgtactacaatgggacggacagagagcagcgagagngcgaccttaagcgaacctcaaaaaccgtttctcagttcggattgcaggctgcaactcgcctgcatgaagtcggaatcgctagtaatcgcangtcagcatactgcggtgaatacgttcccgggtcttgtacacaccgcccgtcacaccacggaagtcgttcacacccgaagccggcgcagccgtcta

SEQ ID NO: 1705 - DNA, 1356 bp, Selenomonas sp.
  oral clone FT050
gagtttgatcctggctcaggacgaacgctggcggcgtgcttaacacatgcaagtcgaacgagtggcaaacgggtgagtaacacgtagacaacctgccgacaggatggggacaacattccgaaaggaatgctaataccgaatgaagaaagtcacctgttgatgggtctgcgtctgattagctagttggtgaggtaacggctcaccaaggcgacgatcagtagccggtctgagaggatgaacggccacattgggactgagacacggcccagactcctacgggaggcagcagtggggaatcttccgcaatgggcgcaagcctgacggagcaacgccgcgtgagtgaagaaggtcttcggatcgtaaagctctgttgacggggacgatgacggtacctgtcgaggaagccacggctaactacgtgccagcagccgcggtaatacgtaggtggcgagcgttgtccggaatcattgggcgtaaagggagcgcaggcgggccggtaagtcttacttaaaagtgcggggctcaaccccgtgatgggagagaaactatcggtcttgagtacaggagaggaaagcggaattcccagtgtagcggtgaaatgcgtagatattgggaagaacaccagtggcgaaggtggctttctggactgactgacgctgaggctcgaaagccaggggagcgaacgggattagataccccggtagtcctggccgtaaacgatggatactaggtgtgggagctaccgtgccggagttaacgcaataagtatcccgcctggggagtacggccgcaaggctgaaactcaaaggaattgacggggacccgcacaagcggtggagtatgtggtttaattcgaagcaacgcgaagaaccttaccaggccttgacattaacaggtggtgcatggctgtcgtcagctcgtgtcgtgagatgttgggttaagtcccgcaacgagcgcaacccctgttctttgttgccatcagctgggcactcaaaggagactgccgcggagaacgcggaggaaggcggggatgacgtcaagtcatcatgccccttatggcctgggctacacacgtactacaatggaacgcagagagcagcgaacccgcgagggcaagcgaacctcaacgtttcccagttcggatgcaggctgcaacccgcctgcagaagtcggaatcgctagtaatcgcaggtcagcatactgcggtgaatacgttcccgggtcttgtacacaccgcccgtcacaccacggaagtcattcacacccgaagccggcgccgtctaaggtggggaaggtgactggggtgaagtcgtaacaaggtagccgtatcggaaggtgcggctggaacacctcctt

SEQ ID NO: 1706 - DNA, 1356 bp, Selenomonas sp.
  oral clone GI064
gagtttgattctggctcaggacgaacgctggcggcgtgcttaacacatgcaagtcgaacgagtggcaaacgggtgagtaacacgtagacaacctgccgacaggatggggacaacattccgaaaggaatgctaataccgaatgaagaaagtcacctgttgatgggtctgcgtctgattagctagttggtgaggtaacggctcaccaaggcgacgatcagtagccggtctgagaggatgaacggccacattgggactgagacacggcccagactcctacgggaggcagcagtggggaatcttccgcaatgggcgcaagcctgacggagcaacgccgcgtgagtgaagaaggtcttcggatcgtaaagctctgttgacggggacgatgacggtacctgtcgaggaagccacggctaactacgtgccagcagccgcggtaatacgtaggtggcgagcgttgtccggaatcattgggcgtaaagggagcgcaggcgggccggtaagtcttacttaaaagtgcggggctcaaccccgtgatgggagagaaactatcggtcttgagtacaggagaggaaagcggaattcccagtgtagcggtgaaatgcgtagatattgggaagaacaccagtggcgaaggcggctttctggactgactgacgctgaggctcgaaagccaggggagcgaacgggattagataccccggtagtcctggccgtaaacgatggatactaggtgtgggagctaccgtgccggagttaacgcaataagtatcccgcctggggagtacggccgcaaggctgaaactcaaaggaattgacggggacccgcacaagcggtggagtatgtggtttaattcgaagcaacgcgaagaaccttaccaggccttgacattaacaggtggtgcatggctgtcgtcagctcgtgtcgtgagatgttgggttaagtcccgcaacgagcgcaacccctgttctttgttgccatcagctgggcactcaaaggagactgccgcggagaacgcggaggaaggcggggatgacgtcaagtcatcatgccccttatggcctgggctacacacgtactacaatggaacgcagagagcagcgaacccgcgagggcaagcgaacctcaacgtttcccagttcgggtgcaggctgcaacccgcctgcagaagtcggaatcgctagtaatcgcaggtcagcatactgcggtgaatacgttcccgggtcttgtacacaccgcccgtcacaccacggaagtcattcacacccgaagccggcgccgtctaaggtggggaaggtgactggggtgaagtcgtaacaaggtagccgtatcggaaggtgcggctggatcacctcctt

SEQ ID NO: 1707 - DNA, 1356 bp, Selenomonas sp.
  oral clone GT010
gagtttgattctggctcaggacgaacgctggcggcgtgcttaacacatgcaagtcgaacgagtggcaaacgggtgagtaacacgtaggcaacctgccgacaggatggggacaacattccgaaaggaatgctaataccgaatgaagaaagtcacctgtcgatgggcctgcgtctgattagctagttggtgaggtaacggctcaccaaggcgacgatcagtagccggtctgagaggatgaacggccacattgggactgagacacggcccagactcctacgggaggcagcagtggggaatcttccgcaatgggcgcaagcctgacggagcaacgccgcgtgagtgaagaaggtcttcggatcgtaaagctctgttgatggggacgatgacggtacctatcgaggaagccacggctaactacgtgccagcagccgcggtaatacgtaggtggcgagcgttgtccggaatcattgggcgtaaagggagcgcaggcgggcatgtaagtctttcttaaaagttcggggctcaaccccgtgatgggaaagaaactacatgtcttgagtacaggagaggaaagcggaattcccagtgtagcggtgaaatgcgtagatattgggaggaacaccagtggcgaaggcggctttctggactgactgacgctgaggctcgaaagccaggggagcgaacgggattagataccccggtagtcctggccgtaaacgatggatactaggtgtgggagctaccgtgccggagttaacgcaataagtatcccgcctggggagtacggtcgcaagactgaaactcaaaggaattgacggggacccgcacaagcggtggagtatgtggtttaattcgaagcaacgcgaagaaccttaccaggccttgacattaacaggtggtgcatggctgtcgtcagctcgtgtcgtgagatgttgggttaagtcccgcaacgagcgcaacccctgttctttgttgccatcacgtgggcactcaaaggagactgccgcggagaacgcggaggaaggcggggatgacgtcaagtcatcatgccccttatggtctgggctacacacgtactacaatggaacgcagagagcagcgaacccgcgagggcaagcgaacctcaacgtttcccagttcggatgcaggctgcaactcgcctgcagaagtcggaatcgctagtaatcgcaggtcagcatactgcggtgaatacgttcccgggtcttgtacacaccgcccgtcacaccacggaagtcgttcacacccgaagccggcgccgtctaaggtggggaaggcgactggggtgaagtcgtaacaaggtagccgtatcggaaggtgcggctggaacacctcctt

SEQ ID NO: 1708 - DNA, 1536 bp, Selenomonas sp.
  oral clone HU051
gagtttgatcctggctcaggacgaacgctggcggcgtgcttaacacatgcaagtcgaacggagctatttatttcggtagatagcttagtggcaaacgggtgagtaacacgtagacaacctgccgatcagatggggacaacattccgaaaggaatgctaataccgaatgaggtgtaggggaggcatctcccctacatgaaagatggcctctatatataagctatcactgatcgatgggtctgcgtctgattagctagtaggtaaggtaacggcttacctaggcgacgatcagtagccggtctgagaggatgaacggccacattgggactgagacacggcccagactcctacgggaggcagcagtggggaatcttccgcaatgggcgcaagcctgacggagcaacgccgcgtgagtgaagaaggtcttcggatcgtaaagctctgttgaaggggacgaacgtgcataggatgaataagcctgtgtaatgacggtaccttttgaggaagccacggctaactacgtgccagcagccgcggtaatacgtatgtggcgagcgttgtccggaatcattgggcgtaaagggagcgcaggcggtcatgtaagtcttacttaaaagttcggggctcaaccccgtgatgggtaagaaactatatgacttgagtacaggagaggaaagcggaattcccagtgtagcggtgaaatgcgtatgatattgggaggaacaccagtggcgaaggcggctttctggactgcaactgacactgaggctcgaaagccaggggagcgaacgggattagataccccggtagtcctggccgtacacgatggatactaggtgtaggaggtatcgacccctcctgtgccggagttaacgcaataagtatcccgcctggggagtacggtcgcaagactgaaactcagaggaattgacgggggcccgcacaagcggtggagtatgtggtttaattcgacgcaacgcgaagaaccttaccagggcttgacattgagtgaaagggcaagagattgtccccttatcttcggataacacgaaaacaggtggtgcatggctgtcgtcagctcgtgtcgtgagatgttgggttaagtcccgcaacgagcgcaacccctatattctgttgccaacaggtaaagctgggaactcaggatagactgccgcggagaacgcggaggaaggcggggatgacgtcaagtcatcatgccccatatgacctgggctacacacgtactacaatgggatgtacagagggcagcgaaagagcgatctggagcgaaccccagaaaacatctcccagttcggattgcaggctgaaacccgcctgcatgaagatggaatcgctagtaatcgcaggtcagcatactgcggtgaatacgttcccgggccttgtacacaccagcccgtcacaccacggaagtcattcacacccgaagccggtgaaagccgtcgaaggtgggggcgatgactggggtgaagtcgtaacaaggtagccgtatcggaaggtgcggctggaacacctcctt

SEQ ID NO: 1709 - DNA, 1356 bp, Selenomonas sp.
  oral clone IK004
gagtttgattctggctcaggacgaacgctggcggcgtgcttaacacatgcaagtcgaacgagtggcaaacgggtgagtaacacgtagacaacctgccgacaggatggggacaacattccgaaaggaatgctaataccgaatgaagaaagtcacctgccgatgggtctgcgtctgattagctagttggtgaggtaacggctcaccaaggcgacgatcagtagccggtctgagaggatgaacggccacattgggactgagacacggcccagactcctacgggaggcagcagtggggaatcttccgcaatgggcgcaagcctgacggagcaacgccgcgtgagtgaagaaggtcttcggatcgtaaagctctgttgatggggacgatgacggtacctatcgaggaagccacggctaactacgtgccagcagccgcggtaatacgtaggtggcgagcgttgtccggaatcattgggcgtaaagggagcgcaggcgggcatgtaagtctttcttaaaagttcggggctcaaccccgtgatgggaaagaaactacatgtcttgagtacaggagaggaaagcggaattcccagtgtagcggtgaaatgcgtagatattgggaggaacaccagtggcgaaggcggctttctggactgactgacgctgaggctcgaaagccaggggagcgaacgggattagataccccggtagtcctggccgtaaacgatggatactaggtgtgggagctaccgtgccggagttaacgcaataagtatcccgcctggggagtacggtcgcaagactgaaactcaaaggaattgacggggacccgcacaagcggtggagtatgtggtttaattcgaagcaacgcgaagaaccttaccaggccttgacattaacaggtggtgcatggctgtcgtcagctcgtgtcgtgagatgttgggttaagtcccgcaacgagcgcaacccctgttctttgttgccatcagctgggcactcaaaggagactgccgcggagaacgcggaggaaggcggggatgacgtcaagtcatcatgccccttatggtctgggctacacacgtactacaatggaacgcagagagcagcgaacccgcgagggcaagcgaacctcaacgtttcccagttcggatgcaggctgcaactcgcctgcagaagtcggaatcgctagtaatcgcaggtcagcatactgcggtgaatacgttcccgggtcttgtacacaccgcccgtcacaccacggaagtcgttcacacccgaagccggcgccgtctaaggtggggaaggtgactggggtgaagtcgtaacaaggtagccgtatcggaaggtgcggctggatcacctcctt

SEQ ID NO: 1710 - DNA, 1362 bp, Selenomonas sp.
  oral clone IQ048
agtttgattctggctcaggacgaacgcgggcggcgtgcttaacacatgcaagtcgaacgagtggcaaacgggtgagtaacacgtaggcaacctgccgacaggatggggacaacattccgaaaggaatgctaataccgaatgaagaaagtcacctgtcgatgggcctgcgtctgattagccagttggcggggtaacggcccaccaaagcgacgatcagtagccggtctgagaggatgaacggccacattgggactgagacacggcccagactcctacgggaggcagcagtggggaatcttccacaatgggcgaaagcctgatggagcaacgccgcgtgagtgaagaaggtcttcggatcgtaaagctctgttgcacgggacgaggacggaccgagcgaggaatccacggctaactacgtgccagcggccgcggtaatacgtacgtggcgagcgttgtccggaattattgggcgtaaagggagcgcagggggacatataagtccatcttaaaagtgcggtgctcaaccccgtgaggggatggaaactgtatgccttgagtgcaagataggaaagcggaattcccagtgtagcggtgaaatgcgtaatattgggaggaacaccagtggccaatgcggctttctggactgactgacgctgaggctcgaaagccaggggagcgaacgggattagataccccggtagtcctggccgtaaacgatgaatgctaggtgtaggagctcctgtgccggagttaacgcaataagcattccgcctggggagtacggtcgcaagactgaaactcaaaggaattgacgggggcccgcacaagcggtggagtatgtggtttaattcgaagcaacgcgaagaaccttaccaggccttgacattaacaggtggtgcatggctgtcgtcagctcgtgtcgtgagatgttgggttaagtcccgcaacgagcgcaacccctgttctttgttgccagcatatgggcactcaaaggagactgccgcggagaacgcggaggaaggcggggatgacgtcaagtcatcatgccccttatggtctgggctacacacgtactacaatgggacgcagagggcagcgagagagtgatcttaagcgaatctcaacgtttctcagttcggatgcaggctgcaactcgcctgcagaagtcggaatcgctagtaatcgcaggtcagcatactgcggtgaatacgttcccgggtcttgtacacaccgcccatcacaccacggaagtcattcacacccgaagccggcacgcagcaagccgcccaaggtgggggcgatgactggggtgaagtcgtaacaaggtagccgtatcggaaggtgcggctggatcacctcctt

SEQ ID NO: 1711 - DNA, 1366 bp, Selenomonas sp.
  oral clone JI021
ggagtttgattctggctcaggacgaacgctggcggcgtgcttaacacatgcaagtcgaacgagtggcaaacgggtgagtaacacgtaggcaacctgccgacaggatggggacaacattccgaaagggatgctaataccgaatggagaaagtcgcctgtcgatgggcctgcgtctgattagctagttggtgaggtaaaggctcaccaaggcgacgatcagtagccggtctgagaggatgaacggccacattgggactgagacacggcccagactcctacgggaggcagcagtggggaatcttccgcaatgggcgaaagcctgacggagcaacgccgcgtgagtgaagaaggtcttcggatcgtaaagctctgttgtcgaggacgatgacggtacttgacgaggaagtcacggctaactacgtgccagcagccgcggtaatacgtaggtggcaagcgttgtccggaatcattgggcgtaaagggagcgcaggtgggaacttaggtctttcttaaaagtgcggggctcaaccccgtgatgggagagaaaccgagattcttgagtgcaggagaggaaagcggaattcccggtgtagcggtgaaatgcgtagatatcgggaggaacaccagtggcgaaggcggctttctggactgactgacactgaggctcgaaagccagggtagcgaacgggattagataccccggtagtcctggccgtaaacgatgaatgctaggtgtaggagcttctgtgccggagttaacgcaataagcattccgcctggggagtacggccgcaaggctgaaactcaaaggaattgacgggggcccgcacaagcggtggagtatgtggtttaattcgacgcaacgcgaagaaccttaccagggcttgacattaacaggtggtgcatggctgtcgtcagctcgtgtcgtgagatgttgggttaagtcccgcaacgagcgcaacccctgtcctttgttgccagcgcgcgggaactcaaaggagactgccgcggagaacgcggaggaaggcggggatgacgtcaagtcatcatgccccttatgtcctgggctacacacgtactacaatgggatgcagagagcagcgaatgggcgaccatgagcgaaccccttcatctctcagttcggatgcaggctgaaacccgcctgcagaagtcggaatcgctagtaatcgcaggtcagcatactgcggtgaatacgttcccgggccttgtacacaccgcccgtcacaccacgaaagtcattcacacccgaagtcggtgaggacctagccgcctaaggtgggggcgatgattggggtgaagtcgtaacaaggtagccgtatcggaaggtgcggctggatcacctcctt

SEQ ID NO: 1712 - DNA, 1356 bp, Selenomonas sp.
  oral clone JS031
ggagtttgatcctggctcaggacgaacgctggcggcgtgcttaacacatgcaagtcgaacgagtggcaaacgggtgagtaacgcgtaggcaacctgccctcaggatggggacaacggctcgaaagagccgctaataccgaatgactaaagtcgcccgaggatgggcctgcgtctgattagccagttggtgaggtaacggctcaccaaagcaacgatcagtagccggtctgagaggatgaacggccacaatgggactgagacacggcccatactcctacgggaggcagcagtggggaatcttccgcaatgggcgaaagcctgacggagcaacgccgcgtgagtgaagaaggtcttcggatcgtaaagctctgttgtcggggacgaagacggtacccgacgaggaagccacggctaactacgtgccagcagccgcggtaatacgtaggcggcaagcgttgtccggaattattgggcgtaaagggagcgcaggtgggacggtaagtctgtcttaaaaggcaagggctcagcccctgtaagggacagaaactatcgttcttgagtgccggagaggaaagcggaattcccagtgtagcggtgaaatgcgtagatattgggaagaacaccagtggcgaaggcggctttctggacggactgacactgaggctcgaaagccagggtagcgaacgggattagataccccggtagtcctggccgtaaacgatggatactaggtgtaggggctcctgtgccggagttaacgcaataggtatcccgcctggggagtacggtcgcaagactgaaactcaaaggaattgacgggggcccgcacaagcggtggagtatgtggtttaattcgacgcaacgcgaagaaccttaccagggcttgacattaacaggtggtgcatggctgtcgtcagctcgtgtcgtgagatgttgggttaagtcccgcaacgagcgcaacccctatattctgttgccaacagctgggaactcaggatagactgccgcggagaacgcggaggaaggcggggatgacgtcaagtcatcatgccccttatgacctgggctacacacgtactacaatgggatgcagagggcagcgaaggagcgatctggagcgaaccccagcatctctcagttcggatgcaggctgaaacccgcctgcagaaggtggaatcgctagtaatcgcaggtcagcatactgcggtgaatacgttcccgggccttgtacacaccgcccgtcacaccacggaagtcattcacacccgaagccggaccgtcgaaggtgggggcgatgactggggtgaagtcgtaacaaggtagccgtatcggaaggtgcggctggatcacctcctt

SEQ ID NO: 1713 - DNA, 1414 bp, Selenomonas sp.
  oral clone OH4A
tacggagcgatgaagcttgcttttataagcttatggcaacgggtgagtaacaggtggacaacctgccgacaggatggggacaacattccgaaaggaatgctaataccgaatgaacagaggagaggcatctctcctctgtgaaagatggcctctttttatgctatcacctgttgatggggctgctctgattagctggtaggtggagtaacggctcacctaggggagaatcagtagccggtctgagaggatgaacggccacattgggactgagacacggcccagactcctacgggaggcagcagtggggaatcttccgcaatgggcgcaagcctgacggagcaacgccgcgtgagtgaagaaggtcttcggatcgtaaagctctgttgatggggcgaaacgtgcctaatgcgaatagttttaggtaatgacggtacccatcgaggaagccacggctaactacgtgccagcagccgcggtaatacgtaggtggcgagcgttgtccggaatcattgggcgtaaagggagcgcaggcgggcatgtaagtctttcttaaaagtgcggggctcaaccccgtgatgggaaagaaactatgtgtcttgagtacaggagaggaaagcggaattcccagtgtagcggtgaaatgcgtagatattgggaggaacaccagtggcgaaggcggctttctggactgcaactgacgctgaggctcgaaagccaggggagcgaacgggattagataccccggtagtcctggccgtaaacgatggatactaggtgtgggaggtatcgacccctaccgtgccggagttaacgcaataagtatcccgcctggggagtacggccgcaaggctgaaactcaaaggaattgacggggacccgcacaagcggtggagtatgtggtttaattcgaagcaacgcgaagaaccttaccaggccttgacattgactgaaagagttagagataactccctctcttcggagacaggaaaacaggtggtgcatggctgtcgtcagctcgtgtcgtgagatgttgggttaagtcccacaacgagcgcaacccctgttctttgttgccagcaagtgaagttgggcactcaaaggagactgccgcggagaacgcggaggaaggcggggatgacgtcaagtcatcatgccccttatggtctgggctacacacgtactacaatgggacggacagagggcagcgagagagtgatattaagcgaatctcaaaaaccgtttttcagttcggattgcaggctgcaactcgcctgcatgaagtcggaatcgttagtaatcgcaggtcagcatactgcggtgaatacgttcccgggtcttgtacacaccgcccgtcacaccacggaagtcattcacacccgaagccggcaaagccgtctaaggtggggaaggtgac

SEQ ID NO: 1714 - DNA, 1319 bp, Selenomonas sp.
  oral clone P2PA_80 P4
gacgaacgctggcggcgtgcttaacacatgcaagtcgaacgagtggcaaacgggtgagtaacgcgtaggcaacctgcccttaggatggggacaacggcccgaaaggaccgctaataccgaatgcagaaagtcgccgaaggaagggcctgcgcctgattagccagttggtgaggtaacggctcaccaaagcgacgatcagtagccggtctgagaggatgaacggccacaatgggactgagacacggcccatactcctacgggaggcagcagtggggaatcttccgcaatgggcgaaagcctgacggagcaacgccgcgtgagtgaagaaggtcttcggatcgtaaagctctgttgttggggacgaagacggtacccgacgagcaagccacggctaactacgtgccagcagccgcggtaatacgtaggtggcgagcgttgtccgggatgattgggcgtaaagggagcgcaggtgggacggtaagtccttcttaaaagcgtggggctcagccccatgaagggaaggaaactatcgatcttgagtgccagagaggaaagcggaattcccagtgtagcggtgaaatgcgtagatattgggaagaacaccagtggcgaaggcggctttctggacggactgacgctgaggctcgaaagccaggggagcgaacgggattagataccccgctagtcctggccgtaaacgatggatactaggtgtaggagcttctgtgccggagttaacgcaataagtatcccgcctggggagtacggtcgcaagattgaaactcaaaggaattgacgggggcccgcacaagcggtggagtatgtggtttaattcgacgcaacgcgaagaaccttaccagggcttgacattaacaggtggtgcatggctgtcgtcagctcgtgtcgtgagatgttgggttaagtcccgcaacgagcgcaacccctatgttctgttgccagcgcgcgggcactcagaagagactgccgcggagaacgcggaggaaggcgggggtgacgtcaagtcatcatgccccttatgacctgggctacacacgtactacaatgggatgcagagggcagcgaacgggcgaccggaagcgaaccccagcatctcccagttcggatgcaggctgaaacccgcctgcagaagatggaatcgctagtaatcgcaggtcagcatactgcggtgaatacgttcccgggccttgtacacaccgcccgtcacaccacggaagtcattcacacccgaagccggaccgtcgaaggtgggggcgatgactggggtgaagtcgtaacaaggtagccgtatcggaaggtgc

SEQ ID NO: 1715 - DNA, 1541 bp, Selenomonas sp.
  oral taxon 137
ggagagtttgatcctggctcaggacgaacgctggcggcgtgcttaacacatgcaagtcgaacggagcgaatgaaagcttgcttttatgagcttagtggcaaacgggtgagtaacacgtagacaacctgccgatcagatggggacaacattccgaaaggaatgctaataccgaatggcgtgtggggaggcatcttccctacatgaaagatggcctctatttataagctatcactgatcgatgggtctgcgtctgattagctagtaggtaaggtaacggcttacctaggcgacgatcagtagccggtctgagaggatgaacggccacattgggactgagacacggcccagactcctacgggaggcagcagtggggaatcttccgcaatgggcgcaagcctgacggagcaacgccgcgtgagtgaagaaggtcttcggatcgtaaagctctgttgaagggggcgaacgtacgcagtgcgaatagtgctgagtaatgacggtaccttttgaggaagccacggctaactacgtgccagcagccgcggtaatacgtaggtggcgagcgttgtccggaatcattgggcgtaaagggagcgcaggcggccatgtaagtcttgcttaaaagttcggggctcaaccccgtgatgggcaagaaactatatggcttgagtgcaggagaggaaagcggaattcccagtgtagcggtgaaatgcgtagatattgggaggaacaccagtggcgaaggcggctttctggactgcaactgacgctgaggctcgaaagccaggggagcgaacgggattagataccccggtagtcctggccgtaaacgatggatactaggtgtgggaggtatcgacccctaccgtgccggagttaacgcaataagtatcccgcctggggagtacggtcgcaagactgaaactcaaaggaattgacggggacccgcacaagcggtggagtatgtggtttaattcgaagcaacgcgaagaaccttaccaggtcttgacattgattgacagggatagagatatcctattctctttggagacaagaaaacaggtggtgcatggctgtcgtcagctcgtgtcgtgagatgttgggttaagtcccgcaacgagcgcaacccctgtcctttgttgccagcatgtagtggtgggcactcaaaggagactgccgcggagaacgcggaggaaggcggggatgacgtcaagtcatcatgccccttatgacctgggctacacacgtactacaatgggacggacagagagcagcgagagggcgaccttaagcgaacctcaaaaaaccgtttctcagttcggattgcaggctgcaactcgcctgcatgaagtcggaatcgctagtaatcgcaggtcagcatactgcggtgaatacgttcccgggtcttgtacacaccgcccgtcacaccacggaagtcgttcacacccgaagccggcgcagccgtctaaggtggggaaggtgactggggtgaagtcgtaacaaggtagccgtatcggaaggtgcggctggatcacctcctttct

SEQ ID NO: 1716 - DNA, 1265 bp, Selenomonas sp.
  oral taxon 149
ggctcaccaaggcgacgatcagtagccggtctgagaggatgaacggccacattgggactgagacacggcccagactcctacgggaggcagcagtggggaatcttccgcaatgggcgcaagcctgacggagcaacgccgcgtgagtgaagaaggtcttcggatcgtaaagctctgttgacggggacgaacgtgcggagtgcgaatagcgctttgtaatgacggtacctgtcgaggaagccacggctaactacgtgccagcagccgcggtaatacgtaggtggcgagcgttgtccggaatcattgggcgtaaagggagcgcaggcgggccggtaagtcttacttaaaagtgcggggctcaaccccgtgatgggagagaaactatcggtcttgagtacaggagaggaaagcggaattcccagtgtagcggtgaaatgcgtagatattgggaagaacaccagtggcgaaggcggctttctggactgcaactgacgctgaggctcgaaagccaggggagcgaacgggattagataccccggtagtcctggccgtaaacgatggatactaggtgtgggaggtatcgacccctaccgtgccggagttaacgcaataagtatcccgcctggggagtacggccgcaaggctgaaactcaaaggaattgacggggacccgcacaagcggtggagtatgtggtttaattcgaagcaacgcgaagaaccttaccaggccttgacattgactgaaagagctagagatagcaccctctcttcggagacaggaaaacaggtggtgcatggctgtcgtcagctcgtgtcgtgagatgttgggttaagtcccgcaacgagcgcaacccctgttctttgttgccatcaggtaaagctgggcactcaaaggagactgccgcggagaacgcggaggaaggcggggatgacgtcaagtcatcatgccccttatggcctgggctacacacgtactacaatggaacggacagagagcagcgaacccgcgagggcaagcgaacctcaaaaaccgtttcccagttcggattgcaggctgcaacccgcctgcatgaagtcggaatcgctagtaatcgcaggtcagcatactgcggtgaatacgttcccgggtcttgtacacaccgcccgtcacaccacggaagtcattcacacccgaagccggcgcagccgtctaaggtggggaaggtgactggggtgaagtcgtaacaaggtagccgtatcggaaggtgcggctggatcacctcctttct

SEQ ID NO: 1717 - DNA, 1548 bp, Selenomonas sputigena
ggagagtttgatcctggctcaggacgaacgctggcggcgtgcttaacacatgcaagtcgaacgggaacctttatttcggtaaaggtgagagtggcaaacgggtgagtaacacgtaggcaacctgccgacaggatggggacaacattccgaggaatgctaataccgaatggagtccggggatggcatcatcctcggataagatggcctctgaatatgctatcgcctgtcgatgggcctgcgtctgattagccagttggcggggtaacggcccaccaaagcgacgatcagtagccggtctgagaggatgaacggccacattgggactgagacacggcccagactcctacgggaggcagcagtggggaatcttccacaatgggcgaaagcctgatggagcaacgccgcgtgagtgaagaaggtcttcggatcgtaaagctctgttgcacgggacgaaaaccgagcttgagaatattgagtttgggtgacggtaccgagcgaggaagccacggctaactacgtgccagcagccgcggtaatacgtaggtggcgagcgttgtccggaattattgggcgtaaagggagcgcaggcggacatataagtccatcttaaaagtgcggggctcaaccccgtgaggggatggaaactgtatgccttgagtgcaggagaggaaagcggaattcccagtgtagcggtgaaatgcgtagatattgggaggaacaccagtggcgaaggcggctttctggactgtaactgacgctgaggctcgaaagccaggggagcgaacgggattagataccccggtagtcctggccgtaaacgatgaatgctaggtgtaggaggtatcgacccctcctgtgccggagttaacgcaataagcattccgcctggggagtacggtcgcaagactgaaactcaaaggaattgacgggggcccgcacaagcggtggagtatgtggtttaattcgacgcaacgcgaagaaccttaccagggcttgacattgagtgaaagagctagagatagcttcctcccttcggggacacgaaaacaggtggtgcatggctgtcgtcagctcgtgtcgtgagatgttgggttaagtcccgcaacgagcgcaacccctgtcctttgttgccagcgcgtaatggcgggaactcaaaggagactgccgcggagaacgcggaggaaggcggggatgacgtcaagtcatcatgccccttatgtcctgggctacacacgtactacaatgggatggacagagggaagcgaaggcgcgagccggagcggaccccacaaaccatcccccagttcggattgcaggctgcaacccgcctgcatgaagtcggaatcgctagtaatcgcaggtcagcatactgcggtgaatacgttcccgggccttgtacacaccgcccgtcacaccacggaagtcattcacgcccaaagccggtgggccaaccgcaaggaggcagccgtctaaggcgggggcgatgactggggtgaagtcgtaacaaggtagccgtatcggaaggtgcggctggatcacctcctttct

SEQ ID NO: 1718 - DNA, 1490 bp, Serratia fonticola
tcagattgaacgctggcggcaggcctaacacatgcaagtcgagcggtagcacaaggagcttgctcctgggtgacgagcggcggacgggtgagtaatgtctgggaaactgcccgatggagggggataactactggaaacggtagctaataccgcataacgtcttcggaccaaagtgggggaccttcgggcctcacaccatcggatgtgcccagatgggattagctagtaggtgaggtaatggctcacctaggcgacgatccctagctggtctgagaggatgaccagccacactggaactgagacacggtccagactcctacgggaggcagcagtggggaatattgcacaatgggcgcaagcctgatgcagccatgccgcgtgtgtgaagaaggccttcgggttgtaaagcactttcagcgaggaggaagggttctgtgttaatagcaccgttcattgacgttactcgcagaagaagcaccggctaactccgtgccagcagccgcggtaatacggagggtgcaagcgttaatcggaattactgggcgtaaagcgcacgcaggcggtttgttaagtcagatgtgaaatccccgagcttaacttgggaactgcatttgaaactggcaagctagagtcttgtagaggggggtagaattccaggtgtagcggtgaaatgcgtagagatctggaggaataccggtggcgaaggcggccccctggacaaagactgacgctcaggtgcgaaagcgtggggagcaaacaggattagataccctggtagtccacgctgtaaacgatgtcgacttggaggttgtgcccttgaggcgtggcttccggagctaacgcgttaagtcgaccgcctggggagtacggccgcaaggttaaaactcaaatgaattgacgggggcccgcacaagcggtggagcatgtggtttaattcgatgcaacgcgaagaaccttacctactcttgacatccacagaactttccagagatggattggtgccttcgggaactgtgagacaggtgctgcatggctgtcgtcagctcgtgttgtgaaatgttgggttaagtcccgcaacgagcgcaacccttatcctttgttgccagcacgtaatggtgggaactcaaaggagactgccggtgataaaccggaggaaggtggggatgacgtcaagtcatcatggcccttacgagtagggctacacacgtgctacaatggcatatacaaagagaagcgaactcgcgagagcaagcggacctcataaagtatgtcgtagtccggatcggagtctgcaactcgactccgtgaagtcggaatcgctagtaatcgtagatcagaatgctacggtgaatacgttcccgggccttgtacacaccgcccgtcacaccatgggagtgggttgcaaaagaagttagtagcttaaccttcgggagggcgcttaccactttgtgattcatgactggggtgaagtcctaacaaggtaaccgtag

SEQ ID NO: 1719 - DNA, 1428 bp, Serratia liquefaciens
  modified_base (1070)..(1070): a, c, t, g, unknown or other
acacaagaagcttgctctctgggtgacgagcggcggacgggtgagtaatgtctgggaaactgcctgatggagggggataactactggaaacggtagctaataccgcataacgtctacggaccaaagtgggggaccttcgggcctcatgccatcagatgtgcccagatgggattagctagtaggtggggtaatggctcacctaggcgacgatccctagctggtctgagaggatgaccagccacactggaactgagacacggtccagactcctacgggaggcagcagtggggaatattgcacaatgggcgcaagcctgatgcagccatgccgcgtgtgtgaagaaggccttcgggttgtaaagcactttcagcgaggaggaagggttcagtgttaatagcactgttcattgacgttactcgcagaagaagcaccggctaactccgtgccagcagccgcggtaatacggagggtgcaagcgttaatcggaattactgggcgtaaagcgcacgcaggcggtttgttaagtcagatgtgaaatccccgcgcttaacgtgggaactgcatttgaaactggcaagctagagtcttgtagaggggggtagaattccaggtgtagcggtgaaatgcgtagagatctggaggaataccggtggcgaaggcggccccctggacaaagactgacgctcaggtgcgaaagcgtggggagcaaacaggattagataccctggtagtccacgctgtaaacgatgtcgacttggaggttgtgcccttgaggcgtggcttccggagctaacgcgttaagtcgaccgcctggggagtacggccgcaaggttaaaactcaaatgaattgacgggggcccgcacaagcggtggagcatgtggtttaattcgatgcaacgcgaagaaccttacctactcttgacatccagagaattcgctagagatagcttagtgccttcgggaactctgagacaggtgctgcatggctgtcgtcagctcgtgttgtgaaatgttgggttaagtcccgcaacgagcgcaacccttatcctttgttgccagcgcgtaatggngggaactcaaaggagactgccggtgataaaccggaggaaggtggggatgacgtcaagtcatcatggcccttacgagtagggctacacacgtgctacaatggcgtatacaaagagaagcgaactcgcgagagcaagcggacctcataaagtacgtcgtagtccggatcggagtctgcaactcgactccgtgaagtcggaatcgctagtaatcgtagatcagaatgctacggtgaatacgttcccgggccttgtacacaccgcccgtcacaccatgggagtgggttgcaaaagaagtaggtagcttaaccttcgggagggcgcttaccactttgtgattcatgactggggtgaagtcgta

SEQ ID NO: 1720 - DNA, 939 bp, Serratia marcescens
  modified_base (35)..(35): a, c, t, g, unknown or other
  modified_base (75)..(76): a, c, t, g, unknown or other
  modified_base (81)..(82): a, c, t, g, unknown or other
  modified_base (120)..(120): a, c, t, g, unknown or other
  modified_base (122)..(122): a, c, t, g, unknown or other
  modified_base (129)..(129): a, c, t, g, unknown or other
  modified_base (131)..(132): a, c, t, g, unknown or other
  modified_base (141)..(141): a, c, t, g, unknown or other
  modified_base (165)..(165): a, c, t, g, unknown or other
  modified_base (294)..(294): a, c, t, g, unknown or other
  modified_base (484)..(484): a, c, t, g, unknown or other
  modified_base (492)..(492): a, c, t, g, unknown or other
cagccgcggtaatacggagggtgcaagcgttaatnggaaattactgggcgtaaagcgcacgcaggcggtctgatnnaagtnnagatgtgaaatccccgggcttaacctgggaatggcatntnagactgntnngctagagtnttgtagaggggggtagaattccangtgtagcggtgaaatgcgtagagatgtggaggaataccggtggcgaaggcggccccctggacaaagactgacgctcaggtgcgaaagcgtggggagcaaacaggattagataccctggtagtccacgcngtaaacgatgtcgatttgaaggttgttcccttgaggagtggctttcggagctaacgcgttaaatcgaccgcctggggagtacggccgcaaggttaaaactcaaatgaattgacgggggcccgcacaagcggtggagcatgtggtttaattcgatgcaacgcgaagaaccttacctactcttgacatccanagaacttngcagagatgcttaggtgccttcgggaactgtgagacaggtgctgcatggctgtcgtcagctcgtgttgtgaaatgttgggttaagtcccgcaacgagcgcaacccttatcctttgttgccagcgattcggccgggaactcaaaggagactgccagtgataaaccggaggaaggtggggatgacgtcaagtcatcatggcccttacgactagggctacacacgtgctacaatggcgtatacaaagagaagcgacctcgcgagagcaagcggacctcataaagtacgtcgtagtccggattggagtctgcaactcgactccatgaagtcggaatcgctagtaatcgtagatcagaatgccacggtgaatacgttcccgggccttgtacacaccgcccgtcacaccatgggagtgggttgcaaaagaagtaggtagcttaaccttcggga

SEQ ID NO: 1721 - DNA, 1545 bp, Serratia odorifera
tttaattgaagagtttgatcatggctcagattgaacgctggcggcaggcctaacacatgcaagtcgagcggtagcacaggagagcttgctctctgggtgacgagcggcggacgggtgagtaatgtctgggaaactgcccgatggagggggataaccactggaaacggtggctaataccgcataacgtctacggaccaaagagggggaccttcgggcctcttgccatcggatgtgcccagatgggattagctagtaggtggggtaacggctcacctaggcgacgatccctagctggtctgagaggatgaccagccacactggaactgagacacggtccagactcctacgggaggcagcagtggggaatattgcacaatgggcgcaagcctgatgcagccatgccgcgtgtgtgaagaaggccttcgggttgtaaagcactttcagcgaggaggaaggccaatagcttaatacgctgttggattgacgttactcgcagaagaagcaccggctaactccgtgccagcagccgcggtaatacggagggtgcaagcgttaatcggaattactgggcgtaaagcgcacgcaggcggtttgttaagtcagatgtgaaatccccgcgcttaacgtgggaactgcatttgaaactggcaagctagagtctcgtagaggggggtagaattccaggtgtagcggtgaaatgcgtagagatctggaggaataccggtggcgaaggcggccccctggacgaagactgacgctcaggtgcgaaagcgtggggagcaaacaggattagataccctggtagtccacgctgtaaacgatgtcgatttggaggttgtgcccttgaggcgtggcttccggagctaacgcgttaaatcgaccgcctggggagtacggccgcaaggttaaaactcaaatgaattgacgggggcccgcacaagcggtggagcatgtggtttaattcgatgcaacgcgaagaaccttacctactcttgacatccagagaactttccagagatggaagggtgccttcgggaactctgagacaggtgctgcatggctgtcgtcagctcgtgttgtgaaatgttgggttaagtcccgcaacgagcgcaacccttatcctttgttgccagcggttcggccgggaactcaaaggagactgccagtgataaactggaggaaggtggggatgacgtcaagtcatcatggcccttacgagtagggctacacacgtgctacaatggcgtatacaaagagaagcgaacttgcgagagtaagcggacctcataaagtacgtcgtagtccggattggagtctgcaactcgactccatgaagtcggaatcgctagtaatcgtagatcagaatgctacggtgaatacgttcccgggccttgtacacaccgcccgtcacaccatgggagtgggttgcaaaagaagtaggtagcttaaccttcgggagggcgcttaccactttgtgattcatgactggggtgaagtcgtaacaaggtaaccgtaggggaacctgcggttggatcacctccttac

SEQ ID NO: 1722 - DNA, 1546 bp, Serratia proteamaculans
tttaattgaagagtttgatcatggctcagattgaacgctggcggcaggcctaacacatgcaagtcgagcggtagcacaagagagcttgctctctgggtgacgagcggcggacgggtgagtaatgtctgggaaactgcctgatggagggggataactactggaaacggtagctaataccgcataacgtcttcggaccaaagtgggggaccttcgggcctcacgccatcagatgtgcccagatgggattagctagtaggtggggtaatggctcacctaggcgacgatccctagctggtctgagaggatgaccagccacactggaactgagacacggtccagactcctacgggaggcagcagtggggaatattgcacaatgggcgcaagcctgatgcagccatgccgcgtgtgtgaagaaggccttcgggttgtaaagcactttcagcgaggaggaagggtagtgtgttaatagcacattgcattgacgttactcgcagaagaagcaccggctaactccgtgccagcagccgcggtaatacggagggtgcaagcgttaatcggaattactgggcgtaaagcgcacgcaggcggtttgttaagtcagatgtgaaatccccgcgcttaacgtgggaactgcatttgaaactggcaagctagagtcttgtagaggggggtagaattccaggtgtagcggtgaaatgcgtagagatctggaggaataccggtggcgaaggcggccccctggacaaagactgacgctcaggtgcgaaagcgtggggagcaaacaggattagataccctggtagtccacgctgtaaacgatgtcgacttggaggttgtgcccttgaggcgtggcttccggagctaacgcgttaagtcgaccgcctggggagtacggccgcaaggttaaaactcaaatgaattgacgggggcccgcacaagcggtggagcatgtggtttaattcgatgcaacgcgaagaaccttacctactcttgacatccagagaattcgctagagatagcttagtgccttcgggaactctgagacaggtgctgcatggctgtcgtcagctcgtgttgtgaaatgttgggttaagtcccgcaacgagcgcaacccttatcctttgttgccagcacgtaatggtgggaactcaaaggagactgccggtgataaaccggaggaaggtggggatgacgtcaagtcatcatggcccttacgagtagggctacacacgtgctacaatggcgtatacaaagagaagcgaactcgcgagagccagcggacctcataaagtacgtcgtagtccggatcggagtctgcaactcgactccgtgaagtcggaatcgctagtaatcgtagatcagaatgctacggtgaatacgttcccgggccttgtacacaccgcccgtcacaccatgggagtgggttgcaaaagaagtaggtagcttaaccttcgggagggcgcttaccactttgtgattcatgactggggtgaagtcgtaacaaggtaaccgtaggggaacctgcggttggatcacctccttac

SEQ ID NO: 1723 - DNA, 1546 bp, Shewanella putrefaciens
tttaattgaagagtttgatcatggctcagattgaacgctggcggcaggcctaacacatgcaagtcgagcggcagcacaagggagtttacttctgaggtggcgagcggcggacgggtgagtaatgcctagggatctgcccagtcgagggggataacagttggaaacgactgctaataccgcatacgccctacgggggaaaggaggggaccttcgggccttccgcgattggatgaacctaggtgggattagctagttggtgaggtaatggctcaccaaggcgacgatccctagctgttctgagaggatgatcagccacactgggactgagacacggcccagactcctacgggaggcagcagtggggaatattgcacaatgggggaaaccctgatgcagccatgccgcgtgtgtgaagaaggccttcgggttgtaaagcactttcagtagggaggaaagggtgtagcttaatacgctatatctgtgacgttacctacagaagaaggaccggctaactccgtgccagcagccgcggtaatacggagggtccgagcgttaatcggaattactgggcgtaaagcgtgcgcaggcggtttgttaagcgagatgtgaaagccctgggctcaacctaggaatagcatttcgaactggcgaactagagtcttgtagaggggggtagaattccaggtgtagcggtgaaatgcgtagagatctggaggaataccggtggcgaaggcggccccctggacaaagactgacgctcatgcacgaaagcgtggggagcaaacaggattagataccctggtagtccacgccgtaaacgatgtctactcggagtttggtgtcttgaacactgggctctcaagctaacgcattaagtagaccgcctggggagtacggccgcaaggttaaaactcaaatgaattgacgggggcccgcacaagcggtggagcatgtggtttaattcgatgcaacgcgaagaaccttacctactcttgacatccacggaattggctagagatagcttagtgccttcgggaaccgtgagacaggtgctgcatggctgtcgtcagctcgtgttgtgaaatgttgggttaagtcccgcaacgagcgcaacccctatccttatttgccagcacgtaatggtgggaactctagggagactgccggtgataaaccggaggaaggtggggacgacgtcaagtcatcatggcccttacgagtagggctacacacgtgctacaatggcgagtacagagggttgcaaagccgcgaggtggagctaatctcacaaagctcgtcgtagtccggattggagtctgcaactcgactccatgaagtcggaatcgctagtaatcgtggatcagaatgccacggtgaatacgttcccgggccttgtacacaccgcccgtcacaccatgggagtgggctgcaaaagaagtgggtagcttaaccttcgggggggcgctcaccactttgtggttcatgactggggtgaagtcgtaacaaggtagccctaggggaacctggggctggatcacctccttac

SEQ ID NO: 1724 - DNA, 999 bp, Shigella boydii
  modified_base (15)..(17): a, c, t, g, unknown or other
  modified_base (20)..(20): a, c, t, g, unknown or other
  modified_base (31)..(31): a, c, t, g, unknown or other
  modified_base (41)..(42): a, c, t, g, unknown or other
  modified_base (46)..(47): a, c, t, g, unknown or other
  modified_base (54)..(54): a, c, t, g, unknown or other
  modified_base (72)..(72): a, c, t, g, unknown or other
  modified_base (77)..(78): a, c, t, g, unknown or other
  modified_base (203)..(203): a, c, t, g, unknown or other
  modified_base (322)..(322): a, c, t, g, unknown or other
  modified_base (973)..(973): a, c, t, g, unknown or other
tactttcagcggggnnnaanggagtaaagtnaatacctttnntcanngacgttnccgcagaagaagcaccgnctaannccgtgccagcagccgcggtaatacggagggtgcaagcgttaatcggaattactgggcgtaaagcgcacgcaggcggtttgttaagtcagatgtgaaatccccgggctcaacctgggaactgcatntgatactggcaagcttgagtctcgtagaggggggtagaattccaggtgtagcggtgaaatgcgtagagatctggaggaataccggtggcgaaggcggccccctggacgaagactgacgntcaggtgcgaaagcgtggggagcaaacaggattagataccctggtagtccacgccgtaaacgatgtcgacttggaggttgtgcccttgaggcgtggcttccggagctaacgcgttaagtcgaccgcctggggagtacggccgcaaggttaaaactcaaatgaattgacgggggcccgcacaagcggtggagcatgtggtttaattcgatgcaacgcgaagaaccttacctggtcttgacatccacggaagttttcagagatgagaatgtgccttcgggaaccgtgagacaggtgctgcatggctgtcgtcagctcgtgttgtgaaatgttgggttaagtcccgcaacgagcgcaacccttatcctttgttgccagcggtccggccgggaactcaaaggagactgccagtgataaactggaggaaggtggggatgacgtcaagtcatcatggcccttacgaccagggctacacacgtgctacaatggcgcatacaaagagaagcgacctcgcgagagcaagcggacctcataaagtgcgtcgtagtccggattggagtctgcaactcgactccatgaagtcggaatcgctagtaatcgtggatcagaatgccacggtgaatacgttcccgggccttgtacacaccgcccgtnacaccatgggagtgggttgcaaaaga

SEQ ID NO: 1725 - DNA, 805 bp, Shigella dysenteriae
  modified_base (21)..(22): a, c, t, g, unknown or other
  modified_base (272)..(272): a, c, t, g, unknown or other
  modified_base (436)..(436): a, c, t, g, unknown or other
  modified_base (523)..(523): a, c, t, g, unknown or other
  modified_base (536)..(536): a, c, t, g, unknown or other
  modified_base (561)..(561): a, c, t, g, unknown or other
  modified_base (603)..(603): a, c, t, g, unknown or other
  modified_base (621)..(621): a, c, t, g, unknown or other
  modified_base (642)..(642): a, c, t, g, unknown or other
  modified_base (669)..(669): a, c, t, g, unknown or other
  modified_base (684)..(684): a, c, t, g, unknown or other
  modified_base (687)..(687): a, c, t, g, unknown or other
  modified_base (699)..(699): a, c, t, g, unknown or other
  modified_base (713)..(713): a, c, t, g, unknown or other
  modified_base (730)..(730): a, c, t, g, unknown or other
  modified_base (754)..(754): a, c, t, g, unknown or other
  modified_base (770)..(770): a, c, t, g, unknown or other
  modified_base (778)..(778): a, c, t, g, unknown or other
  modified_base (791)..(792): a, c, t, g, unknown or other
  modified_base (797)..(797): a, c, t, g, unknown or other
tcgaacggtaacaggaagcannttgctgctttgctgacgagtggcggacgggtgagtaatgtctgggaaactgcctgatggagggggataactactggaaacggtagctaataccgcataacgtcgcaagaccaaagagggggaccttcgggcctcttgccatcggatgtgcccagatgggattagctagtaggtggggtaaaggctcacctaggcgacgatccctagctggtctgagaggatgaccagccacactggaactgagacacggnccagactcctacgggaggcagcagtggggaatattgcacaatgggcgcaagcctgatgcagccatgccgcgtgtatgaagaaggccttcgggttgtaaagtactttcagcggggaggaagggagtaaagttaatacctttgctcattgacgttacccgcagaanaagcaccggctaactccgtgccagcagccgcggtaatacggagggtgcaagcgttaatcggaattactgggcgtaaagcgcacgcangcggtttgttaantcagatgtgaaatccccgggctcancctgggaactgcatctgatactggcaagcttgagtctcgtanaggggggtagaattccangtgtagcggtgaaatgcgtanagatctggaggaataccggtggcgaangcggccccctggacnaanactgacgctcangtgcgaaagcgtgnggagcaaacaggattanataccctggtagtccacgccgtanacgatgtcgacttggnggttgtgnccttgaggcgtgnnttccngagctaac

SEQ ID NO: 1726 - DNA, 1545 bp, Shigella flexneri
ttaaattgaagagtttgatcatggctcagattgaacgctggcggcaggcctaacacatgcaagtcgaacggtaacaggaagcagcttgctgtttcgctgacgagtggcggacgggtgagtaatgtctgggaaactgcctgatggagggggataactactggaaacggtagctaataccgcataacgtcgcaagaccaaagagggggaccttcgggcctcttgccatcggatgtgcccagatgggattagctagtaggtggggtaacggctcacctaggcgacgatccctagctggtctgagaggatgaccagccacactggaactgagacacggtccagactcctacgggaggcagcagtggggaatattgcacaatgggcgcaagcctgatgcagccatgccgcgtgtatgaagaaggccttcgggttgtaaagtactttcagcggggaggaagggagtaaagttaatacctttactcattgacgttacccgcagaagaagcaccggctaactccgtgccagcagccgcggtaatacggagggtgcaagcgttaatcggaattactgggcgtaaagcgcacgcaggcggtttgttaagtcagatgtgaaatccccgggctcaacctgggaactgcatctgatactggcaagcttgagtctcgtagaggggggtagaattccaggtgtagcggtgaaatgcgtagagatctggaggaataccggtggcgaaggcggccccctggacgaagactgacgctcaggtgcgaaagcgtggggagcaaacaggattagataccctggtagtccacgctgtaaacgatgtcgacttggaggttgtgcccttgaggtgtggcttccggagctaacgcgttaagtcgaccgcctggggagtacggccgcaaggttaaaactcaaatgaattgacgggggcccgcacaagcggtggagcatgtggtttaattcgatgcaacgcgaagaaccttacctggtcttgacatccacggaagttttcagagatgagaatgtgccttcgggaaccgtgagacaggtgctgcatggctgtcgtcagctcgtgttgtgaaatgttgggttaagtcccgcaacgagcgcaacccttatcctttgttgccagcggtccggccgggaactcaaaggagactgccagtgataaactggaggaaggtggggatgacgtcaagtcatcatggcccttacgaccagggctacacacgtgctacaatggcgcatacaaagagaagcgacctcgcgagagcaagcggacctcataaagtgcgtcgtagtccggattggagtctgcaactcgactccatgaagtcggaatcgctagtaatcgtggatcagaatgccacggtgaatacgttcccgggccttgtacacaccgcccgtcacaccatgggagtgggttgcaaaagaagtaggtagcttaaccttcgggagggcgcttaccactttgtgattcatgactggggtgaagtcgtaacaaggtaaccgtaggggaacctgcggttggatcacctccttac

SEQ ID NO: 1727 - DNA, 1368 bp, Shigella sonnei
gcttcgctgacgagtggcggacgggtgagtaatgtctgggaaactgcctgatggagggggataactactggaaacggtagctaataccgcataacgtcgcaagaccaaagagggggaccttcgggcctcttgccatcggatgtgcccagatgggattagcttgttggtggggtaacggctcaccaaggcgacgatccctagctggtctgagaggatgaccagccacactggaactgagacacggtccagactcctacgggaggcagcagtggggaatattgcacaatgggcgcaagcctgatgcagccatgccgcgtgtatgaagaaggccttcgggttgtaaagtactttcagcggggaggaagggagtaaagttaatacctttgctcattgacgttacccgcagaagaagcaccggctaactccgtgccagcagccgcggtaatacggagggtgcaagcgttaatcggaattactgggcgtaaagcgcacgcaggcggtttgttaagtcagatgtgaaatccccgggctcaacctgggaactgcatctgatactggcaagcttgagtctcgtagaggggggtagaattccaggtgtagcggtgaaatgcgtagagatctggaggaataccggtggcgaaggcggccccctggacgaagactgacgctcaggtgcgaaagcgtggggagcaaacaggattagataccctggtagtccacgccgtaaacgatgtcgacttggaggttgtgcccttgacgcgtggcttccggagctaacgcgttaagtcgaccgcctggggagtacggccgcaaggttaaaactcaaatgaattgacgggggcccgcacaagcggtggagcatgtggtttaattcgatgcaacgcgaagaaccttacctggtcttgacatccacggaagtttcagtctcgtagaatgtgccttcgggaacggtgagacagtggctgcatggctgtcgtcagctcgtgttgtgaaatgttgggttaagtcccgcaacgagcgcaacccttatcctttgttgccagcggtccggccgggaactcaaaggagactgccagtgataaactggaggaaggtggggatgacgtcaagtcatcatggcccttacgaccagggctacacacgtgctacaatggcgcatacaaagagaagcgacctcgcgagagcaagcggacctcataaagtgcgtcgtagtccggattggagtctgcaactcgactccatgaagtcggaatcgctagtaatcgtggatcagaatgccacggtgaatacgttcccgggccttgtacacaccgcccgtcacaccatgggagtgggttgcaaaagaagtaggtagcttaaccttcggga

SEQ ID NO: 1728 - DNA, 1539 bp, Shuttleworthia satelles
tttaacatgagagttcgatcctggctcaggatgaacgctggcggcgtgcttaacacatgcaagtcgaacgagaaatgatattacgatctcttcggagtgacggttttatttcgagtggcggacgggtgagtaacgcgtgagcaacctgccctataccgggggataccagttggaaacgactgttaataccgcataagcgcacgataagacatcttgttgtgtgaaaaactccggtggtataggatgggctcgcgtatgattagccagttggcggggtaaaggcccaccaaagcgacgatcattagccgacctgagagggcgaccggccacattgggactgagacacggcccaaactcctacgggaggcagcagtggggaatattgcacaatgggcgaaagcctgatgcagcgacgccgcgtgagtgaggaagtatttcggtatgtaaagctctatcagcagggaagaaagaaatgacggtacctgagtaagaagctccggctaaatacgtgccagcagccgcggtaatacgtatggagcaagcgttatccggatttactgggtgtaaagggagcgtaggcggcagagcaagtctgatgtgaaagcccggggctcaaccccggtagtgcattggaaactgttcggctcgagtgtcggaggggtaagcggaattcctggtgtagcggtgaaatgcgtagatatcaggaagaacaccggaggcgaaggcggcttactggacgattactgacgctgaggctcgaaagcgtggggagcgaacaggattagataccctggtagtccacgctgtaaacgatgaatactaggtgtcggtacccgaagggtatcggtgccgtcgcaaacgcattaagtattccacctggggagtacgttcgcaagaatgaaactcaaaggaattgacggggacccgcacaagcggtggagcatgtggtttaattcgaagcaacgcgaagaaccttaccaagtcttgacatcccgatgacaagcgatgtaatgtcgtctctcttcggagcatcggagacaggtggtgcatggttgtcgtcagctcgtgtcgtgagatgttgggttaagtcccgcaacgagcgcaacccttgttcttagtagccagcaggtgaagctgggcactctaaggagactgccggggtgaacccggaggaaggtggggatgacgtcaaatcatcatgccccttatgacttgggctacacacgtgctacaatggcgtaaacaaagggaggcgaagccgtgaggccaagcgaatcccaaaaataacgtctcagttcggattgtagtctgcaactcgactacatgaagctggaatcgctagtaatcgcagatcagcatgctgcggtgaatacgttcccgggtcttgtacacaccgcccgtcacaccatgggagttggtaatgcccgaagtcagtgacccaaccgcaaggagggagctgccgaaggcaggactgataactggggtgaagtcgtaacaaggtagccgtatcggaaggtgcggctggatcacctcctttct

SEQ ID NO: 1729 - DNA, 1451 bp, Shuttleworthia sp.
  MSX8B
gaacgctggcggcgtgcttaacacatgcaagtcgaacgagaaatgatattacgatctcttcggagtgacgattttatttcgagtggcggacgggtgagtaacgcgtgagcaacctgccctgtaccgggggataccagttggaaacgactgttaataccgcataagcgcacgataagacatcttgttgtgtgaaaaactccggtggtataggatgggctcgcgtatgattagccagttggcggggtaaaggcccaccaaagcgacgatcattagccgacctgagagggcgaccggccacattgggactgagacacggcccaaactcctacgggaggcagcagtggggaatattgcacaatgggcgaaagcctgatgcagcgacgccgcgtgagtgaggaagtatttcggtatgtaaagctctatcagcagggaagaaagaaatgacggtacctgagtaagaagctccggctaaatacgtgccagcagccgcggtaatacgtatggagcaagcgttatccggatttactgggtgtaaagggagcgtaggcggcagagcaagtctgatgtgaaagcccggggctcaaccccggtagtgcattggaaactgttcagctggagtgtcggaggggtaagcggaattcctggtgtagcggtgaaatgcgtagatatcaggaagaacaccggaggcgaaggcggcttactggacgattactgacgctgaggctcgaaagcgtggggagcgaacaggattagataccctggtagtccacgctgtaaacgatgaatactaggtgtcggtacccgaagggtatcggtgccgtcgcaaacgcattaagtattccacctggggagtacgttcgcaagaatgaaactcaaaggaattgacggggacccgcacaagcggtggagcatgtggtttaattcgaagcaacgcgaagaaccttaccaagtcttgacatcccgatgacaagcgatgtaatgtcgtctctcttcggagcatcggagacaggtggtgcatggttgtcgtcagctcgtgtcgtgagatgttgggttaagtcccgcaacgagcgcaacccttgttcttagtagccagcaggtgacgctgggcactctaaggagactgccggggtgaacccggaggaaggtggggatgacgtcaaatcatcatgccccttatgacttgggctacacacgtgctacaatggcgtaaacaaagggaggcgaagccgtgaggccaagcgaatcccaaaaataacgtctcagttcggattgtagtctgcaactcgactacatgaagctggaatcgctagtaatcgcagatcagcatgctgcggtgaatacgttcccgggtcttgtacacaccgcccgtcacaccatgggagttggtaatgcccgaagtcagtgacccaaccgcaaggagggagctgccgaaggcaggactgataactggg

SEQ ID NO: 1730 - DNA, 1241 bp, Shuttleworthia sp.
  oral taxon G69
gatgaacgctggcggcgtgcttaacacaagcaagtcgaacgagaaatgatattacgatctcttcggagtgacggttttatttcgagtggcggacgggtgagtaacgcgtgagcaacctgccctgtaccgggggataccagttggaaacgactgttaataccgcataagcgcacgataagacatcttgttgtgtgaaaaactccggtggtataggatgggctcgcgtatgattagccagttggcggggtaaaggcccaccaaagcgacgatcattagccgacctgagagggcgaccggccacattgggactgagacacggcccaaactcctacgggaggcagcagtggggaatattgcacaatgggcgaaagcctgatgcagcgacgccgcgtgagtgaggaagtatttcggtatgtaaagctctatcagcagggaagaaagaaatgacggtacctgagtaagaagctccggctaaatacgtgccagcagccgcggtaatacgtatggagcaagcgttatccggatttactgggtgtaaagggagcgtaggcggcagagcaagtctgatgtgaaagcccggggctcaaccccggtagtgcattggaaactgttcagctcgagtgtcggaggggtaagcggaattcctggtgtagcggtgaaatgcgtagatatcaggaagaacaccggaggcgaaggcggcttactggacgattactgacgctgaggctcgaaagcgtggggagcgaacaggattagataccctggtagtccacgctgtaaacgatgaatactaggtgtcggtacccgaagggtatcggtgccgtcgcaaacgcattaagtattccacctggggagtacgttcgcaagaatgaaactcaaaggaattgacggggacccgcacaagcggtggagcatgtggtttaattcgaagcaacgcgaagaaccttacccagtcttgacatcccgatgacaagcgatgtaatgtcgtctctcttcggagcatcggagacagggtggtgcatggctagtcgtcagcctcgtgtcgtgagaagttggggttaagttcccgcgacgagcgccacccctggttcttgttagccagcaggtgacgctgggcaccctaggaaactggcgaggtgacccgggagaagggtgggaatacgtcaatcatcatgccccttattacctgggctacacgttcctcaagggcttacccaggggaggcaagcccgtaaggcacc

SEQ ID NO: 1731 - DNA, 1547 bp, Simonsiella muelleri
ttgaacataagagtttgatcctggctcagattgaacgctggcggcatgctttacacatgcaagtcggacggcagcggggtagtgcttgcattactgccggcgagtggcgaacgggtgagtataatattggaacgtaccgagtaatgggggataactatccgaaaggatggctaataccgcatacgtcctgagggagaaagcgggggacaggcaactgcctcgcgttatttgagcggccaatatcggattagctagttggtggggtaaaggcttaccaaggcgacgatccgtagcgggtctgagaggatgatccgccacactgggactgagacacggcccagactcctacgggaggcagcagtggggaattttggacaatggggggaaccctgatccagccatgtcgcgtgtatgaagaaggccttagggttgtaaagtacttttgttagggaagaaaaggcatttgctaatatcagatgctgatgacggtacctaaagaataagcaccggctaactacgtgccagcagccgcggtaatacgtagggtgcgagcgttaatcggaattactgggcgtaaagcgagcgcagacggttacttaagcaagatgtgaaatccccgagctcaacttgggaactgcgttttgaactgggtagctagagtgtgtcagaggggggtagaattccacgtgtagcagtgaaatgcgtagagatgtggaggaataccgatggcgaaggcagccccctgggatagcactgacgttcatgctcgaaagcgtgggtagcaaacaggattagataccctggtagtccacgccctaaacgatgtcaattagctgttggggcactagatgccttagtagcgaagctaacgcgtgaaattgaccgcctggggagtacggtcgcaagattaaaactcaaaggaattgacggggacccgcacaagcggtggatgatgtggattaattcgatgcaacgcgaagaaccttacctggtcttgacatgtacggaatctctcagagacgggagagtgccttcgggagccgtaacacaggtgctgcatggctgtcgtcagctcgtgtcgtgagatgttgggttaagtcccgcaacgagcgcaacccttgtcattagttgccatcatttggttgggcactctaatgagactgccggtgacaaaccggaggaaggtggggatgacgtcaagtcctcatggcccttatgaccagggcttcacacgtcatacaatggtcggtacagagggtagccaagccgcgaggtggagccaatcccaaaaaaccgatcgtagtccggattgcactctgcaactcgagtgcatgaagtcggaatcgctagtaatcgcaggtcagcatactgcggtgaatacgttcccgggtcttgtacacaccgcccgtcacaccatgggagtgggggataccagaagtaggtagaataaccgcgaggagttcgcttaccacggtatgcttcatgactggggtgaagtcgtaacaaggtagccgtaggggaacctgcggctggatcacctcctttct

SEQ ID NO: 1732 - DNA, 1474 bp, Slackia equolifaciens
agagtttgatcctggctcaggatgaacgctggcggcgtgcctaacacatgcaagtcgaacgagtaaggcgccttcgggcgcgtatagagtggcgaacgggtgagtaacacgtgaccaacctgccccccgccccgggacaaccgcccgaaagggcggctaataccgggcgaaccggagaggacgcatgccccctccggcaaagctcaggcggcgggggatggggtcgcggcccatcaggtagacggcggggtgacggcccaccgtgcctacaacgggtagccgggctgagaggccgatcggccacattgggactgagacacggcccagactcctacgggaggcagcagtggggaattttgcgcaatgggggcaaccctgacgcagcaacgccgcgtgcgggacgaaggccttcgggtcgtaaaccgctttcagcagggaagaaaccatgacggtacctgcagaagaagccccggctaactacgtgccagcagccgcggtaatacgtagggggcgagcgttatccggattcattgggcgtaaagcgcgcgcaggcggcctctcaagcggcaccgtcgaagccgggggctcaacccccggaagcgggccgaactggggggctcgaggcaggcagaggaaggcggaattcccggtgtagcggtggaatgcgcagatatcgggaagaacaccgacggcgaaggcagccttctgggcctgtcctgacgctcaggcgcgaaagccgggggagcgaacaggattagataccctggtagtcccggccgtaaacgatgggcgctaggtgtgggggcgacatgcctccgtgccgaagccaacgcattaagcgccccgcctggggagtacggccgcaaggctaaaactcaaaggaattgacgggggcccgcacaagcggcggagcatgtggcttaattcgaagcaacgcgaagaaccttaccagggcttgacatcaccgtgagccggcggagacgccggggccgagaggagcggtgacaggtggtgcatggctgtcgtcagctcgtgtcgtgagatgttgggttaagtcccgcaacgagcgcaacccctgccgtatgttgccagcatgtaacgatggggactcatacgggaccgccggcgtcaagccggaggaaggcggggacgacgtcaagtcatcatgccccttacgccctgggctgcacacgtgctacaatggccggtacagagggaagccaccccgcgagggggagccgatcccgaaaagccggccccagttcggatcggaggctgcaacccgcctccgtgaagccggagtcgctagtaatcgcggatcagcatgccgcggtgaatacgttcccgggccttgtacacaccgcccgtcacaccacccgagtcgtctgcacccgaagccgccggccgaacccgagaggggcggaggcgtcgaaggtgtggagggtgaggggggtgaagtcgtaacaaggtaacc

SEQ ID NO: 1733 - DNA, 1509 bp, Slackia exigua
ggagagtttgatcctggctcaggatgaacgctggcggcgcgcctaacacatgcaagtcgaacggttaaggccccctttagggggcgcatagagtggcgaacgggtgagtaacacgtgaccaacccgcccccccaccgggacaacctcgggaaaccgaggctaataccggatacgccggggcccccgcatgggggccccgggaaagccttggcgggaggggacggggtcgcggcccatcaggtagacggcggggcgaaggcccgccgtgccgacgacgggtagccgggctgagaggccgatcggccacattgggactgagacacggcccagactcctacgggaggcagcagtggggaatattgcgcaatggggggaaccctgacgcagcgacgccgcgtgcgggaaggaggccttcgggtcgtaaaccgctttcagcagggaagaagcctgacggtacctgcagaagaagccccggctaactacgtgccagcagccgcggtaatacgtagggggcgagcgttatccggattcattgggcgtaaagcgcgcgcaggcggcccgccaagcggcctcgtcgaagccgggggctcaacccccggaagcgacccgaactggcgggctcgagtggggcaggggaggatggaattcccggtgtagcggtgaaatgcgcagatatcgggaggaacaccgacggcgaaggcagccctctgggccttcactgacgctgaggcgcgaaagctgggggagcgaacaggattagataccctggtagtcccagccgtaaacgatgggcgctaggtgcggggggacacgaccctccgtgccgcagccaacgcattaagcgccccgcctggggagtacggccgcaaggctaaaactcaaaggaattgacgggggcccgcacaagcagcggagcatgtggcttaattcgaagcaacgcgaagaaccttaccagggcttgacatgcgggtgaagcggcggagacgccgtggccggaaggagcccgcgcaggtggtgcatggctgtcgtcagctcgtgtcgtgagatgttgggttaagtcccgcaacgagcgcaacccccgccgcatgttgccagcattcagttgggcactcatgcgggaccgccggcgccaagccggaggaaggcggggacgacgtcaagtcatcatgccccccatgccctgggccgcacacgtgctacaatggccggcacagcgggcagcggacccgcgagggcgagcgaatcccttaaagccggccccagttcggatcggaggctgcaacccgcctccgtgaagccggagttgctagtaatcgcggatcagcacgccgcggtgaatgcgttcccgggccttgtacacaccgcccgtcacaccacccgagtcgtctgcacccgaagccgccggcccaacccgcaagggggggaggcgtcgaaggtgtggagggtgaggggggtgaagtcgtaacaaggtagccgtaccggaaggtgcggctggatcacctcctttct

(The sequence listing continues in the following parts.)
